United States Patent Application Publication US 2023/0026259 A1 - sequence listing, part 42

SEQ ID NO: 131144 - DNA, 2986 bp, Homo sapiens
  Payload ID: 5609
  Gene Symbol: EIF3C
  Gene Name: eukaryotic translation initiation factor 3, subunit C
  Uniprot ID: Q99613
  ENST ID: ENST00000566866
  CDS Start-End: 161-2902
tttttgggcctcgtgcttcgtggtgggagacccaggtcgaggtccgggtggggccggtgaggggttgggcgtcgggaggtgttggctcgggcctcttcgcgtggccggtgacgccttggctcccccgcaggtccggccgtagcacctccgcgccgtcgccatgtcgcggtttttcaccaccggttcggacagcgagtccgagtcgtccttgtccggggaggagctcgtcaccaaacctgtcggaggcaactatggcaaacagccattgttgctgagcgaggatgaagaagataccaagagagttgtccgcagtgccaaggacaagaggtttgaggagctgaccaaccttatccggaccatccgtaatgccatgaagattcgtgatgtcaccaagtgcctggaagagtttgagctcctgggaaaagcatatgggaaggccaaaagcattgtggacaaagaaggtgtcccccggttctatatccgcatcctggctgacctagaggactatcttaatgagctttgggaagataaggaagggaagaagaagatgaacaagaacaatgccaaggctctgagcaccttgcgtcagaagatccgaaaatacaaccgtgatttcgagtcccatatcacaagctacaagcagaaccccgagcagtctgcggatgaagatgctgagaaaaatgaggaggattcagaaggctcttcagatgaggatgaggatgaggacggagtcagtgctgcaactttcttgaagaagaaatcagaagctccttctggggagagtcgcaagttcctcaaaaagatggatgatgaagatgaggactcagaagattccgaagatgatgaagactgggacacaggttccacatcttccgattccgactcagaggaggaagaagggaaacaaaccgcgctggcctcaagatttcttaaaaaggcacccaccacagatgaggacaagaaggcagccgagaagaaacgggaggacaaagctaagaagaagcacgacaggaaatccaagcgcctggatgaggaggaggaggacaatgaaggcggggagtgggaaagggtccggggcggagtgccgttggttaaggagaagccaaaaatgtttgccaagggaactgagatcacccatgctgttgttatcaagaaactgaatgagatcctacaggcacgaggcaagaagggaactgatcgtgctgcccagattgagctgctgcaactgctggttcagattgcagcggaaaacaacctgggagagggcgtcattgtcaagatcaagttcaatatcatcgcctctctctatgactacaaccccaacctggcaacctacatgaagccagagatgtgggggaagtgcctggactgcatcaatgagctgatggatatcctgtttgcaaatcccaacatttttgttggagagaatattctggaagagagtgagaacctgcacaacgctgaccagccactgcgtgtccgtggctgcatcctaactctggtggaacgaatggatgaagaatttaccaaaataatgcaaaatactgaccctcactcccaagagtacgtggagcacttgaaggatgaggcccaggtgtgtgccatcatcgagcgtgtgcagcgctacctggaggagaagggcactaccgaggaggtctgccgcatctacctgctgcgcatcctgcacacctactacaagtttgattacaaggcccatcagcgacagctgaccccgcctgagggctcctcaaagtctgagcaagaccaggcagaaaatgagggcgaggactcggctgtgttgatggagagactgtgcaagtacatctacgccaaggaccgcacagaccggatccgcacatgtgccatcctctgccacatctaccaccatgctctgcactcgcgctggtaccaggcccgcgacctcatgctcatgagccacttgcaggacaacattcagcatgcagacccgccagtgcagatcctttacaaccgcaccatggtgcagctgggcatctgtgccttccgccaaggcctgaccaaggacgcacacaacgccctgctggacatccagtcgagtggccgagccaaggagcttctgggccagggcctgctgctgcgcagcctgcaggagcgcaaccaggagcaggagaaggtggagcggcgccgtcaggtccccttccacctgcacatcaacctggagctgctggagtgtgtctacctggtgtctgccatgctcctggagatcccctacatggccgcccatgagagcgatgcccgccgacgcatgatcagcaagcagttccaccaccagctgcgcgtgggcgagcgacagcccctgctgggtccccctgagtccatgcgggaacatgtggtcgctgcctccaaggccatgaagatgggtgactggaagacctgtcacagttttatcatcaatgagaagatgaatgggaaagtgtgggaccttttccccgaggctgacaaagtccgcaccatgctggttaggaagatccaggaagagtcactgaggacctacctcttcacctacagcagtgtctatgactccatcagcatggagacgctgtcagacatgtttgagctggatctgcccactgtgcactccatcatcagcaaaatgatcattaatgaggagctgatggcctccctggaccagccaacacagacagtggtgatgcaccgcactgagcccactgcccagcagaacctggctctgcagctggccgagaagctgggcagcctggtggagaacaacgaacgggtgtttgaccacaagcagggcacctacgggggctacttccgagaccagaaggacggctaccgcaaaaacgagggctacatgcgccgcggtggctaccgccagcagcagtctcagacggcctactgagctctccactctgtttcccgcctgggccatccaaccttgaagtcctaaaccacacctcagtcactaaaggtctgtttaaagttg

SEQ ID NO: 131145 - DNA, 3128 bp, Homo sapiens
  Payload ID: 5609
  Gene Symbol: EIF3C
  Gene Name: eukaryotic translation initiation factor 3, subunit C
  Uniprot ID: Q99613
  ENST ID: ENST00000566501
  CDS Start-End: 302-3043
gtggcaggcagccctgcaccggacacacagtggcattcaacttcctgcctgccagccccagtgtgtggttcccagcctgacaaccttggcaccccagcaccccagcaggaggggtttctgcttgtggtcccctggccaccagcctcggccagctggttgtggaccagccgtgacctggggcaacccagccaacctcaccgtccaatgggctgcagccacctctctccagtgaggtctgagacccagccttaacgaggctacccccttccaggtccggccgtagcacctccgcgccgtcgccatgtcgcggtttttcaccaccggttcggacagcgagtccgagtcgtccttgtccggggaggagctcgtcaccaaacctgtcggaggcaactatggcaaacagccattgttgctgagcgaggatgaagaagataccaagagagttgtccgcagtgccaaggacaagaggtttgaggagctgaccaaccttatccggaccatccgtaatgccatgaagattcgtgatgtcaccaagtgcctggaagagtttgagctcctgggaaaagcatatgggaaggccaaaagcattgtggacaaagaaggtgtcccccggttctatatccgcatcctggctgacctagaggactatcttaatgagctttgggaagataaggaagggaagaagaagatgaacaagaacaatgccaaggctctgagcaccttgcgtcagaagatccgaaaatacaaccgtgatttcgagtcccatatcacaagctacaagcagaaccccgagcagtctgcggatgaagatgctgagaaaaatgaggaggattcagaaggctcttcagatgaggatgaggatgaggacggagtcagtgctgcaactttcttgaagaagaaatcagaagctccttctggggagagtcgcaagttcctcaaaaagatggatgatgaagatgaggactcagaagattccgaagatgatgaagactgggacacaggttccacatcttccgattccgactcagaggaggaagaagggaaacaaaccgcgctggcctcaagatttcttaaaaaggcacccaccacagatgaggacaagaaggcagccgagaagaaacgggaggacaaagctaagaagaagcacgacaggaaatccaagcgcctggatgaggaggaggaggacaatgaaggcggggagtgggaaagggtccggggcggagtgccgttggttaaggagaagccaaaaatgtttgccaagggaactgagatcacccatgctgttgttatcaagaaactgaatgagatcctacaggcacgaggcaagaagggaactgatcgtgctgcccagattgagctgctgcaactgctggttcagattgcagcggaaaacaacctgggagagggcgtcattgtcaagatcaagttcaatatcatcgcctctctctatgactacaaccccaacctggcaacctacatgaagccagagatgtgggggaagtgcctggactgcatcaatgagctgatggatatcctgtttgcaaatcccaacatttttgttggagagaatattctggaagagagtgagaacctgcacaacgctgaccagccactgcgtgtccgtggctgcatcctaactctggtggaacgaatggatgaagaatttaccaaaataatgcaaaatactgaccctcactcccaagagtacgtggagcacttgaaggatgaggcccaggtgtgtgccatcatcgagcgtgtgcagcgctacctggaggagaagggcactaccgaggaggtctgccgcatctacctgctgcgcatcctgcacacctactacaagtttgattacaaggcccatcagcgacagctgaccccgcctgagggctcctcaaagtctgagcaagaccaggcagaaaatgagggcgaggactcggctgtgttgatggagagactgtgcaagtacatctacgccaaggaccgcacagaccggatccgcacatgtgccatcctctgccacatctaccaccatgctctgcactcgcgctggtaccaggcccgcgacctcatgctcatgagccacttgcaggacaacattcagcatgcagacccgccagtgcagatcctttacaaccgcaccatggtgcagctgggcatctgtgccttccgccaaggcctgaccaaggacgcacacaacgccctgctggacatccagtcgagtggccgagccaaggagcttctgggccagggcctgctgctgcgcagcctgcaggagcgcaaccaggagcaggagaaggtggagcggcgccgtcaggtccccttccacctgcacatcaacctggagctgctggagtgtgtctacctggtgtctgccatgctcctggagatcccctacatggccgcccatgagagcgatgcccgccgacgcatgatcagcaagcagttccaccaccagctgcgcgtgggcgagcgacagcccctgctgggtccccctgagtccatgcgggaacatgtggtcgctgcctccaaggccatgaagatgggtgactggaagacctgtcacagttttatcatcaatgagaagatgaatgggaaagtgtgggaccttttccccgaggctgacaaagtccgcaccatgctggttaggaagatccaggaagagtcactgaggacctacctcttcacctacagcagtgtctatgactccatcagcatggagacgctgtcagacatgtttgagctggatctgcccactgtgcactccatcatcagcaaaatgatcattaatgaggagctgatggcctccctggaccagccaacacagacagtggtgatgcaccgcactgagcccactgcccagcagaacctggctctgcagctggccgagaagctgggcagcctggtggagaacaacgaacgggtgtttgaccacaagcagggcacctacgggggctacttccgagaccagaaggacggctaccgcaaaaacgagggctacatgcgccgcggtggctaccgccagcagcagtctcagacggcctactgagctctccactctgtttcccgcctgggccatccaaccttgaagtcctaaaccacacctcagtcactaaaggtctgtttaaagttgt

SEQ ID NO: 131146 - DNA, 3085 bp, Homo sapiens
  Payload ID: 5610
  Gene Symbol: EIF3CL
  Gene Name: eukaryotic translation initiation factor 3, subunit C-like
  Uniprot ID: B5ME19
  ENST ID: ENST00000380876
  CDS Start-End: 124-2868
agtcggcgcttcccggaagtgacgcgaggacccgccttctctctcggcgtttccgctgtcagggccctgcggtgtgactcgcgggctcagctggtccggccgtagcacctccgcgccgtcgccatgtcgcggtttttcaccaccggttcggacagcgagtccgagtcgtccttgtccggggaggagctcgtcaccaaacctgtcggaggcaactatggcaaacagccattgttgctgagcgaggatgaagaagataccaagagagttgtccgcagtgccaaggacaagaggtttgaggagctgaccaaccttatccggaccatccgtaatgccatgaagattcgtgatgtcaccaagtgcctggaagagtttgagctcctgggaaaagcatatgggaaggccaaaagcattgtggacaaagaaggtgtcccccggttctatatccgcatcctggctgacctagaggactatcttaatgagctttgggaagataaggaagggaagaagaagatgaacaagaacaatgccaaggctctgagcaccttgcgtcagaagatccgaaaatacaaccgtgatttcgagtcccatatcacaagctacaagcagaaccccgagcagtctgcggatgaagatgctgagaaaaatgaggaggattcagaaggctcttcagatgaggatgaggatgaggacggagtcagtgctgcaactttcttgaagaagaaatcagaagctccttctggggagagtcgcaagttcctcaaaaagatggatgatgaagatgaggactcagaagattccgaagatgatgaagactgggacacaggttccacatcttccgattccgactcagaggaggaagaagggaaacaaaccgcgctggcctcaagatttcttaaaaaggcacccaccacagatgaggacaagaaggcagccgagaagaaacgggaggacaaagctaagaagaagcacgacaggaaatccaagcgcctggatgaggaggaggaggaggacaatgaaggcggggagtgggaaagggtccggggcggagtgccgttggttaaggagaagccaaaaatgtttgccaagggaactgagatcacccatgctgttgttatcaagaaactgaatgagatcctacaggcacgaggcaagaagggaactgatcgtgctgcccagattgagctgctgcaactgctggttcagattgcagcggaaaacaacctgggagagggcgtcattgtcaagatcaagttcaatatcatcgcctctctctatgactacaaccccaacctggcaacctacatgaagccagagatgtgggggaagtgcctggactgcatcaatgagctgatggatatcctgtttgcaaatcccaacatttttgttggagagaatattctggaagagagtgagaacctgcacaacgctgaccagccactgcgtgtccgtggctgcatcctaactctggtggaacgaatggatgaagaatttaccaaaataatgcaaaatactgaccctcactcccaagagtacgtggagcacttgaaggatgaggcccaggtgtgtgccatcatcgagcgtgtgcagcgctacctggaggagaagggcactaccgaggaggtctgccgcatctacctgctgcgcatcctgcacacctactacaagtttgattacaaggcccatcagcgacagctgaccccgcctgagggctcctcaaagtctgagcaagaccaggcagaaaatgagggcgaggactcggctgtgttgatggagagactgtgcaagtacatctacgccaaggaccgcacagaccggatccgcacatgtgccatcctctgccacatctaccaccatgctctgcactcgcgctggtaccaggcccgcgacctcatgctcatgagccacttgcaggacaacattcagcatgcagacccgccagtgcagatcctttacaaccgcaccatggtgcagctgggcatctgtgccttccgccaaggcctgaccaaggacgcacacaacgccctgctggacatccagtcgagtggccgagccaaggagcttctgggccagggcctgctgctgcgcagcctgcaggagcgcaaccaggagcaggagaaggtggagcggcgccgtcaggtccccttccacctgcacatcaacctggagctgctggagtgtgtctacctggtgtctgccatgctcctggagatcccctacatggccgcccatgagagcgatgcccgccgacgcatgatcagcaagcagttccaccaccagctgcgcgtgggcgagcgacagcccctgctgggtccccctgagtccatgcgggaacatgtggtcgctgcctccaaggccatgaagatgggtgactggaagacctgtcacagttttatcatcaatgagaagatgaatgggaaagtgtgggaccttttccccgaggctgacaaagtccgcaccatgctggttaggaagatccaggaagagtcactgaggacctacctcttcacctacagcagtgtctatgactccatcagcatggagacgctgtcagacatgtttgagctggatctgcccactgtgcactccatcatcagcaaaatgatcattaatgaggagctgatggcctccctggaccagccaacacagacagtggtgatgcaccgcactgagcccactgcccagcagaacctggctctgcagctggccgagaagctgggcagcctggtggagaacaacgaacgggtgtttgaccacaagcagggcacctacgggggctacttccgagaccagaaggacggctaccgcaaaaacgagggctacatgcgccgcggtggctaccgccagcagcagtctcagacggcctactgagctctccactctgtttcccgcctgggccatccaaccttgaagtcctaaaccacacctcagtcactaaaggtctgtttaaagttgttctggttgattgcttgttgccacaaaggtgtgttgagcccattcatttgctgattatatttctgagctgctaccacatgacagacacaaggctcagatgaagaggtgaattgaacacgttcctgacctcaaa

SEQ ID NO: 131147 - DNA, 3053 bp, Homo sapiens
  Payload ID: 5610
  Gene Symbol: EIF3CL
  Gene Name: eukaryotic translation initiation factor 3, subunit C-like
  Uniprot ID: B5ME19
  ENST ID: ENST00000398944
  CDS Start-End: 90-2834
ctctctcggcgtttccgctgtcagggccctgcggtgtgactcgcgggctcagctggttggtccggccgtagcacctccgcgccgtcgccatgtcgcggtttttcaccaccggttcggacagcgagtccgagtcgtccttgtccggggaggagctcgtcaccaaacctgtcggaggcaactatggcaaacagccattgttgctgagcgaggatgaagaagataccaagagagttgtccgcagtgccaaggacaagaggtttgaggagctgaccaaccttatccggaccatccgtaatgccatgaagattcgtgatgtcaccaagtgcctggaagagtttgagctcctgggaaaagcatatgggaaggccaaaagcattgtggacaaagaaggtgtcccccggttctatatccgcatcctggctgacctagaggactatcttaatgagctttgggaagataaggaagggaagaagaagatgaacaagaacaatgccaaggctctgagcaccttgcgtcagaagatccgaaaatacaaccgtgatttcgagtcccatatcacaagctacaagcagaaccccgagcagtctgcggatgaagatgctgagaaaaatgaggaggattcagaaggctcttcagatgaggatgaggatgaggacggagtcagtgctgcaactttcttgaagaagaaatcagaagctccttctggggagagtcgcaagttcctcaaaaagatggatgatgaagatgaggactcagaagattccgaagatgatgaagactgggacacaggttccacatcttccgattccgactcagaggaggaagaagggaaacaaaccgcgctggcctcaagatttcttaaaaaggcacccaccacagatgaggacaagaaggcagccgagaagaaacgggaggacaaagctaagaagaagcacgacaggaaatccaagcgcctggatgaggaggaggaggaggacaatgaaggcggggagtgggaaagggtccggggcggagtgccgttggttaaggagaagccaaaaatgtttgccaagggaactgagatcacccatgctgttgttatcaagaaactgaatgagatcctacaggcacgaggcaagaagggaactgatcgtgctgcccagattgagctgctgcaactgctggttcagattgcagcggaaaacaacctgggagagggcgtcattgtcaagatcaagttcaatatcatcgcctctctctatgactacaaccccaacctggcaacctacatgaagccagagatgtgggggaagtgcctggactgcatcaatgagctgatggatatcctgtttgcaaatcccaacatttttgttggagagaatattctggaagagagtgagaacctgcacaacgctgaccagccactgcgtgtccgtggctgcatcctaactctggtggaacgaatggatgaagaatttaccaaaataatgcaaaatactgaccctcactcccaagagtacgtggagcacttgaaggatgaggcccaggtgtgtgccatcatcgagcgtgtgcagcgctacctggaggagaagggcactaccgaggaggtctgccgcatctacctgctgcgcatcctgcacacctactacaagtttgattacaaggcccatcagcgacagctgaccccgcctgagggctcctcaaagtctgagcaagaccaggcagaaaatgagggcgaggactcggctgtgttgatggagagactgtgcaagtacatctacgccaaggaccgcacagaccggatccgcacatgtgccatcctctgccacatctaccaccatgctctgcactcgcgctggtaccaggcccgcgacctcatgctcatgagccacttgcaggacaacattcagcatgcagacccgccagtgcagatcctttacaaccgcaccatggtgcagctgggcatctgtgccttccgccaaggcctgaccaaggacgcacacaacgccctgctggacatccagtcgagtggccgagccaaggagcttctgggccagggcctgctgctgcgcagcctgcaggagcgcaaccaggagcaggagaaggtggagcggcgccgtcaggtccccttccacctgcacatcaacctggagctgctggagtgtgtctacctggtgtctgccatgctcctggagatcccctacatggccgcccatgagagcgatgcccgccgacgcatgatcagcaagcagttccaccaccagctgcgcgtgggcgagcgacagcccctgctgggtccccctgagtccatgcgggaacatgtggtcgctgcctccaaggccatgaagatgggtgactggaagacctgtcacagttttatcatcaatgagaagatgaatgggaaagtgtgggaccttttccccgaggctgacaaagtccgcaccatgctggttaggaagatccaggaagagtcactgaggacctacctcttcacctacagcagtgtctatgactccatcagcatggagacgctgtcagacatgtttgagctggatctgcccactgtgcactccatcatcagcaaaatgatcattaatgaggagctgatggcctccctggaccagccaacacagacagtggtgatgcaccgcactgagcccactgcccagcagaacctggctctgcagctggccgagaagctgggcagcctggtggagaacaacgaacgggtgtttgaccacaagcagggcacctacgggggctacttccgagaccagaaggacggctaccgcaaaaacgagggctacatgcgccgcggtggctaccgccagcagcagtctcagacggcctactgagctctccactctgtttcccgcctgggccatccaaccttgaagtcctaaaccacacctcagtcactaaaggtctgtttaaagttgttctggttgattgcttgttgccacaaaggtgtgttgagcccattcatttgctgattatatttctgagctgctaccacatgacagacacaaggctcagatgaagaggtgaattgaacacgttcctgacctcaaaga

SEQ ID NO: 131148 - DNA, 2155 bp, Homo sapiens
  Payload ID: 5611
  Gene Symbol: EIF3D
  Gene Name: eukaryotic translation initiation factor 3, subunit D
  Uniprot ID: O15371
  ENST ID: ENST00000216190
  CDS Start-End: 372-2018
gagcttcgattgcgcggccgccaagtttcagtgatgaacgccctctttgggcgtccccggataccgcctgacgtagtgccaatcacacctctcgcgtctcggcgcctcggaggctaatgaggacgcctggcgaaacgcagtaacggatttccgggtggaccttcgctttacggctcgtgagttcttccgcccaacccagaggaagcgggagagcagtttacgacagcgccggtcgtgtttacggcggcgcccgctgcgcgcgcatgtttcctcttttcctggtttctcaagagtgctgctgctaacgcggtccccggcacgcaccatctgttgccatcccggccggccgaggccattgcagattttggaagatggcaaagttcatgacacccgtgatccaggacaacccctcaggctggggtccctgtgcggttcccgagcagtttcgggatatgccctaccagccgttcagcaaaggagatcggctaggaaaggttgcagactggacaggagccacataccaagataagaggtacacaaataagtactcctctcagtttggtggtggaagtcaatatgcttatttccatgaggaggatgaaagtagcttccagctggtggatacagcgcgcacacagaagacggcctaccagcggaatcgaatgagatttgcccagaggaacctccgcagagacaaagatcgtcggaacatgttgcagttcaacctgcagatcctgcctaagagtgccaaacagaaagagagagaacgcattcgactgcagaaaaagttccagaaacaatttggggttaggcagaaatgggatcagaaatcacagaaaccccgagactcttcagttgaagttcgtagtgattgggaagtgaaagaggaaatggattttcctcagttgatgaagatgcgctacttggaagtatcagagccacaggacattgagtgttgtggggccctagaatactacgacaaagcctttgaccgcatcaccacgaggagtgagaagccactgcggagcatcaagcgcatcttccacactgtcaccaccacagacgaccctgtcatccgcaagctggcaaaaactcaggggaatgtgtttgccactgatgccatcctggccacgctgatgagctgtacccgctcagtgtattcctgggatattgtcgtccagagagttgggtccaaactcttctttgacaagagagacaactctgactttgacctcctgacagtgagtgagactgccaatgagccccctcaagatgaaggtaattccttcaattcaccccgcaacctggccatggaggcaacctacatcaaccacaatttctcccagcagtgcttgagaatggggaaggaaagatacaacttccccaacccaaacccgtttgtggaggacgacatggataagaatgaaatcgcctctgttgcgtaccgttaccgcaggtggaagcttggagatgatattgaccttattgtccgttgtgagcacgatggcgtcatgactggagccaacggggaagtgtccttcatcaacatcaagacactcaatgagtgggattccaggcactgtaatggcgttgactggcgtcagaagctggactctcagcgaggggctgtcattgccacggagctgaagaacaacagctacaagttggcccggtggacctgctgtgctttgctggctggatctgagtacctcaagcttggttatgtgtctcggtaccacgtgaaagactcctcacgccacgtcatcctaggcacccagcagttcaagcctaatgagtttgccagccagatcaacctgagcgtggagaatgcctggggcattttacgctgcgtcattgacatctgcatgaagctggaggagggcaaatacctcatcctcaaggaccccaacaagcaggtcatccgtgtctacagcctccctgatggcaccttcagctctgatgaagatgaggaggaagaggaggaggaagaagaggaagaagaagaggaagaaacttaaaccagtgatgtggagctggagtttgtccttccaccgagactacgagggcctttgatgcttagtggaatgtgtgtctaacttgctctctgacatttagcagatgaaataaaatatatatctgtttagtctttccctca

SEQ ID NO: 131149 - DNA, 581 bp, Homo sapiens
  Payload ID: 5611
  Gene Symbol: EIF3D
  Gene Name: eukaryotic translation initiation factor 3, subunit D
  ENST ID: ENST00000402116
  CDS Start-End: 211-581
aggaatccactttcgggggccccgcgtcccgcacgctactgaacgcgggacacgaccttgtgggtgaggtccttggccctcggccctgctcagtgcccatgagctgggtgaatttgattgtcacttaactcacctgggttaagacggaggggtaacaacaaagtctttctgaagtggccgaaaactccctgactttttgaattttggaagatggcaaagttcatgacacccgtgatccaggacaacccctcaggctggggtccctgtgcggttcccgagcagtttcgggatatgccctaccagccgttcagcaaaggagatcggctaggaaaggttgcagactggacaggagccacataccaagataagaggtacacaaataagtactcctctcagtttggtggtggaagtcaatatgcttatttccatgaggaggatgaaagtagcttccagctggtggatacagcgcgcacacagaagacggcctaccagcggaatcgaatgagatttgcccagaggaacctccgcagagacaaagatcgtcggaacatgttgcagttcaacctgcagatcctgcctaa

SEQ ID NO: 131150 - DNA, 1851 bp, Homo sapiens
  Payload ID: 5611
  Gene Symbol: EIF3D
  Gene Name: eukaryotic translation initiation factor 3, subunit D
  Uniprot ID: O15371
  ENST ID: ENST00000405442
  CDS Start-End: 117-1763
cgggacacgaccttgtgggtgaggtccttggccctcggccctgctcagtgcccatgagctgggtgaatttgattgtcacttaactcacctgggttaagacggagggattttggaagatggcaaagttcatgacacccgtgatccaggacaacccctcaggctggggtccctgtgcggttcccgagcagtttcgggatatgccctaccagccgttcagcaaaggagatcggctaggaaaggttgcagactggacaggagccacataccaagataagaggtacacaaataagtactcctctcagtttggtggtggaagtcaatatgcttatttccatgaggaggatgaaagtagcttccagctggtggatacagcgcgcacacagaagacggcctaccagcggaatcgaatgagatttgcccagaggaacctccgcagagacaaagatcgtcggaacatgttgcagttcaacctgcagatcctgcctaagagtgccaaacagaaagagagagaacgcattcgactgcagaaaaagttccagaaacaatttggggttaggcagaaatgggatcagaaatcacagaaaccccgagactcttcagttgaagttcgtagtgattgggaagtgaaagaggaaatggattttcctcagttgatgaagatgcgctacttggaagtatcagagccacaggacattgagtgttgtggggccctagaatactacgacaaagcctttgaccgcatcaccacgaggagtgagaagccactgcggagcatcaagcgcatcttccacactgtcaccaccacagacgaccctgtcatccgcaagctggcaaaaactcaggggaatgtgtttgccactgatgccatcctggccacgctgatgagctgtacccgctcagtgtattcctgggatattgtcgtccagagagttgggtccaaactcttctttgacaagagagacaactctgactttgacctcctgacagtgagtgagactgccaatgagccccctcaagatgaaggtaattccttcaattcaccccgcaacctggccatggaggcaacctacatcaaccacaatttctcccagcagtgcttgagaatggggaaggaaagatacaacttccccaacccaaacccgtttgtggaggacgacatggataagaatgaaatcgcctctgttgcgtaccgttaccgcaggtggaagcttggagatgatattgaccttattgtccgttgtgagcacgatggcgtcatgactggagccaacggggaagtgtccttcatcaacatcaagacactcaatgagtgggattccaggcactgtaatggcgttgactggcgtcagaagctggactctcagcgaggggctgtcattgccacggagctgaagaacaacagctacaagttggcccggtggacctgctgtgctttgctggctggatctgagtacctcaagcttggttatgtgtctcggtaccacgtgaaagactcctcacgccacgtcatcctaggcacccagcagttcaagcctaatgagtttgccagccagatcaacctgagcgtggagaatgcctggggcattttacgctgcgtcattgacatctgcatgaagctggaggagggcaaatacctcatcctcaaggaccccaacaagcaggtcatccgtgtctacagcctccctgatggcaccttcagctctgatgaagatgaggaggaagaggaggaggaagaagaggaagaagaagaggaagaaacttaaaccagtgatgtggagctggagtttgtccttccaccgagactacgagggcctttgatgcttagtggaatgtgtgtctaacttgctctct

SEQ ID NO: 131151 - DNA, 996 bp, Homo sapiens
  Payload ID: 5611
  Gene Symbol: EIF3D
  Gene Name: eukaryotic translation initiation factor 3, subunit D
  ENST ID: ENST00000455547
  CDS Start-End: 188-996
ctcttttcctggtttctcaagagtgctgctgctaacgcggtccccggcacgcaccatctgttgccatcccggccggccgaggccattgcagatggaaaagactaaggtggctggacgtggtggctcacgcctgtaatcccagcactttgggaggtcgaggcgggaggatcatttgagattttggaagatggcaaagttcatgacacccgtgatccaggacaacccctcaggctggggtccctgtgcggttcccgagcagtttcgggatatgccctaccagccgttcagcaaaggagatcggctaggaaaggttgcagactggacaggagccacataccaagataagaggtacacaaataagtactcctctcagtttggtggtggaagtcaatatgcttatttccatgaggaggatgaaagtagcttccagctggtggatacagcgcgcacacagaagacggcctaccagcggaatcgaatgagatttgcccagaggaacctccgcagagacaaagatcgtcggaacatgttgcagttcaacctgcagatcctgcctaagagtgccaaacagaaagagagagaacgcattcgactgcagaaaaagttccagaaacaatttggggttaggcagaaatgggatcagaaatcacagaaaccccgagactcttcagttgaagttcgtagtgattgggaagtgaaagaggaaatggattttcctcagttgatgaagatgcgctacttggaagtatcagagccacaggacattgagtgttgtggggccctagaatactacgacaaagcctttgaccgcatcaccacgaggagtgagaagccactgcggagcatcaagcgcatcttccacactgtcaccaccacagacgaccctgtcatccgcaagctggcaaaaactcaggggaatgtgtttgccactgatgccatcctggccacgctgatgagctgtacccgctcagtgtattcctgggatattgtcgtcca

SEQ ID NO: 131152 - DNA, 883 bp, Homo sapiens
  Payload ID: 5611
  Gene Symbol: EIF3D
  Gene Name: eukaryotic translation initiation factor 3, subunit D
  ENST ID: ENST00000458572
  CDS Start-End: 1-316
ctttgaccgcatcaccacgaggagtgagaagccactgcggagcatcaagcgcatcttccacactgtcaccaccacagacgaccctgtcatccgcaagctggcaaaaactcaggggaatgtgtttgccactgatgccatcctggccacgctgatgagctgtacccgctcagtgtattcctgggatattgtcgtccagagagttgggtccaaactcttctttgacaagagagacaactctgactttgcgctgcgcacattgtcagtgactctttgttgcatggtgagtgaccatgccacgcttttgcagacctcctgacagtgagtgagactgccaatgagccccctcaagatgaaggtaattccttcaattcaccccgcaacctggccatggaggcaacctacatcaaccacaatttctcccagcagtgcttgagaatggggaaggaaagatacaacttccccaacccaaacccgtttgtggaggacgacatggataagaatgaaatcgcctctgttgcgtaccgttaccgcaggtggaagcttggagatgatattgaccttattgtccgttgtgagcacgatggcgtcatgactggagccaacggggaagtgtccttcatcaacatcaagacactcaatgagtgggattccaggcactgtaatggcgttgactggcgtcagaagctggactctcagcgaggggctgtcattgccacggagctgaagaacaacagctacaagttggcccggtggacctgctgtgctttgctggctggatctgagtacctcaagcttggttatgtgtctcggtaccacgtgaaagactcctcacgccacgtcatcctaggcacccagcagttcaagcctaatgagtttgccagcc

SEQ ID NO: 131153 - DNA, 729 bp, Homo sapiens
  Payload ID: 5611
  Gene Symbol: EIF3D
  Gene Name: eukaryotic translation initiation factor 3, subunit D
  ENST ID: ENST00000457241
  CDS Start-End: 209-729
aggtgagcggcgtgtttcataggttcctgcggccctccggagccggttcggactaggtccagccttcggggggcctcccggaagagacctctcttagtcccttcctgctgttgccgtccctccgctgggcggggcaggaatccactttcgggggccccgcgtcccgcacgctactgaacgcgggacacgaccttgtggattttggaagatggcaaagttcatgacacccgtgatccaggacaacccctcaggctggggtccctgtgcggttcccgagcagtttcgggatatgccctaccagccgttcagcaaaggagatcggctaggaaaggttgcagactggacaggagccacataccaagataagaggtacacaaataagtactcctctcagtttggtggtggaagtcaatatgcttatttccatgaggaggatgaaagtagcttccagctggtggatacagcgcgcacacagaagacggcctaccagcggaatcgaatgagatttgcccagaggaacctccgcagagacaaagatcgtcggaacatgttgcagttcaacctgcagatcctgcctaagagtgccaaacagaaagagagagaacgcattcgactgcagaaaaagttccagaaacaatttggggttaggcagaaatgggatcagaaatcacagaaaccccgagactcttcagttgaagttcgtagtgattgggaagtgaaagaggaaat

SEQ ID NO: 131154 - DNA, 452 bp, Homo sapiens
  Payload ID: 5611
  Gene Symbol: EIF3D
  Gene Name: eukaryotic translation initiation factor 3, subunit D
  ENST ID: ENST00000478547
  CDS Start-End: 1-150
atgaagctggaggagggcaaatacctcatcctcaaggaccccaacaagcaggtcatccgtgtctacagcctccctgatggcaccttcagctctgatgaagatgaggaggaagaggaggaggaagaagaggaagaagaagctggtgactgaaggaaatacctgcccagccctgtgagcatctgaaaggcttaacttcggaatggaagtgttgaaaactcacgcacagtccagcagaggttcagaaaggaaagtgaacatcatatcacacaacctggctcatttctcttacattttttgtgtctttcagaggaagaaacttaaaccagtgatgtggagctggagtttgtccttccaccgagactacgagggcctttgatgcttagtggaatgtgtgtctaacttgctctctgacatttagcagatgaaataaaatatatatctgtttagtcttt

SEQ ID NO: 131155 - DNA, 1543 bp, Homo sapiens
  Payload ID: 5612
  Gene Symbol: EIF3E
  Gene Name: eukaryotic translation initiation factor 3, subunit E
  Uniprot ID: P60228
  ENST ID: ENST00000220849
  CDS Start-End: 64-1401
tgttcgtttgtcggcgctaccaataaagttttagtgagcacagactcccttttctttggcaagatggcggagtacgacttgactactcgcatcgcgcactttttggatcggcatctagtctttccgcttcttgaatttctctctgtaaaggagatatataatgaaaaggaattattacaaggtaaattggaccttcttagtgataccaacatggtagactttgctatggatgtatacaaaaacctttattctgatgatattcctcatgctttgagagagaaaagaaccacagtggttgcacaactgaaacagcttcaggcagaaacagaaccaattgtgaagatgtttgaagatccagaaactacaaggcaaatgcagtcaaccagggatggtaggatgctctttgactacctggcggacaagcatggttttaggcaggaatatttagatacactctacagatatgcaaaattccagtacgaatgtgggaattactcaggagcagcagaatatctttatttttttagagtgctggttccagcaacagatagaaatgctttaagttcactctggggaaagctggcctctgaaatcttaatgcagaattgggatgcagccatggaagaccttacacggttaaaagagaccatagataataattctgtgagttctccacttcagtctcttcagcagagaacatggctcattcactggtctctgtttgttttcttcaatcaccccaaaggtcgcgataatattattgacctcttcctttatcagccacaatatcttaatgcaattcagacaatgtgtccacacattcttcgctatttgactacagcagtcataacaaacaaggatgttcgaaaacgtcggcaggttctaaaagatctagttaaagttattcaacaggagtcttacacatataaagacccaattacagaatttgttgaatgtttatatgttaactttgactttgatggggctcagaaaaagctgagggaatgtgaatcagtgcttgtgaatgacttcttcttggtggcttgtcttgaggatttcattgaaaatgcccgtctcttcatatttgagactttctgtcgcatccaccagtgtatcagcattaacatgttggcagataaattgaacatgactccagaagaagctgaaaggtggattgtaaatttgattagaaatgcaagactggatgccaagattgattctaaattaggtcatgtggttatgggtaacaatgcagtctcaccctatcagcaagtgattgaaaagaccaaaagcctttcctttagaagccagatgttggccatgaatattgagaagaaacttaatcagaatagcaggtcagaggctcctaactgggcaactcaagattctggcttctactgaagaaccataaagaaaagatgaaaaaaaaaactatcaaagaaagatgaaataataaaactattatataaagggtgacttacattttggaaacaacatattacgtataaattttgaagaattggaataaaattgattcatttta

SEQ ID NO: 131156 - DNA, 611 bp, Homo sapiens
  Payload ID: 5612
  Gene Symbol: EIF3E
  Gene Name: eukaryotic translation initiation factor 3, subunit E
  ENST ID: ENST00000522352
  CDS Start-End: 1-469
cttaatgcagaattgggatgcagccatggaagaccttacacggttaaaagagaccatagataataattctgtgagttctccacttcagtctcttcagcagagaacatggctcattcactggtctctgtttgttttcttcaatcaccccaaaggtcgcgataatattattgacctcttcctttatcagccacacatgttggcagataaattgaacatgactccagaagaagctgaaaggtggattgtaaatttgattagaaatgcaagactggatgccaagattgattctaaattaggtcatgtggttatgggtaacaatgcagtctcaccctatcagcaagtgattgaaaagaccaaaagcctttcctttagaagccagatgttggccatgaatattgagaagaaacttaatcagaatagcaggtcagaggctcctaactgggcaactcaagattctggcttctactgaagaaccataaagaaaagatgaaaaaaaaaactatcaaagaaagatgaaataataaaactattatataaagggtgacttacattttggaaacaacatattacgtataaattttgaagaattggaataaaattgattcatttta

SEQ ID NO: 131157 - DNA, 1324 bp, Homo sapiens
  Payload ID: 5612
  Gene Symbol: EIF3E
  Gene Name: eukaryotic translation initiation factor 3, subunit E
  ENST ID: ENST00000519030
  CDS Start-End: 161-1219
cggagtacgacttgactactcgcatcgcgcactttttggatcggcatctagtctttccgcttcttgaatttctctctgtaaaggagctttgagagagaaaagaaccacagtggttgcacaactgaaacagcttcaggcagaaacagaaccaattgtgaagatgtttgaagatccagaaactacaaggcaaatgcagtcaaccagggatggtaggatgctctttgactacctggcggacaagcatggttttaggcaggaatatttagatacactctacagatatgcaaaattccagtacgaatgtgggaattactcaggagcagcagaatatctttatttttttagagtgctggttccagcaacagatagaaatgctttaagttcactctggggaaagctggcctctgaaatcttaatgcagaattgggatgcagccatggaagaccttacacggttaaaagagaccatagataataattctgtgagttctccacttcagtctcttcagcagagaacatggctcattcactggtctctgtttgttttcttcaatcaccccaaaggtcgcgataatattattgacctcttcctttatcagccacaatatcttaatgcaattcagacaatgtgtccacacattcttcgctatttgactacagcagtcataacaaacaaggatgttcgaaaacgtcggcaggttctaaaagatctagttaaagttattcaacaggagtcttacacatataaagacccaattacagaatttgttgaatgtttatatgttaactttgactttgatggggctcagaaaaagctgagggaatgtgaatcagtgcttgtgaatgacttcttcttggtggcttgtcttgaggatttcattgaaaatgcccgtctcttcatatttgagactttctgtcgcatccaccagtgtatcagcattaacatgttggcagataaattgaacatgactccagaagaagctgaaaggtggattgtaaatttgattagaaatgcaagactggatgccaagattgattctaaattaggtcatgtggttatgggtaacaatgcagtctcaccctatcagcaagtgattgaaaagaccaaaagcctttcctttagaagccagatgttggccatgaatattgagaagaaacttaatcagaatagcaggtcagaggctcctaactgggcaactcaagattctggcttctactgaagaaccataaagaaaagatgaaaaaaaaaactatcaaagaaagatgaaataataaaactattatataaagggtgacttacattttggaaacaacatattacgtat

SEQ ID NO: 131158 - DNA, 687 bp, Homo sapiens
  Payload ID: 5612
  Gene Symbol: EIF3E
  Gene Name: eukaryotic translation initiation factor 3, subunit E
  ENST ID: ENST00000518100
  CDS Start-End: 15-152
ttttctttggcaagatggcggagtacgacttgactactcgcatcgcgcactttttggatcggcatctagtctttccgcttcttgaatttctctctgtaaaggaggttgtttcagcaatgtggatggagaagcatataggagtttattactgattacctggatgtggagaagtgacagctatatgtgctttacaggaaagatggcgtgggttttatttatacacagccttgcctagaaagggtaagagatggtttgtagggacacataaaaaataaggtcatgtaaatcagaagtaggtgggaatgtctacagtaattctcttcattttaaaatttttagatatataatgaaaaggaattattacaaggtaaattggaccttcttagtgataccaacatggtagactttgctatggatgtatacaaaaacctttattctgatgatattcctcatgctttgagagagaaaagaaccacagtggttgcacaactgaaacagcttcaggcagaaacagaaccaattgtgaagatgtttgaagatccagaaactacaaggcaaatgcagtcaaccagggatggtaggatgctctttgactacctggcggacaagcatggttttaggcaggaatatttagatacactctacagatatgcaaaattccagtacgaatgtgggaattactcagga

SEQ ID NO: 131159 - DNA, 223 bp, Homo sapiens
  Payload ID: 5612
  Gene Symbol: EIF3E
  Gene Name: eukaryotic translation initiation factor 3, subunit E
  ENST ID: ENST00000521297
  CDS Start-End: 1-223
actttttggatcggcatctagtctttccgcttcttgaatttctctctgtaaaggagatatataatgaaaaggaattattacaaggtaaattggaccttcttagtgataccaacatggtagactttgctatggatgtatacaaaaacctttattctgatgatattcctcatgggatggtaggatgctctttgactacctggcggacaagcatggttttaggcag

SEQ ID NO: 131160 - DNA, 746 bp, Homo sapiens
  Payload ID: 5612
  Gene Symbol: EIF3E
  Gene Name: eukaryotic translation initiation factor 3, subunit E
  ENST ID: ENST00000521440
  CDS Start-End: 1-515
cggagtacgacttgactactcgcatcgcgcactttttggatcggcatctagtctttccgcttcttgaatttctctctgtaaaggagatatataatgaaaaggaattattacaaggtaaattggaccttcttagtgataccaacatggtagactttgctatggatgtatacaaaaacctttattctgatgatattcctcatgctttgagagagaaaagaaccacagtggttgcacaactgaaacagcttcaggcagaaacagaaccaattgtgaagatgtttgaagatccagaaactacaaggcaaatgcagtcaaccagggatggtaggatgctctttgactacctggcggacaagcatggttttaggcaggaatatttagatacactctacagatatgcaaaattccagtacgaatgtgggaattactcaggagcagcagaatatctttatttttttagagtgctgatggagtcttgctatgttgcccaggctgatctcaaactcctggcctgaagtgatcctccctcctcagcctttcaatgctttgggatttacagccatgagcctctgcaccctgcctgtctaagatttctctagttaatcctagaagttggaaaaagaccttaaaacagagactttttgtcttccaaccttggaagagtttgtttctttttgcctttactttctggtgcttttttcttcacttgtagctccacatgttgcaaaataaagtctcatggctgc

SEQ ID NO: 131161 - DNA, 575 bp, Homo sapiens
  Payload ID: 5612
  Gene Symbol: EIF3E
  Gene Name: eukaryotic translation initiation factor 3, subunit E
  ENST ID: ENST00000522887
  CDS Start-End: 16-186
cttttctttggcaagatggcggagtacgacttgactactcgcatcgcgcactttttggatcggcatctagtctttccgcttcttgaatttctctctgtaaaggaggaaagatggcgtgggttttatttatacacagccttgcctagaaagggtaagagatggtttgtagggacacataaaaaataaggtcatgtaaatcagaagtaggtgggaatgtctacagtaattctcttcattttaaaatttttagatatataatgaaaaggaattattacaaggtaaattggaccttcttagtgataccaacatggtagactttgctatggatgtatacaaaaacctttattctgatgatattcctcatgctttgagagagaaaagaaccacagtggttgcacaactgaaacagcttcaggcagaaacagaaccaattgtgaagatgtttgaagatccagaaactacaaggcaaatgcagtcaaccagggatggtaggatgctctttgactacctggcggacaagcatggttttaggcaggaatatttagatacactctacagatatgcaaaattccagt

SEQ ID NO: 131162 - DNA, 558 bp, Homo sapiens
  Payload ID: 5612
  Gene Symbol: EIF3E
  Gene Name: eukaryotic translation initiation factor 3, subunit E
  ENST ID: ENST00000518345
  CDS Start-End: 334-558
cttttctttggcaagatggcggagtacgacttgactactcgcatcgcgcactttttggatcggcatctagtctttccgcttcttgaatttctctctgtaaaggagtagagacagggtttcaccgtgttagccaggatggtctcgatctcctgacctcgtgatccgcctgcctcggcctcccaaagtgctgggattacaggcgtgagccactgcgcctggcgacatccttaaaccttcatcttgacccctgttagtcactactcacaccccctaaagatatataatgaaaaggaattattacaaggtaaattggaccttcttagtgataccaacatggtagactttgctatggatgtatacaaaaacctttattctgatgatattcctcatgctttgagagagaaaagaaccacagtggttgcacaactgaaacagcttcaggcagaaacagaaccaattgtgaagatgtttgaagatccagaaactacaaggcaaatgcagtcaaccagggatggtaggatgctctttgactacctggcggacaagcatggttttagg

SEQ ID NO: 131163 - DNA, 841 bp, Homo sapiens
  Payload ID: 5612
  Gene Symbol: EIF3E
  Gene Name: eukaryotic translation initiation factor 3, subunit E
  ENST ID: ENST00000522445
  CDS Start-End: 17-244
ccttttctttggcaagatggcggagtacgacttgactactcgcatcgcgcactttttggatcggcatctagtctttccgcttcttgaatttctctctgtaaaggagatatataatgaaaaggaattattacaaggtaaattggaccttcttagtgataccaacatggtagactttgctatggatgtatacaaaaacctttattctgatgatattcctcatgtgctcttctgcatttttaattagctttgagagagaaaagaaccacagtggttgcacaactgaaacagcttcaggcagaaacagaaccaattgtgaagatgtttgaagatccagaaactacaaggcaaatgcagtcaaccagggatggtaggatgctctttgactacctggcggacaagcatggttttaggcaggaatatttagatacactctacagatatgcaaaattccagtacgaatgtgggaattactcaggagcagcagaatatctttatttttttagagtgctggttccagcaacagatagaaatgctttaagttcactctggggaaagctggcctctgaaatcttaatgcagaattgggatgcagccatggaagaccttacacggttaaaagagaccatagataataattctgtgagttctccacttcagtctcttcagcagagaacatggctcattcactggtctctgtttgttttcttcaatcaccccaaaggtcgcgataatattattgacctcttcctttatcagccacaatatcttaatgcaattcagacaatgtgtccacacattcttcgctatttgactacagcagtcataacaaacaaggatgttc

SEQ ID NO: 131164 - DNA, 697 bp, Homo sapiens
  Payload ID: 5612
  Gene Symbol: EIF3E
  Gene Name: eukaryotic translation initiation factor 3, subunit E
  ENST ID: ENST00000519627
  CDS Start-End: 18-697
cccttttctttggcaagatggcggagtacgacttgactactcgcatcgcgcactttttggatcggcatctagtctttccgcttcttgaatttctctctgtaaaggaggttccagcaacagatagaaatgctttaagttcactctggggaaagctggcctctgaaatcttaatgcagaattgggatgcagccatggaagaccttacacggttaaaagagaccatagataataattctgtgagttctccacttcagtctcttcagcagagaacatggctcattcactggtctctgtttgttttcttcaatcaccccaaaggtcgcgataatattattgacctcttcctttatcagccacaatatcttaatgcaattcagacaatgtgtccacacattcttcgctatttgactacagcagtcataacaaacaaggatgttcgaaaacgtcggcaggttctaaaagatctagttaaagttattcaacaggagtcttacacatataaagacccaattacagaatttgttgaatgtttatatgttaactttgactttgatggggctcagaaaaagctgagggaatgtgaatcagtgcttgtgaatgacttcttcttggtggcttgtcttgaggatttcattgaaaatgcccgtctcttcatatttgagactttctgtcgcatccaccagtgtatcagcattaa

SEQ ID NO: 131165 - DNA, 1254 bp, Homo sapiens; identical to SEQ ID NO: 131129
  Payload ID: 5613
  Gene Symbol: EIF3F
  Gene Name: eukaryotic translation initiation factor 3, subunit F
  Uniprot ID: O00303
  ENST ID: ENST00000309828
  CDS Start-End: 34-1107

SEQ ID NO: 131166 - DNA, 7540 bp, Homo sapiens; identical to SEQ ID NO: 131128
  Payload ID: 5613
  Gene Symbol: EIF3F
  Gene Name: eukaryotic translation initiation factor 3, subunit F
  Uniprot ID: O00303
  ENST ID: ENST00000533626
  CDS Start-End: 627-1700

SEQ ID NO: 131167 - DNA, 1072 bp, Homo sapiens; identical to SEQ ID NO: 131130
  Payload ID: 5613
  Gene Symbol: EIF3F
  Gene Name: eukaryotic translation initiation factor 3, subunit F
  ENST ID: ENST00000531329
  CDS Start-End: 17-391

SEQ ID NO: 131168 - DNA, 485 bp, Homo sapiens; identical to SEQ ID NO: 131131
  Payload ID: 5613
  Gene Symbol: EIF3F
  Gene Name: eukaryotic translation initiation factor 3, subunit F
  ENST ID: ENST00000531572
  CDS Start-End: 1-303

SEQ ID NO: 131169 - DNA, 1103 bp, Homo sapiens
  Payload ID: 5614
  Gene Symbol: EIF3G
  Gene Name: eukaryotic translation initiation factor 3, subunit G
  Uniprot ID: O75821
  ENST ID: ENST00000253108
  CDS Start-End: 44-1006
gctctctggccgggcttgggctgcgtggagaatactttttgcgatgcctactggagactttgattcgaagcccagttgggccgaccaggtggaggaggagggggaggacgacaaatgtgtcaccagcgagctcctcaaggggatccctctggccacaggtgacaccagcccagagccagagctactgccgggagctccactgccgcctcccaaggaggtcatcaacggaaacataaagacagtgacagagtacaagatagatgaggatggcaagaagttcaagattgtccgcaccttcaggattgagacccggaaggcttcaaaggctgtcgcaaggaggaagaactggaagaagttcgggaactcagagtttgacccccccggacccaatgtggccaccaccactgtcagtgacgatgtctctatgacgttcatcaccagcaaagaggacctgaactgccaggaggaggaggaccctatgaacaaactcaagggccagaagatcgtgtcctgccgcatctgcaagggcgaccactggaccacccgctgcccctacaaggatacgctggggcccatgcagaaggagctggccgagcagctgggcctgtctactggcgagaaggagaagctgccgggagagctagagccggtgcaggccacgcagaacaagacagggaagtatgtgccgccgagcctgcgcgacggggccagccgccgcggggagtccatgcagcccaaccgcagagccgacgacaacgccaccatccgtgtcaccaacttgtcagaggacacgcgtgagaccgacctgcaggagctcttccggcctttcggctccatctcccgcatctacctggctaaggacaagaccactggccaatccaagggctttgccttcatcagcttccaccgccgcgaggatgctgcgcgtgccattgccggggtgtccggctttggctacgaccacctcatcctcaacgtcgagtgggccaagccgtccaccaactaagccagctgccactgtgtactcggtccgggacccttggcgacagaagacagcctccgagagcgcgggctccaagggcaataaagcagctccactctct

SEQ ID NO: 131170 - DNA, 828 bp, Homo sapiens
  Payload ID: 5614
  Gene Symbol: EIF3G
  Gene Name: eukaryotic translation initiation factor 3, subunit G
  ENST ID: ENST00000588709
  CDS Start-End: 41-828
ctctggccgggcttgggctgcgtggagaatactttttgcgatgcctactggagactttgattcgaagcccagttgggccgaccaggtggaggaggagggggaggacgacaaatgtgtcaccagcgagctcctcaaggggatccctctggccacaggtgacaccagcccagagccagagctactgccgggagctccactgccgcctcccaaggaggtcatcaacggaaacataaagacagtgacagagtacaagatagatgaggatggcaagaagttcaaggtgaggattgtccgcaccttcaggattgagacccggaaggcttcaaaggctgtcgcaaggaggaagaactggaagaagttcgggaactcagagtttgacccccccggacccaatgtggccaccaccactgtcagtgacgatgtctctatgacgttcatcaccagcaaagaggacctgaactgccaggaggaggaggaccctatgaacaaactcaagggccagaagatcgtgtcctgccgcatctgcaagggcgaccactggaccacccgctgcccctacaaggatacgctggggcccatgcagaaggagctggccgagcagctgggcctgtctactggcgagaaggagaagctgccgggagagctagagccggtgcaggccacgcagaacaagacagggaagtatgtgccgccgagcctgcgcgacggggccagccgccgcggggagtccatgcagcccaaccgcagagccgacgacaacgccaccatccgtgtcaccaacttgtcagaggacacgcgtgagaccgacctgcaggagctcttccggcc

SEQ ID NO: 131171 - DNA, 636 bp, Homo sapiens
  Payload ID: 5614
  Gene Symbol: EIF3G
  Gene Name: eukaryotic translation initiation factor 3, subunit G
  ENST ID: ENST00000593095
  CDS Start-End: 60-509
gttttcgcccgcttccgctctctggccgggcttgggctgcgtggagaatactttttgcgatgcctactggagactttgattcgaagcccagttgggccgaccaggtggaggaggagggggaggacgacaaatgtgtcaccagcgagctcctcaaggggatccctctggccacaggtgacaccagcccagagccagagctactgccgggagctccactgccgcctcccaaggaggtcatcaacggaaacataaagacagtgacagagtacaagatagatgaggatggcaagaagttcaagattgtccgcaccttcaggattgagacccggaaggcttcaaaggctgtcgcaaggaggaagagtgttgctctgtcccccaggctgaagtgcagtggcacgatctcgactcactgcaacctccgcctcctgggttcaagtgattctcctgcctcagcctcccgagtagctggggttacagaactggaagaagttcgggaactcagagtttgacccccccggacccaatgtggccaccaccactgtcagtgacgatgtctctatgacgttcatcaccagcaaagaggacctgaactgccaggaggaggaggaccctatgaacaaactcaagggccagaag

SEQ ID NO: 131172 - DNA, 873 bp, Homo sapiens
  Payload ID: 5614
  Gene Symbol: EIF3G
  Gene Name: eukaryotic translation initiation factor 3, subunit G
  ENST ID: ENST00000589454
  CDS Start-End: 6-873
ttgcgatgcctactggagactttgattcgaagcccagttgggccgaccaggtggaggaggagggggaggacgacaaatgtgtcaccagcgagctcctcaaggggatccctctggccacaggtgacaccagcccagagccagagctactgccgggagctccactgccgcctcccaaggaggtcatcaacggaaacataaagacagtgacagagtacaagatagatgaggatggcaagaagttcaagattgtccgcaccttcaggattgagacccggaaggcttcaaaggctgtcgcaaggaggaagaactggaagaagttcgggaactcagagtttgacccccccggacccaatgtggccaccaccactgtcagtgacgatgtctctatgacgttcatcaccagcaaagaggacctgaactgccaggaggaggaggaccctatgaacaaactcaagggccagaagatcgtgtcctgccgcatctgcaagggcgaccactggaccacccgctgcccctacaaggatacgctggggcccatgcagaaggagctggccgagcagctgggcctgtctactgagctagagccggtgcaggccacgcagaacaagacagggaagtatgtgccgccgagcctgcgcgacggggccagccgccgcggggagtccatgcagcccaaccgcagagccgacgacaacgccaccatccgtgtcaccaacttgtcagaggacacgcgtgagaccgacctgcaggagctcttccggcctttcggctccatctcccgcatctacctggctaaggacaagaccactggccaatccaagggctttgccttcatcagcttccaccgccgcgaggatgctgcgcgtgccattg

SEQ ID NO: 131173 - DNA, 590 bp, Homo sapiens
  Payload ID: 5614
  Gene Symbol: EIF3G
  Gene Name: eukaryotic translation initiation factor 3, subunit G
  ENST ID: ENST00000593066
  CDS Start-End: 11-169
actttttgcgatgcctactggagactttgattcgaagcccagttgggccgaccaggtggaggaggagggggaggacgacaaatgtgtcaccagcgagctcctcaaggggatccctctggccacaggtgacaccagcccagagccagagctactgccgggaggtgagtgaggactgccgggagctccactgccgcctcccaaggaggtcatcaacggaaacataaagacagtgacagagtacaagatagatgaggatggcaagaagttcaagattgtccgcaccttcaggattgagacccggaaggcttcaaaggctgtcgcaaggaggaagaactggaagaagttcgggaactcagagtttgacccccccggacccaatgtggccaccaccactgtcagtgacgatgtctctatgacgttcatcaccagcaaagaggacctgaactgccaggaggaggaggaccctatgaacaaactcaagggccagaagatcgtgtcctgccgcatctgcaagggcgaccactggaccacccgctgcccctacaaggatacgctggggcccatgcagaaggagctggccgagcagctgg

SEQ ID NO: 131174 - DNA, 453 bp, Homo sapiens
  Payload ID: 5614
  Gene Symbol: EIF3G
  Gene Name: eukaryotic translation initiation factor 3, subunit G
  ENST ID: ENST00000593054
  CDS Start-End: 1-357
actggcgagaaggagaagctgccgggagagctagagccggtgcaggccacgcagaacaagacagggaagtatgtgccgccgagcctgcgcgacggggccagccgccgcggggagtccatgcagcccaaccgcagagaggacacgcgtgagaccgacctgcaggagctcttccggcctttcggctccatctcccgcatctacctggctaaggacaagaccactggccaatccaagggctttgccttcatcagcttccaccgccgcgaggatgctgcgcgtgccattgccggggtgtccggctttggctacgaccacctcatcctcaacgtcgagtgggccaagccgtccaccaactaagccagctgccactgtgtactcggtccgggacccttggcgacagaagacagcctccgagagcgcgggctccaagggcaataaagcagctccactctc

SEQ ID NO: 131175 - DNA, 709 bp, Homo sapiens
  Payload ID: 5614
  Gene Symbol: EIF3G
  Gene Name: eukaryotic translation initiation factor 3, subunit G
  ENST ID: ENST00000587146
  CDS Start-End: 28-709
tgggctgcgtggagaatactttttgcgatgcctactggagactttgattcgaagcccagttgggccgaccaggtggaggaggagggggaggacgacaaatgtgtcaccagcgagctcctcaaggggatccctctggccacaggtgacaccagcccagagccagagctactgccgggagctccactgccgcctcccaaggaggtcatcaacggaaacataaagacagtgacagagtacaagatagatgaggatggcaagaagttcaagattgtccgcaccttcaggattgagacccggaaggcttcaaaggctgtcgcaaggaggaaggacctgaactgccaggaggaggaggaccctatgaacaaactcaagggccagaagatcgtgtcctgccgcatctgcaagggcgaccactggaccacccgctgcccctacaaggatacgctggggcccatgcagaaggagctggccgagcagctgggcctgtctactggcgagaaggagaagctgccgggagagctagagccggtgcaggccacgcagaacaagacagggaagtatgtgccgccgagcctgcgcgacggggccagccgccgcggggagtccatgcagcccaaccgcagagccgacgacaacgccaccatccgtgtcaccaacttgtcagaggacacgcgtgagaccgacctgcaggagctcttccggcctttcg

SEQ ID NO: 131176 - DNA, 555 bp, Homo sapiens
  Payload ID: 5614
  Gene Symbol: EIF3G
  Gene Name: eukaryotic translation initiation factor 3, subunit G
  ENST ID: ENST00000587993
  CDS Start-End: 20-142
gtggagaatactttttgcgatgcctactggagactttgattcgaagcccagttgggccgaccaggtggaggaggagggggaggacggcgtcatcccaaaagcccttccatcgcagctggggagctcctgcccctggagctgactcctccttcctacgctgccttttgcagacaaatgtgtcaccagcgagctcctcaaggggatccctctggccacaggtgacaccagcccagagccagagctactgccgggagctccactgccgcctcccaaggaggtcatcaacggaaacataaagacagtgacagagtacaagatagatgaggatggcaagaagttcaagattgtccgcaccttcaggattgagacccggaaggcttcaaaggctgtcgcaaggaggaagaactggaagaagttcgggaactcagagtttgacccccccggacccaatgtggccaccaccactgtcagtgacgatgtctctatgacgttcatcaccagcaaagaggacctgaactgccaggaggaggaggaccctatgaacaaactcaaggg

SEQ ID NO: 131177 - DNA, 2041 bp, Homo sapiens
  Payload ID: 5615
  Gene Symbol: EIF3H
  Gene Name: eukaryotic translation initiation factor 3, subunit H
  ENST ID: ENST00000276682
  CDS Start-End: 768-1868
aggcgcgtagcaagagcttctctgaaagactggcagtatagtagtagtcagtgataatattgagccttaatatgttccagacactgtcctaagtgatttaccttacattattcccctgaatgtttataattcccaagtgaaagaaggaaatgatatattggatagctatgagtggggaggtttgtactggctgctttcccataaagaaattaagcacgttcacgaagggcacgtagtttgttagtgtctggaacccagttttcgtgcctgaagttcaaatgttcttgctacaccaccatagaaactaacgtcactcaggaaccatttgtcagggcaaagggtgccaccattttgcatttcctcctgccttaggaccatcctaaatcactcgcatggagtgttttggaagaactctcaagagcttcgtttgcctagagtcagaattcctaaccttgagtcctggttttgccacaaacccaagccgtttgatcttgggcaactcccgaagaaagctgggttcaacttcctcactgtcaaactggttgtaggtctagataagtttcaagtactctttttatgtgcatggtctctgacataggaagactacatactgggccagtaacaggaaggcacaaagctgactggaggtttaaaaattacttggtcaatttgattaatgaggagaatgaatcagaaaatttcaagttctcccgtggctaactgtcgagtatccacttcaagatcattccatcggaaagaggtcgaaaatgtacagtaggcatgcacaaaggataccgcctggaaagaagatggcgtcccgcaaggaaggtaccggctctactgccacctcttccagctccaccgccggcgcagcagggaaaggcaaaggcaaaggcggctcgggagattcagccgtgaagcaagtgcagatagatggccttgtggtattaaagataatcaaacattatcaagaagaaggacaaggaactgaagttgttcaaggagtgcttttgggtctggttgtagaagatcggcttgaaattaccaactgctttcctttccctcagcacacagaggatgatgctgactttgatgaagtccaatatcagatggaaatgatgcggagccttcgccatgtaaacattgatcatcttcacgtgggctggtatcagtccacatactatggctcattcgttacccgggcactcctggactctcagtttagttaccagcatgccattgaagaatctgtcgttctcatttatgatcccataaaaactgcccaaggatctctctcactaaaggcatacagactgactcctaaactgatggaagtttgtaaagaaaaggatttttcccctgaagcattgaaaaaagcaaatatcacctttgagtacatgtttgaagaagtgccgattgtaattaaaaattcacatctgatcaatgtcctaatgtgggaacttgaaaagaagtcagctgttgcagataaacatgaattgctcagccttgccagcagcaatcatttggggaagaatctacagttgctgatggacagagtggatgaaatgagccaagatatagttaaatacaacacatacatgaggaatactagtaaacaacagcagcagaaacatcagtatcagcagcgtcgccagcaggagaatatgcagcgccagagccgaggagaacccccgctccctgaggaggacctgtccaaactcttcaaaccaccacagccgcctgccaggatggactcgctgctcattgcaggccagataaacacttactgccagaacatcaaggagttcactgcccaaaacttaggcaagctcttcatggcccaggctcttcaagaatacaacaactaagaaaaggaagtttccagaaaagaagttaacatgaactcttgaagtcacaccagggcaactcttggaagaaatatatttgcatattgaaaagcacagaggatttctttagtgtcattgccgattttggctataacagtgtctttctagccataataaaataaaacaaaatcttg

SEQ ID NO: 131178 - DNA, 562 bp, Homo sapiens
  Payload ID: 5615
  Gene Symbol: EIF3H
  Gene Name: eukaryotic translation initiation factor 3, subunit H
  ENST ID: ENST00000520813
  CDS Start-End: 271-562
acttaactgtcaactccacgtgggcggggcgttttgcacctcctgagctcgcaatgaaggtctgtgagcaacggcctcgcctctacaacacccgacggaccctctgtgcctcctccccagccccccgggcccaccttgtggtgcacagctgcgtctcccccatgaggtagcggggcagctgctcccgcagctggatgcggccccgcagcgccgcctgacagaaggtgccgtccagcaggatctgatcattccatcggaaagaggtcgaaaatgtacagtaggcatgcacaaaggataccgcctggaaagaagatggcgtcccgcaaggaaggtaccggctctactgccacctcttccagctccaccgccggcgcagcagggaaaggcaaaggcaaaggcggctcgggagattcagccgtgaagcaagtgcagatagatggccttgtggtattaaagataatcaaacattatcaagaagaaggacaaggaactgaagttgttcaaggagtgcttttgggtctggttgtagaagatcggcttgaaattaccaactgctttcctt

SEQ ID NO: 131179 - DNA, 843 bp, Homo sapiens
  Payload ID: 5615
  Gene Symbol: EIF3H
  Gene Name: eukaryotic translation initiation factor 3, subunit H
  ENST ID: ENST00000518949
  CDS Start-End: 112-843
aggaaggtaccggctctactgccacctcttccagctccaccgccggcgcagcagggaaaggcaaaggcaaaggcggctcgggagattcagccgtgaagcaagtgcagatagatggccttgcccagtatttcctttggggtgatctgtcaacccctggaaaaagggacaagcacacacaggagaagaggcacaggtttgggagggaagggaagcagaatttggttggacactaagagagtgagattcaccagggacagctgggtggtgatggaggcctctcaggagagagatcccagctggagagtccaatatcagatggaaatgatgcggagccttcgccatgtaaacattgatcatcttcacgtgggctggtatcagtccacatactatggctcattcgttacccgggcactcctggactctcagtttagttaccagcatgccattgaagaatctgtcgttctcatttatgatcccataaaaactgcccaaggatctctctcactaaaggcatacagactgactcctaaactgatggaagtttgtaaagaaaaggatttttcccctgaagcattgaaaaaagcaaatatcacctttgagtacatgtttgaagaagtgccgattgtaattaaaaattcacatctgatcaatgtcctaatgtgggaacttgaaaagaagtcagctgttgcagataaacatgaattgctcagccttgccagcagcaatcatttggggaagaatctacagttgctgatggacagagtggatgaaatgagccaagatatagttaaatacaacacatacatgaggaatactagtaaacaacagcagcagaaacatcag

SEQ ID NO: 131180 - DNA, 731 bp, Homo sapiens
  Payload ID: 5615
  Gene Symbol: EIF3H
  Gene Name: eukaryotic translation initiation factor 3, subunit H
  ENST ID: ENST00000518995
  CDS Start-End: 26-731
tctttcttcctgtctgcttggaaagatggcgtcccgcaaggaaggtaccggctctactgccacctcttccagctccaccgccggcgcagcagggaaaggcaaaggcaaaggcggctcgggagattcagccgtgaagcaagtgcagatagatggccttttctctggtcaggtatcctctcagaagcccttcctggatccccctaaggtggtattaaagataatcaaacattatcaagaagaaggacaaggaactgaagttgttcaaggagtgcttttgggtctggttgtagaagatcggcttgaaattaccaactgctttcctttccctcagcacacagaggatgatgctgactttgatgaagtccaatatcagatggaaatgatgcggagccttcgccatgtaaacattgatcatcttcacgtgggctggtatcagtccacatactatggctcattcgttacccgggcactcctggactctcagtttagttaccagcatgccattgaagaatctgtcgttctcatttatgatcccataaaaactgcccaaggatctctctcactaaaggcatacagactgactcctaaactgatggaagtttgtaaagaaaaggatttttcccctgaagcattgaaaaaagcaaatatcacctttgagtacatgtttgaagaagtgccgattgtaattaaaaattcacatctgatcaatgtcctaatgtgggaacttgaaa

SEQ ID NO: 131181 - DNA, 518 bp, Homo sapiens
  Payload ID: 5615
  Gene Symbol: EIF3H
  Gene Name: eukaryotic translation initiation factor 3, subunit H
  ENST ID: ENST00000522453
  CDS Start-End: 9-518
ttggaaagatggcgtcccgcaaggaaggtaccggctctactgccacctcttccagctccaccgccggcgcagcagggaaaggcaaaggcaaaggcggctcgggagattcagccgtgaagcaagtgcagatagatggccttgtggtattaaagataatcaaacattatcaagaagaaggacaaggaactgaagttgttcaaggagtgcttttgggtctggttgtagaagatcggcttgaaattaccaactgctttcctttccctcagcacacagaggatgatgctgactttgatgaaggttcattcatagtgcagcatacatcagaacttcgttccttgttattgctgagtagtattccattaaatgtattccaatatcagatggaaatgatgcggagccttcgccatgtaaacattgatcatcttcacgtgggctggtatcagtccacatactatggctcattcgttacccgggcactcctggactctcagtttagttaccagcatgccattgaagaa

SEQ ID NO: 131182 - DNA, 635 bp, Homo sapiens
  Payload ID: 5615
  Gene Symbol: EIF3H
  Gene Name: eukaryotic translation initiation factor 3, subunit H
  ENST ID: ENST00000522800
  CDS Start-End: 33-203
acgtttctctttcttcctgtctgcttggaaagatggcgtcccgcaaggaaggtaccggctctactgccacctcttccagctccaccgccggcgcagcagggaaaggcaaaggcaaaggcggctcgggagattcagccgtgaagcaagtgcagatagatggccttggaaatgccttcaagtacgtagatagaaaatattgctgatgattttaagaggtggtattaaagataatcaaacattatcaagaagaaggacaaggaactgaagttgttcaaggagtgcttttgggtctggttgtagaagatcggcttgaaattaccaactgctttcctttccctcagcacacagaggatgatgctgactttgatgaagtccaatatcagatggaaatgatgcggagccttcgccatgtaaacattgatcatcttcacgtgggctggtatcagtccacatactatggctcattcgttacccgggcactcctggactctcagtttagttaccagcatgccattgaagaatctgtcgttctcatttatgatcccataaaaactgcccaaggatctctctcactaaaggcatacagactgactcctaaactgatggaagtttgtaaagaaaaggatttttcccct

SEQ ID NO: 131183 - DNA, 3959 bp, Homo sapiens
  Payload ID: 5615
  Gene Symbol: EIF3H
  Gene Name: eukaryotic translation initiation factor 3, subunit H
  Uniprot ID: O15372
  ENST ID: ENST00000521861
  CDS Start-End: 25-1083
ctttcttcctgtctgcttggaaagatggcgtcccgcaaggaaggtaccggctctactgccacctcttccagctccaccgccggcgcagcagggaaaggcaaaggcaaaggcggctcgggagattcagccgtgaagcaagtgcagatagatggccttgtggtattaaagataatcaaacattatcaagaagaaggacaaggaactgaagttgttcaaggagtgcttttgggtctggttgtagaagatcggcttgaaattaccaactgctttcctttccctcagcacacagaggatgatgctgactttgatgaagtccaatatcagatggaaatgatgcggagccttcgccatgtaaacattgatcatcttcacgtgggctggtatcagtccacatactatggctcattcgttacccgggcactcctggactctcagtttagttaccagcatgccattgaagaatctgtcgttctcatttatgatcccataaaaactgcccaaggatctctctcactaaaggcatacagactgactcctaaactgatggaagtttgtaaagaaaaggatttttcccctgaagcattgaaaaaagcaaatatcacctttgagtacatgtttgaagaagtgccgattgtaattaaaaattcacatctgatcaatgtcctaatgtgggaacttgaaaagaagtcagctgttgcagataaacatgaattgctcagccttgccagcagcaatcatttggggaagaatctacagttgctgatggacagagtggatgaaatgagccaagatatagttaaatacaacacatacatgaggaatactagtaaacaacagcagcagaaacatcagtatcagcagcgtcgccagcaggagaatatgcagcgccagagccgaggagaacccccgctccctgaggaggacctgtccaaactcttcaaaccaccacagccgcctgccaggatggactcgctgctcattgcaggccagataaacacttactgccagaacatcaaggagttcactgcccaaaacttaggcaagctcttcatggcccaggctcttcaagaatacaacaactaagaaaaggaagtttccagaaaagaagttaacatgaactcttgaagtcacaccagggcaactcttggaagaaatatatttgcatattgaaaagcacagaggatttctttagtgtcattgccgattttggctataacagtgtctttctagccataataaaataaaacaaaatcttgactgcttgctcatttgattttagatgtattttctctggcttacttttgtttgcttatacttgtttatttctaaaagctaaaacaagccctgaccggaagtttcaccaggcagaaacctataggctccaccacttttgctgcctctcaggtgccacctttcaacccacttctcccaactacttatcccagctcctgaccccgaggccctggcatctactgtgaatattttttttttgaatttttatacttcgctgctcccaaatgagcaccccgagagaagtccaggcttcatgtacttgcccaggaattccttgtccccggacccggaatcacttggcctaattccggtcagtctgccttttcatttctgcaggtgatggtcaaccagtccccgtactcataggccatgggacacaagattattattatcatcattatttttaaagacagagtctcactttgttgcccaggctggagtgtagtggcacaatctcagctcgctgcaacctccaccttctgagttcaagcgattctcccacctcagcctcccaagtagctgggactacaggcgtgtgccatcacgcctggctaatttttgtatttttagtagagatggggtttcaccatgttggccaggctggtctgcatctcctgacctcaagtgattcacctgcttctgtctcccaaagtgctgggaatacaggcatgagccaccactcctggacaggccacagaaattttaaagaaaagaatcatgccaccacaagtaaacttcattttgtttatattatttaggacttcacatttgtcttccgaaaccatgaagtataattctgctaacagcaagtgttgtgaatgaggaattaggaattaggagaatggtagtacattgggaaaaacatattttagtaatttttatattttaaagataatcacagattttgctgtttgtgcatcaccaaaatcagtgagatctgccagctggtgggggtgtgcctatgagaatttttgattatgatcccctaggagggttatcaaaaaaggagatgggtgaaagatcaggagagtcgagaaattcattttttggacaacattgttttgaaggcactactggggctctgggatcaggcagccagattgaaacctggctcctccttttcctaagttatttaacctccctgtgcctcactttttgtcaaccagataagataagaaatgagagcaggtctgttacctcacaaggtggctgtgagtgttgaagacgtttgttgggggtttgggtgaagcatgcaaactctggttggtatgtggcagccactcagcctgtatttatgatgagggaggcattctaggcaccccttccaggatgttgggttgttggctgggttttactttaaaaagctcagggcctagaacattctagaatccaagtacttgctcacatatataattatttctttaggataatctttgatatagacttacgagtcaaagggtatgtaaaatgtcagcccttttacctgtattgccaaattgccttcaaaagtttctgctgttttgccctcctacccatagtgataaccttaaattggagtcaacacaaatttgagtgtgactgtgttagacagaagggatatattaacaggtaaaactggccatggcccctgcccttgtggagtatatgctctgttggttcatttcctctgcattctaattttctagacttgggatcttattgtggagttaaacaaagcacccttaaagtagcaagcgagcaaaataaaagcaaggaaaatcagttggaacataacttatgtattttttaggattaagagtaatttaactgagtcaattcaatatgtttttaaaggtgtgattcttaaattctttatgattgtttagatttctatatcttggtaacatgaatacacacttaatgaaagatttcagtaatttttgatttgggaattaatcatagtgggaaaaactgtttaggaaaacatgtcagtggaaattaactcgccacagtatgtagtgttagggaatagcttctgttcggcatttgatttgagtgctgtattctgacatttttcaggaacaaatacatgtgattcatcttctataaatatttgcagtttcttcaagttgaaatgagaaaagctcgtaaattgagcaccaggtctaataaatcattcacttacccaagaacagaaagacaggaaaagctagcatgttaatctaatgaaaaaatcgaatgttaaaaaaccaagaaagtagaagatatttgacattaactttctaatcattgataataatctaataatcataacattattcttaaaacctgaaagaatggattcctgctcccaatgtgtttttaatatcaacttaaactaaaataatttttttacctatttttggaagcttggaaattgagatgtagttgtctaatgttaacctaattaagagagcttggtgtgatttctcatatacagcatctaaatatttaagttttaatgtcttctaaaatattattacattcttcatactatagttttttaacatcctttagaaaacttgtatcagcttcactttcaaaccatgctggcatcgaactcaggtgtagtggtatcagaatgttatgaaataattttttattttcattataaactccatttttacaataaacacttctcaaccaaa

SEQ ID NO: 131184 - DNA, 488 bp, Homo sapiens
  Payload ID: 5615
  Gene Symbol: EIF3H
  Gene Name: eukaryotic translation initiation factor 3, subunit H
  ENST ID: ENST00000519046
  CDS Start-End: 27-167
ctctttcttcctgtctgcttggaaagatggcgtcccgcaaggaaggtaccggctctactgccacctcttccagctccaccgccggcgcagcagggaaaggcaaaggcaaaggcggctcgggagattcagccgtgaagcaagtgcagatagatggccttttttcatagggctgatggcttgttcttcagttctctggtcaggtatcctctcagaagcccttcctggatccccctaaggtggtattaaagataatcaaacattatcaagaagaaggacaaggaactgaagttgttcaaggagtgcttttgggtctggttgtagaagatcggcttgaaattaccaactgctttcctttccctcagcacacagaggatgatgctgactttgatgaagtccaatatcagatggaaatgatgcggagccttcgccatgtaaacattgatcatcttcacgtgggctggtatcagtccacatactatggctcattc

SEQ ID NO: 131185 - DNA, 1265 bp, Homo sapiens
  Payload ID: 5615
  Gene Symbol: EIF3H
  Gene Name: eukaryotic translation initiation factor 3, subunit H
  ENST ID: ENST00000611080
  CDS Start-End: 27-1076
ctctttcttcctgtctgcttggaaagatggcgtcccgcaaggaaggtaccggctctactgccacctcttccagctccaccgccggcgcagcagggaaaggcaaaggcaaaggcggctcgggagattcagccgtgaagcaagtgcagatagatggccttgtaataatcaaacattatcaagaagaaggacaaggaactgaagttgttcaaggagtgcttttgggtctggttgtagaagatcggcttgaaattaccaactgctttcctttccctcagcacacagaggatgatgctgactttgatgaagtccaatatcagatggaaatgatgcggagccttcgccatgtaaacattgatcatcttcacgtgggctggtatcagtccacatactatggctcattcgttacccgggcactcctggactctcagtttagttaccagcatgccattgaagaatctgtcgttctcatttatgatcccataaaaactgcccaaggatctctctcactaaaggcatacagactgactcctaaactgatggaagtttgtaaagaaaaggatttttcccctgaagcattgaaaaaagcaaatatcacctttgagtacatgtttgaagaagtgccgattgtaattaaaaattcacatctgatcaatgtcctaatgtgggaacttgaaaagaagtcagctgttgcagataaacatgaattgctcagccttgccagcagcaatcatttggggaagaatctacagttgctgatggacagagtggatgaaatgagccaagatatagttaaatacaacacatacatgaggaatactagtaaacaacagcagcagaaacatcagtatcagcagcgtcgccagcaggagaatatgcagcgccagagccgaggagaacccccgctccctgaggaggacctgtccaaactcttcaaaccaccacagccgcctgccaggatggactcgctgctcattgcaggccagataaacacttactgccagaacatcaaggagttcactgcccaaaacttaggcaagctcttcatggcccaggctcttcaagaatacaacaactaagaaaaggaagtttccagaaaagaagttaacatgaactcttgaagtcacaccagggcaactcttggaagaaatatatttgcatattgaaaagcacagaggatttctttagtgtcattgccgattttggctataacagtgtctttctagccataataaaataaaacaaaatcttgactgcttgctcatttg

SEQ ID NO: 131186 - DNA, 564 bp, Homo sapiens
  Payload ID: 5616
  Gene Symbol: EIF3I
  Gene Name: eukaryotic translation initiation factor 3, subunit I
  ENST ID: ENST00000355082
  CDS Start-End: 190-564
tgaacccgctgcaggccggcggaggcccgcttcagcagcggctgcgtgccaccccacagagcggccaccagcaccagagccaacacctgccctgaatgcagacgagggcggagacccataatccggaagtgacctcgaaaccttttccggtcttactcacgttgcggccttcctcgcgtcacagccgggatgaagccgatcctactgcagggccatgagcggtccattacgcagattaagtataaccgcgaaggagacctcctctttactgtggccaaggaccctatcgtcaatgtatggtactctgtgaatggtgagaggctgggcacctacatgggccataccggagctgtgtggtgtgtggacgctgactgggacaccaagcatgtcctcactggctcagctgacaacagctgtcgtctctgggactgtgaaacaggaaagcagctggcccttctcaagaccaattcggctgtccggacctgcggttttgactttgggggcaacatcatcatgttctccacggacaagcagatgggctaccagtgctttgtgagctttttt

SEQ ID NO: 131187 - DNA, 1458 bp, Homo sapiens
  Payload ID: 5616
  Gene Symbol: EIF3I
  Gene Name: eukaryotic translation initiation factor 3, subunit I
  Uniprot ID: Q13347
  ENST ID: ENST00000373586
  CDS Start-End: 73-1050
ataatccggaagtgacctcgaaaccttttccggtcttactcacgttgcggccttcctcgcgtcacagccgggatgaagccgatcctactgcagggccatgagcggtccattacgcagattaagtataaccgcgaaggagacctcctctttactgtggccaaggaccctatcgtcaatgtatggtactctgtgaatggtgagaggctgggcacctacatgggccataccggagctgtgtggtgtgtggacgctgactgggacaccaagcatgtcctcactggctcagctgacaacagctgtcgtctctgggactgtgaaacaggaaagcagctggcccttctcaagaccaattcggctgtccggacctgcggttttgactttgggggcaacatcatcatgttctccacggacaagcagatgggctaccagtgctttgtgagcttttttgacctgcgggatccgagccagattgacaacaatgagccctacatgaagatcccttgcaatgactctaaaatcaccagtgctgtttggggacccctgggggagtgcatcatcgctggccatgagagtggagagctcaaccagtatagtgccaagtctggagaggtgttggtgaatgttaaggagcactcccggcagatcaacgacatccagttatccagggacatgaccatgtttgtgaccgcgtccaaggacaacacagccaagctttttgactccacaactcttgaacatcagaagactttccggacagaacgtcctgtcaactcagctgccctctcccccaactatgaccatgtggtcctgggcggtggtcaggaagccatggatgtaaccacaacctccaccaggattggcaagtttgaggccaggttcttccatttggcctttgaagaagagtttggaagagtcaagggtcactttggacctatcaacagtgttgccttccatcctgatggcaagagctacagcagcggcggcgaagatggttacgtccgtatccattacttcgacccacagtacttcgaatttgagtttgaggcttaagaagctggatctcctgccgggcgtggtggctcatgcctgtaatcccaccactttttttttaaggcaggcggatcacctgaggtcaggagtttaagaccagcctgaccaacatggagaaacctcgtctctactaaaaatacaaaaattagccaggcatggtggcacacgcctatagtcccagctactcaggaggctgaggcaggagaatcacttgaacccaggaggcagaggttgcagtgagctgagatcacgtcattgcactccatcctgagccacaagagcaaaactccgtctcaaaaaaaaaaaagaagaaggtggatctccaaccaggccagagaagattctcacagaaggttttgaactctaagaaataaattggtttggtaataaatggcttctggtcagata

SEQ ID NO: 131188 - DNA, 2569 bp, Homo sapiens
  Payload ID: 5617
  Gene Symbol: EIF3J
  Gene Name: eukaryotic translation initiation factor 3, subunit J
  Uniprot ID: O75822
  ENST ID: ENST00000261868
  CDS Start-End: 139-915
ggcctcggctcggcgcacagtcagccacggtcccatcctgctccgcgccggtcaacgagagcaaacccagtgactcacctccgccgtgctaactcctcgctagctctccctctcacacacgctcacacccggctcgagatggcggcggcggcggcggcggcgggggactcggactcctgggacgccgacgctttctccgtggaagacccagtgcggaaggtggggggcggcggcactgccggcggggaccgctgggaaggcgaggacgaggacgaggacgtcaaggataactgggatgacgatgatgatgaaaaaaaagaggaagcagaagtaaaaccagaggtaaaaatttcagaaaagaaaaaaatagcagagaagataaaagagaaagaacggcaacagaagaaaaggcaagaagaaattaaaaagaggttagaagaacccgaagaacctaaagtgctaacaccagaagaacaattagcagataaactgcggctaaagaaattacaggaagagtcagacctcgaattagcaaaggaaacttttggtgttaataatgcagtttatggaatagatgctatgaacccatcttcaagagatgactttacagagtttggaaagttactaaaagataaaattacacaatatgaaaagtcactatattatgccagttttttggaagtcttagttcgagatgtgtgtatttcattggaaattgatgacttgaaaaaaattaccaattcactgactgtgctttgcagtgaaaaacagaagcaagaaaagcaaagcaaagccaaaaagaagaagaaaggtgtggttcctggagggggattaaaagccaccatgaaagatgatctggcagattatggtggttatgatggaggatatgtacaagactatgaagacttcatgtgacattttatcttttcttggtgtcatctttatgttgcccacaatcccttgaacatgtagcacaacttcctttcctttcagttctgccaaatgctacaatcagaagtgcagtatcttttgtgctggttatttaaccccttgacacttaggtgctaatgtgcaaatgagggaacttggatcttgctgccaaggggttaaaattgggaacctaagttgctactaaatcatagttcaaaacctaataatgttgtcgttgttgctatctgatttcatagcagcagtcactaaattggaaacaaaaggttgcaacgtgacaaaaaaaattgtgtagtatttaccagcaccattcagtaatacagccttaaccatacctccttgaactacttcataacttgtcaagaaaagcagtttgcagcaagggcatgtggtgtgcacctagtattaaaattgctttgtcttaaaattgaacatgaggatattaaaaatacattgtgaagaagactgcttatctcagagtgaagatactgcggctgaaaagcactagtttgatataaaattaaaatgaccaaaaccctccaactttgaagctaaagaaggtaaacctttccattattgcattacatgttgtggaatctctcgagtgcaaagactgtctagttatttatcaggctatttctactgatgaactgcttcaggtgggggagggaaacttatttttatttgcctgatttaagtgtctgagaaacaaatctttgttctcttaggctgcaatggaacaactttaccagggttttggcatttcctttcctttcctttataaaacatgctcagcaaactgcaccagttaactacagtttggtaaattgttatgttaacaattatgacatctgcaatgttttataaagcaactaatttaataaaatcactgttgtgaggacttaaattttgtgttacctcccaagagatactttttgagagtatagaacacagctcttgggagtacagttctctacgttctctactaaatcttaataaatgcttgacatagttacagctttaaaacatgagtgatttgccaggtccttatgttgtcaccatagagcaacaaaggtatagggctgccttcctcttatttatttggggacattattttgttatttagataccaaggcctaattaattaagtacctataagaactatttatttggagtaactgagcctgtaactcaggtttatggctgttaagtatagattggggaatctttattatgtcttctcctaagcagtttaaccaaatgtgtggttagtgtttttttattcccctaagacagaaagaacaaaaaatgttttaaatttctcttatataggaaataataggaacgtcaaagctctgtatacctactaagtggaaaacaagaccatcatctaagtgatttgagaaattaacaaaagtagtgactacacagcaataattacagtaaattaaataaagattcctttaaggcagacaagggctaagatttccttagcagtaataatgacatacactgaattgaaaatctattttattacagaaagatcagtttctaacaaatgaaaatgtatcacctgttccttaactgtgtaaataataattaaatttctttgaaactggaa

SEQ ID NO: 131189 - DNA, 1550 bp, Homo sapiens
  Payload ID: 5617
  Gene Symbol: EIF3J
  Gene Name: eukaryotic translation initiation factor 3, subunit J
  Uniprot ID: O75822
  ENST ID: ENST00000424492
  CDS Start-End: 71-700
agtgactcacctccgccgtgctaactcctcgctagctctccctctcacacacgctcacacccggctcgagatggcggcggcggcggcggcggcgggggactcggactcctgggacgccgacgctttctccgtggaagacccagtgcggaaggtggggggcggcggcactgccggcggggaccgctgggaaggcgaggacgaggacgaggacgtcaagttagaagaacccgaagaacctaaagtgctaacaccagaagaacaattagcagataaactgcggctaaagaaattacaggaagagtcagacctcgaattagcaaaggaaacttttggtgttaataatgcagtttatggaatagatgctatgaacccatcttcaagagatgactttacagagtttggaaagttactaaaagataaaattacacaatatgaaaagtcactatattatgccagttttttggaagtcttagttcgagatgtgtgtatttcattggaaattgatgacttgaaaaaaattaccaattcactgactgtgctttgcagtgaaaaacagaagcaagaaaagcaaagcaaagccaaaaagaagaagaaaggtgtggttcctggagggggattaaaagccaccatgaaagatgatctggcagattatggtggttatgatggaggatatgtacaagactatgaagacttcatgtgacattttatcttttcttggtgtcatctttatgttgcccacaatcccttgaacatgtagcacaacttcctttcctttcagttctgccaaatgctacaatcagaagtgcagtatcttttgtgctggttatttaaccccttgacacttaggtgctaatgtgcaaatgagggaacttggatcttgctgccaaggggttaaaattgggaacctaagttgctactaaatcatagttcaaaacctaataatgttgtcgttgttgctatctgatttcatagcagcagtcactaaattggaaacaaaaggttgcaacgtgacaaaaaaaattgtgtagtatttaccagcaccattcagtaatacagccttaaccatacctccttgaactacttcataacttgtcaagaaaagcagtttgcagcaagggcatgtggtgtgcacctagtattaaaattgctttgtcttaaaattgaacatgaggatattaaaaatacattgtgaagaagactgcttatctcagagtgaagatactgcggctgaaaagcactagtttgatataaaattaaaatgaccaaaaccctccaactttgaagctaaagaaggtaaacctttccattattgcattacatgttgtggaatctctcgagtgcaaagactgtctagttatttatcaggctatttctactgatgaactgcttcaggtgggggagggaaacttatttttatttgcctgatttaagtgtctgagaaacaaatctttgttctcttaggctgcaatggaacaactttaccagggttttggcatttcctttcctttcctttataaaacatgctcagcaaactgcaccagttaactaca

SEQ ID NO: 131190 - DNA, 925 bp, Homo sapiens
  Payload ID: 5617
  Gene Symbol: EIF3J
  Gene Name: eukaryotic translation initiation factor 3, subunit J
  Uniprot ID: O75822
  ENST ID: ENST00000535391
  CDS Start-End: 13-627
acccggctcgagatggcggcggcggcggcggcggcgggggactcggactcctgggacgccgacgctttctccgtggaagacccagtgcggaaggtggggggcggcggcactgccggcggggaccgctgggaaggcgaggacgaggacgaggacgtcaaggataactgggatgacgatgatgatgaaaaaaaagaggaagcagaagtaaaaccagaggtaaaaatttcagaaaagaaaaaaatagcagagaagataaaagagaaagaacggcaacagaagaaaaggcaagaagaaattaaaaagaggttagaagaacccgaagaacctaaagtgctaacaccagaagaacaattagcagataaactgcggctaaagaaattacaggaagagtcagacctcgaattagcaaaggaaacttttgtggaaattgatgacttgaaaaaaattaccaattcactgactgtgctttgcagtgaaaaacagaagcaagaaaagcaaagcaaagccaaaaagaagaagaaaggtgtggttcctggagggggattaaaagccaccatgaaagatgatctggcagattatggtggttatgatggaggatatgtacaagactatgaagacttcatgtgacattttatcttttcttggtgtcatctttatgttgcccacaatcccttgaacatgtagcacaacttcctttcctttcagttctgccaaatgctacaatcagaagtgcagtatcttttgtgctggttatttaaccccttgacacttaggtgctaatgtgcaaatgagggaacttggatcttgctgccaaggggttaaaattgggaacctaagttgctactaaatcatagttcaaaacctaataatgttgtcgttgttgctatctgatttcatagcagcagtcactaaattggaaacaaaa

SEQ ID NO: 131191 - DNA, 533 bp, Homo sapiens
  Payload ID: 5617
  Gene Symbol: EIF3J
  Gene Name: eukaryotic translation initiation factor 3, subunit J
  ENST ID: ENST00000536248
  CDS Start-End: 1-319
attacaggaagagtcagacctcgaattagcaaaggaaacttttggtgttaataatgcagtttatggaatagatgctatgaacccatcttcaagagatgactttacagagtttggaaagttactaaaagataaaattacacaatatgaaaagtcactatattatgccagttttttggaagtcttagttcgagatgtgtgtatttcattggaaattgatgacttgaaaaaaattaccaattcactgactgtgctttgcagtgaaaaacagaagcaagaaaaggtaagagcaagctgtgtagggaaatgggtattaaattagagtggggttataggtctaacagtcaacaaatataataggagcctgtcctaattaaaagtcaagcaactcactaataccatttaagttagactagaagaggagtatgggtgctattactgtccttttgtttccagacatgttccccttttctgagttaatagaaattgctgaaatcacagactgggttcaaatactagcactgctacttaatagg

SEQ ID NO: 131192 - DNA, 1024 bp, Homo sapiens
  Payload ID: 5617
  Gene Symbol: EIF3J
  Gene Name: eukaryotic translation initiation factor 3, subunit J
  ENST ID: ENST00000558353
  CDS Start-End: 1-352
ttatggaatagatgctatgaacccatcttcaagagatgactttacagagtttggaaagttactaaaagataaaattacacaatatgaaaagtcactatattatgccagttttttggaagtcttagttcgagatgtgtgtatttcattggaaattgatgacttgaaaaaaattaccaattcactgactgtgctttgcagtgaaaaacagaagcaagaaaagcaaagcaaagccaaaaagaagaagaaaggtgtggttcctggagggggattaaaagccaccatgaaagatgatctggcagattatggtggttatgatggaggatatgtacaagactatgaagacttcatgtgacattttatcttttcttggtgtcatctttatgttgcccacaatcccttgaacatgtagcacaacttcctttcctttcagttctgccaaatgctacaatcagaagtgcagtatcttttgtgctggttatttaaccccttgacacttaggtgctaatgtgcaaatgagggaacttggatcttgctgccaaggggttaaaattgggaacctaagttgctactaaatcatagttcaaaacctaataatgttgtcgttgttgctatctgatttcatagcagcagtcactaaattggaaacaaaaggttgcaacgtgacaaaaaaaattgtgtagtatttaccagcaccattcagtaatacagccttaaccatacctccttgaactacttcataacttgtcaagaaaagcagtttgcagcaagggcatgtggtgtgcacctagtattaaaattgctttgtcttaaaattgaacatgaggatattaaaaatacattgtgaagaagactgcttatctcagagtgaagatactgcggctgaaaagcactagtttgatataaaattaaaatgaccaaaaccctccaactttgaagctaaagaaggaatttcctcctgaaaagtttcttacttgctacctactacccacaaaggactgatatggtacagtaccgggattgttca

SEQ ID NO: 131193 - DNA, 864 bp, Homo sapiens
  Payload ID: 5618
  Gene Symbol: EIF3K
  Gene Name: eukaryotic translation initiation factor 3, subunit K
  Uniprot ID: Q9UBQ5
  ENST ID: ENST00000248342
  CDS Start-End: 173-829
ggaaagcgtggcggctgctgctagagcctttccctttaccgcacccaaggagctggagcgacaacaacgacgtcgtttccgtttccaccacctcttcctgttcccgtccttgaggacgccgtgccgggtcagtgttagcctccagccctggttgtggaaggcgacagaagtcatggcgatgtttgagcagatgagagccaacgtgggcaagttgctcaagggtatcgacaggtacaatcctgagaacctggccaccctggagcgctatgtagagacgcaggccaaggaaaatgcctatgatctggaagccaacctggctgtcctgaagctgtaccagttcaacccagccttctttcagaccacggtcaccgcccagatcctgctgaaggccctcaccaacttgccgcacacagacttcaccctgtgcaagtgcatgatcgaccaggcacatcaagaagaacggccaatccgacagattttgtacctcggggacctgctggagacctgccatttccaggccttctggcaagccctggatgaaaacatggacctcttggaaggtataactggctttgaagactctgtccgaaagtttatctgccatgttgtgggtatcacttaccagcacattgaccgctggctgctggccgagatgctcggggatctgtcggacagccagctaaaggtgtggatgagcaaatacggctggagtgccgacgagtcggggcagatcttcatctgtagccaagaagagagcattaaacccaagaacattgtggagaagattgactttgacagtgtgtccagcatcatggcctcctcccagtaacttcaggtgtttaataaagatgtgttgactcagcc

SEQ ID NO: 131194 - DNA, 1327 bp, Homo sapiens
  Payload ID: 5618
  Gene Symbol: EIF3K
  Gene Name: eukaryotic translation initiation factor 3, subunit K
  Uniprot ID: Q9UBQ5
  ENST ID: ENST00000545173
  CDS Start-End: 77-712
cctgttcccgtccttgaggacgccgtgccgggtcagtgttagcctccagccctggttgtggaaggcgacagaagtcatggcgatgtttgagcagatgagagccaacgtgggcaagttgctcaagggtatcgacaggtacaatcctgagaacctggccaccctggagcgctatgtagagacgcaggccaaggaaaatgcctatgatctggaagccaacctggctgtcctgaagctgtaccagttcaacccagccttctttcagaccacggtcaccgcccagatcctgctgaaggccctcaccaacttgccgcacacagacttcaccctgtgcaagtgcatgatcgaccaggcacatcaagaagaacggccaatccgacagattttgtacctcggggacctgctggagacctgccatttccaggccttctggcaagccctggatgaaaacatggacctcttggaaggtataactggctttgaagactctgtccgaaagtttatctgccatgttgtgggtatcacttaccagcacattgaccgctggctgctggccgagatgctcggggatctgtcggacagccagctaaaggtgtggatgagcaaatacggctggagtgccgacgagtcggggcagatcttcatctgtagccaagaagagagcattaaacccaagaacattgtggagaagattgactttgacagtgagtggtgacccacggcctcgggctttggggctaagggggtgcccctcaagggaggccgaggcaggggcccagaggacctgggtagatctgctcgtgttctgggctgggaagtctgcacctgccagattccattcaccttgtgtcttggggctcccgcccaggaggaatagcggggagctgggtgatcttccctggaacttctaggccctgtgtcctgccccatagcactcagcaagacttcctggggcccagcggggcctcacagggggtctctgcacccttatttgtccctgaggcctgtctcgttggccatcttttattcttggggtgcccaagcctcatgtgcagacttggaatccggtgaacagtaggaatcttgattctctagtttgggtgattccacatttttgtgcctcagttttctcatctaaaaaatggggacgactgcaacagtaactatgataaacactgtgtaggtccttacacttacatcatttgatcctcagttgctaaatgatataaatagtatcatacctacctcatggcatcataagtgtgaatgcatgtataacacttagcaaagagctaagtgaccacacagttcattaaatgttcattatgac

SEQ ID NO: 131195 - DNA, 966 bp, Homo sapiens
  Payload ID: 5618
  Gene Symbol: EIF3K
  Gene Name: eukaryotic translation initiation factor 3, subunit K
  ENST ID: ENST00000538434
  CDS Start-End: 236-610
acctcttcctgttcccgtccttgaggacgccgtgccgggtcagtgttagcctccagccctggttgtggaaggcgacagaagtcatggcgatgtttgagcagatgagagccaacgtgggcaagttgctcaagggtaccagttcaacccagccttctttcagaccacggtcaccgcccagatcctgctgaaggccctcaccaacttgccgcacacagacttcaccctgtgcaagtgcatgatcgaccaggcacatcaagaagaacggccaatccgacagattttgtacctcggggacctgctggagacctgccatttccaggccttctggcaagccctggatgaaaacatggacctcttggaaggtataactggctttgaagactctgtccgaaagtttatctgccatgttgtgggtatcacttaccagcacattgaccgctggctgctggccgagatgctcggggatctgtcggacagccagctaaaggtgtggatgagcaaatacggctggagtgccgacgagtcggggcagatcttcatctgtagccaagaagagagcattaaacccaagaacattgtggagaagattgactttgacagtgagtggtgacccacggcctcgggctttggggctaagggggtgcccctcaagggaggccgaggcaggggcccagaggacctgggtagatctgctcgtgttctgggctgggaagtctgcacctgccagattccattcaccttgtgtcttggggctcccgcccaggaggaatagcggggagctgggtgatcttccctggaacttctaggccctgtgtcctgccccatagcactcagcaagacttcctggggcccagcggggcctcacagggggtctctgcacccttatttgtccctgaggcctgtctcgttggccatcttttattcttggggtgcccaagcctcatgtgcagacttggaatccggtga

SEQ ID NO: 131196 - DNA, 760 bp, Homo sapiens
  Payload ID: 5618
  Gene Symbol: EIF3K
  Gene Name: eukaryotic translation initiation factor 3, subunit K
  ENST ID: ENST00000593149
  CDS Start-End: 332-727
ccggaaagcgtggcggctgctgctagagcctttccctttaccgcacccaaggagctggagcgacaacaacgacgtcgtttccgtttccaccacctcttcctgttcccgtccttgaggacgccgtgccgggtacaatcctgagaacctggccaccctggagcgctatgtagagacgcaggccaaggaaaatgcctatgatctggaagccaacctggctgtcctgaagctgtaccagttcaacccagccttctttcagaccacggtcaccgcccagatcctgctgaaggccctcaccaacttgccgcacacagacttcaccctgtgcaagtgcatgatcgaccaggcacatcaagaagaacggccaatccgacagattttgtacctcggggacctgctggagacctgccatttccaggccttctggcaagccctggatgaaaacatggacctcttggaaggtataactggctttgaagactctgtccgaaagtttatctgccatgttgtgggtatcacttaccagcacattgaccgctggctgctggccgagatgctcggggatctgtcggacagccagctaaaggtgtggatgagcaaatacggctggagtgccgacgagtcggggcagatcttcatctgtagccaagaagagagcattaaacccaagaacattgtggagaagattgactttgacagtgtgtccagcatcatggcctcctcccagtaacttcaggtgtttaataaagatgtgttgactcag

SEQ ID NO: 131197 - DNA, 583 bp, Homo sapiens
  Payload ID: 5618
  Gene Symbol: EIF3K
  Gene Name: eukaryotic translation initiation factor 3, subunit K
  ENST ID: ENST00000591409
  CDS Start-End: 74-583
gttcccgtccttgaggacgccgtgccgggtcagtgttagcctccagccctggttgtggaaggcgacagaagtcatggcgatgtttgagcagatgagagccaacgtgggcaagttgctcaagggtatcgacaggtaccagttcaacccagccttctttcagaccacggtcaccgcccagatcctgctgaaggccctcaccaacttgccgcacacagacttcaccctgtgcaagtgcatgatcgaccaggcacatcaagaagaacggccaatccgacagattttgtacctcggggacctgctggagacctgccatttccaggccttctggcaagccctggatgaaaacatggacctcttggaaggtataactggctttgaagactctgtccgaaagtttatctgccatgttgtgggtatcacttaccagcacattgaccgctggctgctggccgagatgctcggggatctgtcggacagccagctaaaggtgtggatgagcaaatacggctggagtgccgacgagtcggggcagatcttcatctgtagccaagaagagagcattaaacccaagaacattgtggag

SEQ ID NO: 131198 - DNA, 670 bp, Homo sapiens
  Payload ID: 5618
  Gene Symbol: EIF3K
  Gene Name: eukaryotic translation initiation factor 3, subunit K
  ENST ID: ENST00000592558
  CDS Start-End: 59-637
gacgccgtgccgggtcagtgttagcctccagccctggttgtggaaggcgacagaagtcatggcgatgtttgagcagatgagagccaacgtgggcaagttgctcaagggtatcgacaggtacaatcctgagaacctggccaccctggagcgctatgtagagacgcaggccaaggaaaatgcctatgatctggaagccaacctggctgtcctgaagctgtaccagttcaacccagccttctttcagaccacggtcaccgcccagatcctgctgaaggccctcaccaacttgccgcacacagacttcaccctgtgcaagtgcatgatcgaccaggcacatcaagaagaacggccaatccgacagattttgtacctcggggacctgctggagacctgccatttccaggccttctggcaagccctggatgaaaacatggacctcttggaaggtataactggctttgaagactctgtccgaaagtacagccagctaaaggtgtggatgagcaaatacggctggagtgccgacgagtcggggcagatcttcatctgtagccaagaagagagcattaaacccaagaacattgtggagaagattgactttgacagtgtgtccagcatcatggcctcctcccagtaacttcaggtgtttaataaagatgtgttgactcag

SEQ ID NO: 131199 - DNA, 501 bp, Homo sapiens
  Payload ID: 5618
  Gene Symbol: EIF3K
  Gene Name: eukaryotic translation initiation factor 3, subunit K
  ENST ID: ENST00000588934
  CDS Start-End: 84-497
acctcttcctgttcccgtccttgaggacgccgtgccgggtcagtgttagcctccagccctggttgtggaaggcgacagaagtcatggcgatgtttgagcagatgagagccaacgtgggcaagttgctcaagggtatcgacaggtacaatcctgagaacctggccaccctggagcgctatgtagagacgcaggccaaggaaaatgcctatgatctggaagccaacctggctgtcctgaagctgtaccagttcaacccagccttctttcagaccacggtcaccgcccagatcctgctgaaggccctcaccaacttgccgcacacagacttcaccctgtgcaagtgcatgatcgaccaggcacatcaagaagaacggccaatccgacagattttgtacctcggggacctgctggagacctgccatttccaggccttctgggtgtgtccagcatcatggcctcctcccagtaacttcaggtgtttaataaagatgtgttgactca

SEQ ID NO: 131200 - DNA, 780 bp, Homo sapiens
  Payload ID: 5618
  Gene Symbol: EIF3K
  Gene Name: eukaryotic translation initiation factor 3, subunit K
  ENST ID: ENST00000614624
  CDS Start-End: 188-745
agtcacgtggcagccggaaagcgtggcggctgctgctagagcctttccctttaccgcacccaaggagctggagcgacaacaacgacgtcgtttccgtttccaccacctcttcctgttcccgtccttgaggacgccgtgccgggtcagtgttagcctccagccctggttgtggaaggcgacagaagtcatggcgatgtttgagcagatgagagccaacgtgggcaagttgctcaagggtatcgacaggtaccagttcaacccagccttctttcagaccacggtcaccgcccagatcctgctgaaggccctcaccaacttgccgcacacagacttcaccctgtgcaagtgcatgatcgaccaggcacatcaagaagaacggccaatccgacagattttgtacctcggggacctgctggagacctgccatttccaggccttctggcaagccctggatgaaaacatggacctcttggaaggtataactggctttgaagactctgtccgaaagtttatctgccatgttgtgggtatcacttaccagcacattgaccgctggctgctggccgagatgctcggggatctgtcggacagccagctaaaggtgtggatgagcaaatacggctggagtgccgacgagtcggggcagatcttcatctgtagccaagaagagagcattaaacccaagaacattgtggagaagattgactttgacagtgtgtccagcatcatggcctcctcccagtaacttcaggtgtttaataaagatgtgttgactcagcc

SEQ ID NO: 131201 - DNA, 780 bp, Homo sapiens; identical to SEQ ID NO: 131200
  Payload ID: 5618
  Gene Symbol: EIF3K
  Gene Name: eukaryotic translation initiation factor 3, subunit K
  ENST ID: ENST00000634230
  CDS Start-End: 188-745

SEQ ID NO: 131202 - DNA, 670 bp, Homo sapiens; identical to SEQ ID NO: 131198
  Payload ID: 5618
  Gene Symbol: EIF3K
  Gene Name: eukaryotic translation initiation factor 3, subunit K
  ENST ID: ENST00000634491
  CDS Start-End: 59-637

SEQ ID NO: 131203 - DNA, 966 bp, Homo sapiens; identical to SEQ ID NO: 131195
  Payload ID: 5618
  Gene Symbol: EIF3K
  Gene Name: eukaryotic translation initiation factor 3, subunit K
  ENST ID: ENST00000634857
  CDS Start-End: 236-610

SEQ ID NO: 131204 - DNA, 1327 bp, Homo sapiens; identical to SEQ ID NO: 131194
  Payload ID: 5618
  Gene Symbol: EIF3K
  Gene Name: eukaryotic translation initiation factor 3, subunit K
  ENST ID: ENST00000635417
  CDS Start-End: 77-712

SEQ ID NO: 131205 - DNA, 864 bp, Homo sapiens; identical to SEQ ID NO: 131193
  Payload ID: 5618
  Gene Symbol: EIF3K
  Gene Name: eukaryotic translation initiation factor 3, subunit K
  ENST ID: ENST00000635567
  CDS Start-End: 173-829

SEQ ID NO: 131206 - DNA, 583 bp, Homo sapiens; identical to SEQ ID NO: 131197
  Payload ID: 5618
  Gene Symbol: EIF3K
  Gene Name: eukaryotic translation initiation factor 3, subunit K
  ENST ID: ENST00000634420
  CDS Start-End: 74-583

SEQ ID NO: 131207 - DNA, 760 bp, Homo sapiens; identical to SEQ ID NO: 131196
  Payload ID: 5618
  Gene Symbol: EIF3K
  Gene Name: eukaryotic translation initiation factor 3, subunit K
  ENST ID: ENST00000634474
  CDS Start-End: 332-727

SEQ ID NO: 131208 - DNA, 501 bp, Homo sapiens; identical to SEQ ID NO: 131199
  Payload ID: 5618
  Gene Symbol: EIF3K
  Gene Name: eukaryotic translation initiation factor 3, subunit K
  ENST ID: ENST00000634882
  CDS Start-End: 84-497

SEQ ID NO: 131209 - DNA, 1599 bp, Homo sapiens
  Payload ID: 5619
  Gene Symbol: EIF3L
  Gene Name: eukaryotic translation initiation factor 3, subunit L
  Uniprot ID: Q9Y262
  ENST ID: ENST00000381683
  CDS Start-End: 34-1584
ctctttccggcggtgctcgcaagcgaggcagccatgtcttatcccgctgatgattatgagtctgaggcggcttatgacccctacgcttatcccagcgactatgatatgcacacaggagatccaaagcaggaccttgcttatgaacgtcagtatgaacagcaaacctatcaggtgatccctgaggtgatcaaaaacttcatccagtatttccacaaaactgtctcagatttgattgaccagaaagtgtatgagctacaggccagtcgtgtctccagtgatgtcattgaccagaaggtgtatgagatccaggacatctatgagaacagctggaccaagctgactgaaagattcttcaagaatacaccttggcccgaggctgaagccattgctccacaggttggcaatgatgctgtcttcctgattttatacaaagaattatactacaggcacatatatgccaaagtcagttttcagtcattcagtcagtaccgctgtaagactgccaagaagtcagaggaggagattgactttcttcgttccaatcccaaaatctggaatgttcatagtgtcctcaatgtccttcattccctggtagacaaatccaacatcaaccgacagttggaggtatacacaagcggaggtgaccctgagagtgtggctggggagtatgggcggcactccctctacaaaatgcttggttacttcagcctggtcgggcttctccgcctgcactccctgttaggagattactaccaggccatcaaggtgctggagaacatcgaactgaacaagaagagtatgtattcccgtgtgccagagtgccaggtcaccacatactattatgttgggtttgcatatttgatgatgcgtcgttaccaggatgccatccgggtcttcgccaacatcctcctctacatccagaggaccaagagcatgttccagaggaccacgtacaagtatgagatgattaacaagcagaatgagcagatgcatgcgctgctggccattgccctcacgatgtaccccatgcgtattgatgagagcattcacctccagctgcgggagaaatatggggacaagatgttgcgcatgcagaaaggtgacccacaagtctatgaagaacttttcagttactcctgccccaagttcctgtcgcctgtagtgcccaactatgataatgtgcaccccaactaccacaaagagcccttcctgcagcagctgaaggtgttttctgatgaagtacagcagcaggcccagctttcaaccatccgcagcttcctgaagctctacaccaccatgcctgtggccaagctggctggcttcctggacctcacagagcaggagttccggatccagcttcttgtcttcaaacacaagatgaagaacctcgtgtggaccagcggtatctcagccctggatggtgaatttcagtcagcctcagaggttgacttctacattgataaggacatgatccacatcgcggacaccaaggtcgccaggcgttatggggatttcttcatccgtcagatccacaaatttgaggagcttaatcgaaccctgaagaagatgggacagagaccttgatgatattcacacaca

SEQ ID NO: 131210 - DNA, 2282 bp, Homo sapiens
  Payload ID: 5619
  Gene Symbol: EIF3L
  Gene Name: eukaryotic translation initiation factor 3, subunit L
  ENST ID: ENST00000406934
  CDS Start-End: 716-2116
aggtaaggtggccgtaagggcgcggtgggctccacgacggggtgatctctgggaccactggatgtgggtcccggcgcgaggcagcttccgggtcgcggccagctccggccgacctcccgcccggccctcaggctgctcccacagttcccggtccctagacaaccctggctctgcccgcccacttcgcgtgttcgattggcttgtccttcccctttctaagaccggagactaaggcctgttagacgtttctgtgtttctgcacctgagtttttttggtctaggctccgtctggtcaaatctcgctgattcccacagcctcttgtcctttgctccacctcattgcacccgtaatgttgtattgtcattgtctgtttactgtcccttttctctaaggcgtgtgagttcctcaaaggcaggcacagtgtcttattcgcctctgtatccttagctctctgcttggcatctagactctaggatgagcgttttgaattcacgacttggcggctgtccttgactgtgtctctttccttctaggcggcttatgacccctacgcttatcccagcgactatgatatgcacacaggagatccaaagcaggaccttgcttatgaacgtcagtatgaacagcaaacctatcaggtgatccctgaggtgatcaaaaacttcatccagtatttccacaaaactgtctcagatttgattgaccagaaagtgtatgagctacaggccagtcgtgtctccagtgatgtcattgaccagaaggtgtatgagatccaggacatctatgagaacagatgctgtcttcctgattttatacaaagaattatactacaggcacatatatgccaaagtcagtgggggaccttccttggagcagaggtttgaatcctattacaactactgcaatctcttcaactacattcttaatgccgatggtcctgctccccttgaactacccaaccagtggctctgggatattatcgatgagttcatctaccagtttcagtcattcagtcagtaccgctgtaagactgccaagaagtcagaggaggagattgactttcttcgttccaatcccaaaatctggaatgttcatagtgtcctcaatgtccttcattccctggtagacaaatccaacatcaaccgacagttggaggtatacacaagcggaggtgaccctgagagtgtggctggggagtatgggcggcactccctctacaaaatgcttggttacttcagcctggtcgggcttctccgcctgcactccctgttaggagattactaccaggccatcaaggtgctggagaacatcgaactgaacaagaagagtatgtattcccgtgtgccagagtgccaggtcaccacatactattatgttgggtttgcatatttgatgatgcgtcgttaccaggatgccatccgggtcttcgccaacatcctcctctacatccagaggaccaagagcatgttccagaggaccacgtacaagtatgagatgattaacaagcagaatgagcagatgcatgcgctgctggccattgccctcacgatgtaccccatgcgtattgatgagagcattcacctccagctgcgggagaaatatggggacaagatgttgcgcatgcagaaaggtgacccacaagtctatgaagaacttttcagttactcctgccccaagttcctgtcgcctgtagtgcccaactatgataatgtgcaccccaactaccacaaagagcccttcctgcagcagctgaaggtgttttctgatgaagtacagcagcaggcccagctttcaaccatccgcagcttcctgaagctctacaccaccatgcctgtggccaagctggctggcttcctggacctcacagagcaggagttccggatccagcttcttgtcttcaaacacaagatgaagaacctcgtgtggaccagcggtatctcagccctggatggtgaatttcagtcagcctcagaggttgacttctacattgataaggacatgatccacatcgcggacaccaaggtcgccaggcgttatggggatttcttcatccgtcagatccacaaatttgaggagcttaatcgaaccctgaagaagatgggacagagaccttgatgatattcacacacattcaggaacctgttttgatgtattataggcaggaagtgtttttgctaccgtgaaacctttacctagatcagccatcagcctgtcaactcagttaacaagttaaggaccgaagtgtttcaagtggatctcagtaaaggatctttggagccag

SEQ ID NO: 131211 - DNA, 583 bp, Homo sapiens
  Payload ID: 5619
  Gene Symbol: EIF3L
  Gene Name: eukaryotic translation initiation factor 3, subunit L
  ENST ID: ENST00000451427
  CDS Start-End: 134-583
cacagttcccggtccctagacaaccctggctctgcccgcccacttcgcgtgttcgattggcttgtccttcccctttctaagaccggagactaaggcggcttatgacccctacgcttatcccagcgactatgatatgcacacaggagatccaaagcaggaccttgcttatgaacgtcagtatgaacagcaaacctatcaggtgatccctgaggtgatcaaaaacttcatccagtatttccacaaaactgtctcagatttgattgaccagaaagtgtatgagctacaggccagtcgtgtctccagtgatgtcattgaccagaaggtgtatgagatccaggacatctatgagaacagctggaccaagctgactgaaagattcttcaagaatacaccttggcccgaggctgaagccattgctccacaggttggcaatgatgctgtcttcctgattttatacaaagaattatactacaggcacatatatgccaaagtcagtgggggaccttccttggagcagaggtttgaatcctattacaactactgcaatctcttcaactacattcttaatgccgatggtcctgct

SEQ ID NO: 131212 - DNA, 581 bp, Homo sapiens
  Payload ID: 5619
  Gene Symbol: EIF3L
  Gene Name: eukaryotic translation initiation factor 3, subunit L
  ENST ID: ENST00000414316
  CDS Start-End: 31-581
tttccggcggtgctcgcaagcgaggcagccatgtcttatcccgctgatgattatgagtctgaggcggcttatgacccctacgcttatcccagcgactatgatatgcacacagagacgaggtttcgccgtgttgtccaggctggtcttgaactcctgacctcaggagatccaaagcaggaccttgcttatgaacgtcagtatgaacagcaaacctatcaggtgatccctgaggtgatcaaaaacttcatccagtatttccacaaaactgtctcagatttgattgaccagaaagtgtatgagctacaggccagtcgtgtctccagtgatgtcattgaccagaaggtgtatgagatccaggacatctatgagaacagctggaccaagctgactgaaagattcttcaagaatacaccttggcccgaggctgaagccattgctccacaggttggcaatgatgctgtcttcctgattttatacaaagaattatactacaggcacatatatgccaaagtcagtgggggaccttccttggagcagaggtttgaatcctattacaactactgcaatctcttcaactacat

SEQ ID NO: 131213 - DNA, 574 bp, Homo sapiens
  Payload ID: 5619
  Gene Symbol: EIF3L
  Gene Name: eukaryotic translation initiation factor 3, subunit L
  ENST ID: ENST00000436452
  CDS Start-End: 1-123
tttccggcggtgctcgcaagcgaggcagccatgtcttatcccgctgatgattatgagtctgaggagatccaaagcaggaccttgcttatgaacgtcagtatgaacagcaaacctatcaggtgatccctgaggtgatcaaaaacttcatccagtatttccacaaaactgtctcagatttgattgaccagaaagtgtatgagctacaggccagtcgtgtctccagtgatgtcattgaccagaaggtgtatgagatccaggacatctatgagaacagctggaccaagctgactgaaagattcttcaagaatacaccttggcccgaggctgaagccattgctccacaggttggcaatgatgctgtcttcctgattttatacaaagaattatactacaggcacatatatgccaaagtcagtgggggaccttccttggagcagaggtttgaatcctattacaactactgcaatctcttcaactacattcttaatgccgatggtcctgctccccttgaactacccaaccagtggctctgggatattatcgatgagttcatctaccagtttcagtcattcag

SEQ ID NO: 131214 - DNA, 787 bp, Homo sapiens
  Payload ID: 5619
  Gene Symbol: EIF3L
  Gene Name: eukaryotic translation initiation factor 3, subunit L
  ENST ID: ENST00000439997
  CDS Start-End: 1-384
atttcgctctttccggcggtgctcgcaagcgaggcagccatgtcttatcccgctgatgattatgagtctgaggcggcttatgacccctacgcttatcccagcgactatgatatgcacacaggagatccaaagcaggaccttgcttatgaacgtcagtatgaacagcaaacctatcaggtgatccctgaggtgatcaaaaacttcatccagtatttccacaaaactgtctcagatttgattgaccagaaagtgtatgagctacaggccagtcgtgtctccagtgatgtcattgaccagaaggtgtatgagatccaggacatctatgagaacaggtatgggctactggctgaaagggcctctttctgggtgggactggcctggtaatatagttcctacaaatgagctggaccaagctgactgaaagattcttcaagaatacaccttggcccgaggctgaagccattgctccacaggttggcaatgatgctgtcttcctgattttatacaaagaattatactacaggcacatatatgccaaagtcagtgggggaccttccttggagcagaggtttgaatcctattacaactactgcaatctcttcaactacattcttaatgccgatggtcctgctccccttgaactacccaaccagtggctctgggatattatcgatgagttcatctaccagtttcagtcattcagtcagtaccgctgtaagactgccaagaagtcagaggaggagattgactttcttcgttccaatcccaaaatctggaatgttcatag

SEQ ID NO: 131215 - DNA, 520 bp, Homo sapiens
  Payload ID: 5619
  Gene Symbol: EIF3L
  Gene Name: eukaryotic translation initiation factor 3, subunit L
  ENST ID: ENST00000450376
  CDS Start-End: 1-330
cagcttcttgtcttcaaacacaagatgaagaacctcgtgtggaccagcggtatctcagccctggatggtgaatttcagtcagcctcagaggttgacttctacattgataaggacatgatccacatcgcggacaccaaggtcgccaggcgttatggggatttcttcatccgtcagatccacaaatttgaggagatggagtcttgtgctgtcacccatgctggagtgcagcgacgtgatcttagctcactgcaacctctgcctcctgggttcaagcgagtctccctcctcagcctcccgcatagctggaattacagcttaatcgaaccctgaagaagatgggacagagaccttgatgatattcacacacattcaggaacctgttttgatgtattataggcaggaagtgtttttgctaccgtgaaacctttacctagatcagccatcagcctgtcaactcagttaacaagttaaggaccgaagtgtttcaagtggatctcagtaaaggatctttggagccaga

SEQ ID NO: 131216 - DNA, 3220 bp, Homo sapiens
  Payload ID: 5619
  Gene Symbol: EIF3L
  Gene Name: eukaryotic translation initiation factor 3, subunit L
  ENST ID: ENST00000412331
  CDS Start-End: 454-2277
aactttgcctctcctttacgccaaatacgtgtccttatatctgaatctacaccactattatagattcaccttctttgagaagtccctatttgaagagaggaaaattcaggctacttgtaaccctcttattctttttagacggagttttccctcttgttgcccaggctagagtgcaatggcgcgatctcggctcaccgcaacctccgcctcccgggttcaagcgactctcctgcctcagcctcccgagtagctggaattacaggcatgcgccaccactcccggctaattttgtatttttagtagagacggggtttctccatattggtcaggctggtctcaaacccccggcctcagcctcaggtgatccgcccgcctcggcctcccaaactggtggggttacaggtgtgagccacggaacgcggctcctcttccttctggatatggctgtctcagatggccagaggcctcggaaaggcttccggtttcccggcaggcccgagtggggctgaacttccggcctcaggacgcaggcgcgggccgctcatttcgctctttccggcggtgctcgcaagcgaggcagccatgtcttatcccgctgatgattatgagtctgaggcggcttatgacccctacgcttatcccagcgactatgatatgcacacaggagatccaaagcaggaccttgcttatgaacgtcagtatgaacagcaaacctatcaggtgatccctgaggtgatcaaaaacttcatccagtatttccacaaaactgtctcagatttgattgaccagaaagtgtatgagctacaggccagtcgtgtctccagtgatgtcattgaccagaaggtgtatgagatccaggacatctatgagaacagctggaccaagctgactgaaagattcttcaagaatacaccttggcccgaggctgaagccattgctccacaggttggcaatgatgctgtcttcctgattttatacaaagaattatactacaggcacatatatgccaaagtcagtgggggaccttccttggagcagaggtttgaatcctattacaactactgcaatctcttcaactacattcttaatgccgatggtcctgctccccttgaactacccaaccagtggctctgggatattatcgatgagttcatctaccagtttcagtcattcagtcagtaccgctgtaagactgccaagaagtcagaggaggagattgactttcttcgttccaatcccaaaatctggaatgttcatagtgtcctcaatgtccttcattccctggtagacaaatccaacatcaaccgacagttggaggtatacacaagcggaggtgaccctgagagtgtggctggggagtatgggcggcactccctctacaaaatgcttggttacttcagcctggtcgggcttctccgcctgcactccctgttaggagattactaccaggccatcaaggtgctggagaacatcgaactgaacaagaagagtatgtattcccgtgtgccagagtgccaggtcaccacatactattatgttgggtttgcatatttgatgatgcgtcgttaccaggatgccatccgggtcttcgccaacatcctcctctacatccagaggaccaagagcatgttccagaggaccacgtacaagtatgagatgattaacaagcagaatgagcagatgcatgcgctgctggccattgccctcacgatgtaccccatgcgtattgatgagagcattcacctccagctgcgggagaaatatggggacaagatgttgcgcatgcagaaaggtgacccacaagtctatgaagaacttttcagttactcctgccccaagttcctgtcgcctgtagtgcccaactatgataatgtgcaccccaactaccacaaagagcccttcctgcagcagctgaaggtgttttctgatgaagtacagcagcaggcccagctttcaaccatccgcagcttcctgaagctctacaccaccatgcctgtggccaagctggctggcttcctggacctcacagagcaggagttccggatccagcttcttgtcttcaaacacaagatgaagaacctcgtgtggaccagcggtatctcagccctggatggtgaatttcagtcagcctcagaggttgacttctacattgataaggacatgatccacatcgcggacaccaaggtcgccaggcgttatggggatttcttcatccgtcagatccacaaatttgaggagcttaatcgaaccctgaagaagatgggacagagaccttgatgatattcacacacattcaggaacctgttttgatgtattataggcaggaagtgtttttgctaccgtgaaacctttacctagatcagccatcagcctgtcaactcagttaacaagttaaggaccgaagtgtttcaagtggatctcagtaaaggatctttggagccagatttgtcgtctcattattgtaggagagaatttgtgggttgtggcagtaatacatttcccatgtgtcctgatgctttcaggatacatcagttgttagtgtttaaattgagttatttttattttgtgcttttgagatggagtctcactctgtctcccaggctggagtgcagtagcgtgatctcagttcgttgcatcctccgctgcccaggttcaagcagttctgcctcagccttccaagtagctgggattacaggcgtgtgccaccacactcagctaatttttgtattctcagtagagatgggttttaccatgttggccaggctggtctcgaactcctggcctcaagtgattcgcctgccttggcctcccaaaatgtgctaggattacaggcatgagccaccacgccccgcctaaattcaaaatctttttgtttttttttagacggagtctcactctgtcgcccaggttggagtgtactggcgcgatctcggctcactgcaagctccacctcccaggttcctgccattctcctgcctcagcctcccaagtagctgggactacaggcacccgccaccatgcccggccaattttttgtattttttagtagagatggggtttcaccgtgttagccaggatggtctcagatttcctgacctcgtgatctgcccatctctgcctcctaaagtactgggattacaggcgtgagccaccgtgcccagccctaaattgaattcttaaatccctcttgttcataaagcagtatatttggtttacagga

SEQ ID NO: 131217 - DNA, 2091 bp, Homo sapiens
  Payload ID: 5619
  Gene Symbol: EIF3L
  Gene Name: eukaryotic translation initiation factor 3, subunit L
  Uniprot ID: Q9Y262
  ENST ID: ENST00000624234
  CDS Start-End: 79-1773
gctgaacttccggcctcaggacgcaggcgcgggccgctcatttcgctctttccggcggtgctcgcaagcgaggcagccatgtcttatcccgctgatgattatgagtctgaggcggcttatgacccctacgcttatcccagcgactatgatatgcacacaggagatccaaagcaggaccttgcttatgaacgtcagtatgaacagcaaacctatcaggtgatccctgaggtgatcaaaaacttcatccagtatttccacaaaactgtctcagatttgattgaccagaaagtgtatgagctacaggccagtcgtgtctccagtgatgtcattgaccagaaggtgtatgagatccaggacatctatgagaacagctggaccaagctgactgaaagattcttcaagaatacaccttggcccgaggctgaagccattgctccacaggttggcaatgatgctgtcttcctgattttatacaaagaattatactacaggcacatatatgccaaagtcagtgggggaccttccttggagcagaggtttgaatcctattacaactactgcaatctcttcaactacattcttaatgccgatggtcctgctccccttgaactacccaaccagtggctctgggatattatcgatgagttcatctaccagtttcagtcattcagtcagtaccgctgtaagactgccaagaagtcagaggaggagattgactttcttcgttccaatcccaaaatctggaatgttcatagtgtcctcaatgtccttcattccctggtagacaaatccaacatcaaccgacagttggaggtatacacaagcggaggtgaccctgagagtgtggctggggagtatgggcggcactccctctacaaaatgcttggttacttcagcctggtcgggcttctccgcctgcactccctgttaggagattactaccaggccatcaaggtgctggagaacatcgaactgaacaagaagagtatgtattcccgtgtgccagagtgccaggtcaccacatactattatgttgggtttgcatatttgatgatgcgtcgttaccaggatgccatccgggtcttcgccaacatcctcctctacatccagaggaccaagagcatgttccagaggaccacgtacaagtatgagatgattaacaagcagaatgagcagatgcatgcgctgctggccattgccctcacgatgtaccccatgcgtattgatgagagcattcacctccagctgcgggagaaatatggggacaagatgttgcgcatgcagaaaggtgacccacaagtctatgaagaacttttcagttactcctgccccaagttcctgtcgcctgtagtgcccaactatgataatgtgcaccccaactaccacaaagagcccttcctgcagcagctgaaggtgttttctgatgaagtacagcagcaggcccagctttcaaccatccgcagcttcctgaagctctacaccaccatgcctgtggccaagctggctggcttcctggacctcacagagcaggagttccggatccagcttcttgtcttcaaacacaagatgaagaacctcgtgtggaccagcggtatctcagccctggatggtgaatttcagtcagcctcagaggttgacttctacattgataaggacatgatccacatcgcggacaccaaggtcgccaggcgttatggggatttcttcatccgtcagatccacaaatttgaggagcttaatcgaaccctgaagaagatgggacagagaccttgatgatattcacacacattcaggaacctgttttgatgtattataggcaggaagtgtttttgctaccgtgaaacctttacctagatcagccatcagcctgtcaactcagttaacaagttaaggaccgaagtgtttcaagtggatctcagtaaaggatctttggagccagatttgtcgtctcattattgtaggagagaatttgtgggttgtggcagtaatacatttcccatgtgtcctgatgctttcaggatacatcagttgttagtgtttaaattgagttatttttattttgtgcttttgagatggagtctcactctgtct

SEQ ID NO: 131218 - DNA, 889 bp, Homo sapiens
  Payload ID: 5620
  Gene Symbol: EIF3M
  Gene Name: eukaryotic translation initiation factor 3, subunit M
  ENST ID: ENST00000323213
  CDS Start-End: 317-889
gtcggcgtggtcttgcgagtggagtgtccgctgtgcccgggcctgcaccatgagcgtcccggccttcatcgacatcagtgaagaagatcagtttttcagaaagaggacagaatttgagattgtgctttgtcattcgtagtcagttttataatagagcaatcctcaacaggctgctgagcttcgtgcttatctgaaatctaaaggagctgagatttcagaagagaactcggaaggtggacttcatgttgatttagctcaaattattgaagcctgtgatgtgtgtctgaaggaggatgataaagatgttgaaagtgtgatgaacagtgtggtatccctactcttgatcctggaaccagacaagcaagaagctttgattgaaagcctatgtgaaaagctggtcaaatttcgcgaaggtgaacgcccgtctctgagactgcagttgttaagcaaccttttccacgggatggataagaatactcctgtaagatacacagtgtattgcagccttattaaagtggcagcatcttgtggggccatccagtacatcccaactgagctggatcaagttagaaaatggatttctgactggaatctcaccactgaaaaaaagcacacccttttaagactactttatgaggcacttgtggattgtaagaagagtgatgctgcttcaaaagtcatggtggaattgctcggaagttacacagaggacaatgcttcccaggctcgagttgatgcccacaggtgtattgtacgagcattgaaagatccaaatgcatttctttttgaccaccttcttactttaaaaccagtcaagtttttggaaggcgagcttattcatgatcttttaaccatttttgtgagtgctaaattggcatcatatgtcaag

SEQ ID NO: 131219 - DNA, 662 bp, Homo sapiens
  Payload ID: 5620
  Gene Symbol: EIF3M
  Gene Name: eukaryotic translation initiation factor 3, subunit M
  ENST ID: ENST00000526267
  CDS Start-End: 1-662
aaaaagcacacccttttaagactactttatgaggcacttgtggattgtaagaagagtgatgctgcttcaaaagtcatggtggaattgctcggaagttacacagaggacaatgcttcccaggctcgagttgatgcccacaggtgtattgtacgagcattgaaagatccaaatgcatttctttttgaccaccttcttactttaaaaccagtcaagtttttggaaggcgagcttattcatgatcttttaaccatttttgtgagtgctaaattggcatcatatgtcaagttttatcagaataataaagacttcattgattcacttggcctgttacatgaacagaatatggcaaaaatgagactacttacttttatgggaatggcagtagaaaataaggaaatttcttttgacacaatgcagcaagaacttcagattggagctgatgatgttgaagcatttgttattgacgccgtaagaactaaaatggtctactgcaaaattgatcagacccagagaaaagtagttgtcagttgctcaggagaattagaaggcttaggatcaatatgtcatagcacacatcggacatttggaaaacagcagtggcaacaactgtatgacacacttaatgcctggaaacaaaatctgaacaaagtgaaaaacagcct

SEQ ID NO: 131220 - DNA, 1645 bp, Homo sapiens
  Payload ID: 5620
  Gene Symbol: EIF3M
  Gene Name: eukaryotic translation initiation factor 3, subunit M
  ENST ID: ENST00000524711
  CDS Start-End: 41-220
gtcttgcgagtggagtgtccgctgtgcccgggcctgcaccatgagcgtcccggccttcatcgacatcagtgaagaagatcaggctgctgagcttcgtgcttatctgaaatctaaaggagctgagatttcagaagagaactcggaaggtggacttcatgttgatttagctcaaattattgaagcctgtgatgtgtgtctgaaggaggatgataaaggttagaaaatggatttctgactggaatctcaccactgaaaaaaagcacacccttttaagactactttatgaggcacttgtggattgtaagaagagtgatgctgcttcaaaagtcatggtggaattgctcggaagttacacagaggacaatgcttcccaggctcgagttgatgcccacaggtaatgttaaacgttactctgatgagggtttgacagcgatgtagaggtaagctacaatattaaattaagtaactgaaatcatgtttgcaactaccagtgatccagagccatttgatagtgtgtatttcctggtgattctaatgtagatactaaaattcaaggtttgatattggaagaactgtggattgaatatgaagtagctgcatggcgtttacctggcggggggggtattgctggtatggggatgatgatcccaacccaagaattagaacctaatcttgggccaattgaccctaattttaaggttataggtggaaagttgatggcttgccaaaaattaacccattgctaatgagtataagggcttttaacagtcttagatctaactggtaacaagaatagaatcagttttctaaatctatgtaataaggattatgaaacttctttttttggtcattgctttgtgtggacctctacatgataggagttggtaaaaagggaagttggtggtaaagatccttgactttgaggtcaggctgcctccattcacattcttactccacctcttaatgagcacttctgaactgcttcatagttgataaagggggcagagtaatactgtttgtctcctaggttgttgtgaggaataaatgagatgtaaggcaagtgaagcacttagtgtcttggcatgtggttctgctgctgcttactatttgattaccttggtgctttctctccagctatgtttttatctacaattaatatatttcattttgttaaaacagatgaacctgataaatgtgttggcctgtcttaacccaatcctgtagcttttttaatgttgtttatatgttttggactgttagatattttgccgaattaagtatattttatgatctgcaaaaactcaatgaaaagccaggatttcaaaaccctgagcttacatttttgttctctaattaaggtgtattgtacgagcattgaaagatccaaatgcatttctttttgaccaccttcttactttaaaaccagtcaagtttttggaaggcgagcttattcatgatcttttaaccatttttgtgagtgctaaattggcatcatatgtcaagttttatcagaataataaagacttcattgattcacttggcctgttacatgaacagaatatggcaaaaatgagactacttacttttatgggaatggcagtagaaaataaggaaatttcttttgacacaatgcagcaagaacttc

SEQ ID NO: 131221 - DNA, 749 bp, Homo sapiens
  Payload ID: 5620
  Gene Symbol: EIF3M
  Gene Name: eukaryotic translation initiation factor 3, subunit M
  ENST ID: ENST00000533439
  CDS Start-End: 444-749
ctggggcgcgcgttcctggcctcgattcgcaccagctcgccggccggcggtcccagcgcggggcccgacgcttcaccgccagctccctggtcggcgtcgggactcatttctgacgacatagtacttttagactgatgaggaatgatgtctgcttccgtccgtcaaatgcagccacattcggagtgggaggtggtgaatctgtagttagcataagcaggtttttcagaaagaggacagaatttgagattgtgctttgtcattcgtagtcagttttataatagagcaatcctcaacaggctgctgagcttcgtgcttatctgaaatctaaaggagctgagatttcagaagagaactcggaaggtggacttcatgttgatttagctcaaattattgaagcctgtgatgtgtgtctgaaggaggatgataaagatgttgaaagtgtgatgaacagtgtggtatccctactcttgatcctggaaccagacaagcaagaagctttgattgaaagcctatgtgaaaagctggtcaaatttcgcgaaggtgaacgcccgtctctgagactgcagttgttaagcaaccttttccacgggatggataagaatactcctgtaagatacacagtgtattgcagccttattaaagtggcagcatcttgtggggccatccagtacatcccaactgagctggatcaagttagaaaatggatttctgactggaatctcaccactgaaaaaaagcacaccctttta

SEQ ID NO: 131222 - DNA, 2236 bp, Homo sapiens
  Payload ID: 5620
  Gene Symbol: EIF3M
  Gene Name: eukaryotic translation initiation factor 3, subunit M
  ENST ID: ENST00000525782
  CDS Start-End: 57-281
ttttccggtcggcgtggtcttgcgagtggagtgtccgctgtgcccgggcctgcaccatgagcgtcccggccttcatcgacatcagtgaagaagatcaggttagaaaatggatttctgactggaatctcaccactgaaaaaaagcacacccttttaagactactttatgaggcacttgtggattgtaagaagagtgatgctgcttcaaaagtcatggtggaattgctcggaagttacacagaggacaatgcttcccaggctcgagttgatgcccacaggtaatgttaaacgttactctgatgagggtttgacagcgatgtagaggtaagctacaatattaaattaagtaactgaaatcatgtttgcaactaccagtgatccagagccatttgatagtgtgtatttcctggtgattctaatgtagatactaaaattcaaggtttgatattggaagaactgtggattgaatatgaagtagctgcatggcgtttacctggcggggggggtattgctggtatggggatgatgatcccaacccaagaattagaacctaatcttgggccaattgaccctaattttaaggttataggtggaaagttgatggcttgccaaaaattaacccattgctaatgagtataagggcttttaacagtcttagatctaactggtaacaagaatagaatcagttttctaaatctatgtaataaggattatgaaacttctttttttggtcattgctttgtgtggacctctacatgataggagttggtaaaaagggaagttggtggtaaagatccttgactttgaggtcaggctgcctccattcacattcttactccacctcttaatgagcacttctgaactgcttcatagttgataaagggggcagagtaatactgtttgtctcctaggttgttgtgaggaataaatgagatgtaaggcaagtgaagcacttagtgtcttggcatgtggttctgctgctgcttactatttgattaccttggtgctttctctccagctatgtttttatctacaattaatatatttcattttgttaaaacagatgaacctgataaatgtgttggcctgtcttaacccaatcctgtagcttttttaatgttgtttatatgttttggactgttagatattttgccgaattaagtatattttatgatctgcaaaaactcaatgaaaagccaggatttcaaaaccctgagcttacatttttgttctctaattaaggtgtattgtacgagcattgaaagatccaaatgcatttctttttgaccaccttcttactttaaaaccagtcaagtttttggaaggcgagcttattcatgatcttttaaccatttttgtgagtgctaaattggcatcatatgtcaagttttatcagaataataaagacttcattgattcacttggcctgttacatgaacagaatatggcaaaaatgagactacttacttttatgggaatggcagtagaaaataaggaaatttcttttgacacaatgcagcaagaacttcagattggagctgatgatgttgaagcatttgttattgacggtaaggcagacagaacattttcatttatttctagaatttctcatctactacatggatcatagtaagatttttatctggaaactgagccttacacaacaaagatttgtttatagcagatgtgtatttagtagattagtggatatatttgttgtagggtgaaaatttagtagaaatataaactgctatattctatcccttgaaatcacgtagaacaaagacgtttaggcaatacaccactgtggttaagagcacagattttagtattagatgtggatttaagaccaggcccttcctttgtgaaacaggaatgtaggggttcatttgtggttgtaagaattaaatgaattaatacaggtaaagcacagtgcctggcacatagtaagtgatctttcaagtgttaaccattaccagtttttttatgattagcctagaaacaagaacttcttccccaacaattagattataaagcaacttaactgctcaggaattttttctgagctttttaaatttgaaagttgggattatgcaattaagattaataaaaggtacagaactattgaccttttttcccctaatgctctaagttttctatgaagaagtaataacttagtaggaaattagtttattcccctatatgagatggtaggggaagaacacctagcattcttt

SEQ ID NO: 131223 - DNA, 1697 bp, Homo sapiens
  Payload ID: 5620
  Gene Symbol: EIF3M
  Gene Name: eukaryotic translation initiation factor 3, subunit M
  ENST ID: ENST00000531921
  CDS Start-End: 91-462
agttgcgccagcagcgtcgcgcggcccagttcccttttccggtcggcgtggtcttgcgagtggagtgtccgctgtgcccgggcctgcaccatgagcgtcccggccttcatcgacatcagtgaagaagatcaggctgctgagcttcgtgcttatctgaaatctaaaggagctgagatttcagaagagaactcggaaggtggacttcatgttgatttagctcaaattattgaagcctgtgatgtgtgtctgaaggaggatgataaagatgttgaaagtgtgatgaacagtgtggtatccctactcttgatcctggaaccagacaagcaagaagctttgattgaaagcctatgtgaaaagctggtcaaatttcgcgaaggtgaacgcccgtctctgagactgcagttgttagaaaatggatttctgactggaatctcaccactgaaaaaaagcacacccttttaagactactttatgaggcacttgtggattgtaagaagagtgatgctgcttcaaaagtcatggtggaattgctcggaagttacacagaggacaatgcttcccaggctcgagttgatgcccacaggtaatgttaaacgttactctgatgagggtttgacagcgatgtagaggtaagctacaatattaaattaagtaactgaaatcatgtttgcaactaccagtgatccagagccatttgatagtgtgtatttcctggtgattctaatgtagatactaaaattcaaggtttgatattggaagaactgtggattgaatatgaagtagctgcatggcgtttacctggcggggggggtattgctggtatggggatgatgatcccaacccaagaattagaacctaatcttgggccaattgaccctaattttaaggttataggtggaaagttgatggcttgccaaaaattaacccattgctaatgagtataagggcttttaacagtcttagatctaactggtaacaagaatagaatcagttttctaaatctatgtaataaggattatgaaacttctttttttggtcattgctttgtgtggacctctacatgataggagttggtaaaaagggaagttggtggtaaagatccttgactttgaggtcaggctgcctccattcacattcttactccacctcttaatgagcacttctgaactgcttcatagttgataaagggggcagagtaatactgtttgtctcctaggttgttgtgaggaataaatgagatgtaaggcaagtgaagcacttagtgtcttggcatgtggttctgctgctgcttactatttgattaccttggtgctttctctccagctatgtttttatctacaattaatatatttcattttgttaaaacagatgaacctgataaatgtgttggcctgtcttaacccaatcctgtagcttttttaatgttgtttatatgttttggactgttagatattttgccgaattaagtatattttatgatctgcaaaaactcaatgaaaagccaggatttcaaaaccctgagcttacatttttgttctctaattaaggtgtattgtacgagcattgaaagatccaaatgcatttctttttgaccaccttcttactttaaaaccagtcaagtttttggaaggcgagcttattcatgatcttttaaccatttttgtgagtgctaaattggcatcatatgtcaagtttta

SEQ ID NO: 131224 - DNA, 633 bp, Homo sapiens
  Payload ID: 5620
  Gene Symbol: EIF3M
  Gene Name: eukaryotic translation initiation factor 3, subunit M
  ENST ID: ENST00000532444
  CDS Start-End: 51-143
ggtcggcgtggtcttgcgagtggagtgtccgctgtgcccgggcctgcaccatgagcgtcccggccttcatcgacatcagtgaagaagatcaggagctgagatttcagaagagaactcggaaggtggacttcatgttgatttagctcaaattattgaagcctgtgatgtgtgtctgaaggaggatgataaagatgttgaaagtgtgatgaacagtgtggtatccctactcttgatcctggaaccagacaagcaagaagctttgattgaaagcctatgtgaaaagctggtcaaatttcgcgaaggtgaacgcccgtctctgagactgcagttgttaagcaaccttttccacgggatggataagaatactcctgtaagatacacagtgtattgcagccttattaaagtggcagcatcttgtggggccatccagtacatcccaactgagctggatcaagttagaaaatggatttctgactggaatctcaccactgaaaaaaagcacacccttttaagactactttatgaggcacttgtggattgtaagaagagtgatgctgcttcaaaagtcatggtggaattgctcggaagttacacagaggacaatgcttcccaggctcgagttgatgcccacag

SEQ ID NO: 131225 - DNA, 5051 bp, Homo sapiens
  Payload ID: 5620
  Gene Symbol: EIF3M
  Gene Name: eukaryotic translation initiation factor 3, subunit M
  Uniprot ID: Q7L2H7
  ENST ID: ENST00000531120
  CDS Start-End: 64-1188
agttcccttttccggtcggcgtggtcttgcgagtggagtgtccgctgtgcccgggcctgcaccatgagcgtcccggccttcatcgacatcagtgaagaagatcaggctgctgagcttcgtgcttatctgaaatctaaaggagctgagatttcagaagagaactcggaaggtggacttcatgttgatttagctcaaattattgaagcctgtgatgtgtgtctgaaggaggatgataaagatgttgaaagtgtgatgaacagtgtggtatccctactcttgatcctggaaccagacaagcaagaagctttgattgaaagcctatgtgaaaagctggtcaaatttcgcgaaggtgaacgcccgtctctgagactgcagttgttaagcaaccttttccacgggatggataagaatactcctgtaagatacacagtgtattgcagccttattaaagtggcagcatcttgtggggccatccagtacatcccaactgagctggatcaagttagaaaatggatttctgactggaatctcaccactgaaaaaaagcacacccttttaagactactttatgaggcacttgtggattgtaagaagagtgatgctgcttcaaaagtcatggtggaattgctcggaagttacacagaggacaatgcttcccaggctcgagttgatgcccacaggtgtattgtacgagcattgaaagatccaaatgcatttctttttgaccaccttcttactttaaaaccagtcaagtttttggaaggcgagcttattcatgatcttttaaccatttttgtgagtgctaaattggcatcatatgtcaagttttatcagaataataaagacttcattgattcacttggcctgttacatgaacagaatatggcaaaaatgagactacttacttttatgggaatggcagtagaaaataaggaaatttcttttgacacaatgcagcaagaacttcagattggagctgatgatgttgaagcatttgttattgacgccgtaagaactaaaatggtctactgcaaaattgatcagacccagagaaaagtagttgtcagtcatagcacacatcggacatttggaaaacagcagtggcaacaactgtatgacacacttaatgcctggaaacaaaatctgaacaaagtgaaaaacagccttttgagtctttctgatacctgagtttttatgcttataatttttgttctttgaaaaaaaagccctaaatcatagtaaaacattataaactaaaaaaatttgcctagtctggacagttattgtctcaaatttatactaaaatcacaaactccagaggatatgaagtaataaattacaaggggtcacaatgtctgtcatacaatacataaattctgttctttaaaaaaggatattgaagaagcaatgagcactttaaagaaaggataatatacagagagaagacagaagtagagtaatacaatttcttcacattagaaaaacttggaaaagcaaagacaaactgtagagctttaaatacaacagtcattttattctagtaaaaactataccagaatttcagttacataatttcactactgaaagcacttatctacattattttaatctgttgtttttttccaacgtctcttctgcttttcttttctttggctggttgtcattttctaaacttagtaaattttcacttttatttagttgattcgtaatgaggctctgccagtcatcatcaccagaagtatttttagtcgtcttgattgcctgcaaatggctttgtagtggagttgatatcagaggctttgttttcacctgggaaagataaactaattttaccttcgaaattattatacaaaagattttaaagagtctgtaaagcctctgcagttatgagtatgtggtaaaaccaccatctcttggctgatttccactaccttagtagttctggcaccagaaaagtatacaatgtgaatgtgtaggcttatgtagtagatcttcaaaatctctaatatataactgaagtaaagtgtacaaaaactgccttttactacttcatgtttcctcccatgcttcagaacaccattgttgaagaaacaggaagggcagtgagatatttggaagttggcatgttttcaagacactgtattgggtaattttaaaaatagtgtgttaaataactttttcattttaaggttcttttctgatgttaaaatacttactggaaatttagaaaatagagtaaagtagaaagaaactaaaaatcattagtaatcccttatccagagaggcttgttgacattttggtattatttgctgctagcgtttttttctatttttagcctatttgatcattctatagaattttatgtattttcctctgtgagcagtttcttaggtcattaaaaacaattgtctatggctgcaaaatactcccttttatggatgtttgatatatctcctactactgaatgtttgtttccagtttatccctaccaaaaattaattcgagttaatttcatgcaaaacaatctttgatgtttttgagagattcccagataaaattttctcttcaaaaggaatactgggccaggcactgtgactcatacctgtaatcccagcactttgggaaactgaggcgagtggattgcatgagctcaggagtcgaaaactagcctgagcaacatggcaaaaccccatctctaccaaaaattagctgggcatggtggcatgcaactgtagtcccagctcctcggagggctgaggtgcaaggatcatttgagcccaggaggtgaaggttgcaatgagccaagatcatgccattgcactccagcctggacaacagagtgagaccctctctcaaaaataaataatagataaaacaaaaggaatactgaattgttttcaaaataacaattatggtgggctttcttttaagatagggtctcaccctgtcacctaggctggagtgcagtggcacaatcacagctcattgcagccttgacctccctggattcaggtgatcctcccaccttcacctcctgagtaccttggactacaggcatgtgccaccacacccaggtaatttttgtattttttgccatgttgcccaggctggtctctcttaactcttgggctcaagtgatctgaccatctcggtctcccaaagttctaggattacaggagtgagccatactgtgttgtgttttagttgaaagggatatacacgtgtattttagaaatatgaaacaggataagaattacattaaaatcacccaagatcccaaccaccattaaagagtttgtgtaaatcttctggtctcttttctgtatacactttttaaatactggggtcatatttttattggtttatatgctatgttaaacatttttagcatttcctcctgttcttaagtctgttaagaggatagctccatcatattctgtgttctgcaaattatttctggacatttaaattgtaagaaaatggtcactgttaactaggctgcagtgattatcatttgttcataaatctttgtgaagatctttgggtactgccttacattaaaatctttttcaatttgaccagtaaaagtggcatgttagtaacattgtcattttcagtgttagattatgtagtactaagtttattttattttatttttgagacagagtcttgcactgtcgcccaggctggagtgcagtggcgccatctcagctcactgcaacctccacctcccaggttcaagcgattcttctgcctcagcctcccgagtagctgggattacaggcacccaccacgatgcccagctaattttttgtatttttagtagagacagggtttcactatgttgtccaggctggtctcgaacgcctgacctcatgatccacctgcctcggcctcccaaagtgttgggattacaggcatgagccaccctgcccgacctagtaatacttttttttttttttttttttaatgaacttaaatgtttagaatggtaagttcacggctccctaaggagtgttccttttggattgctctgtttggctccctccctgaaatcctatagtcagccactggtcccctcagagagttttacctctgatctttggggtgattctttgttcatatttatctgattggctttgttcttccaaaagtgtctgcacaggactgctaagagaacctaggcaagtcatttaatttttctgggcttcagtttactcattagcttcttttagttcccagatgctattactggaaagaataactagtaatggataaaaacctacataaatatttcctattttgccatcaaagtgctgggttcattttggtgtatttggcatccaagtacaaattaacagtttcccaaaatcctgattctttgacttttttatcttgatgatggaaaggaaggacacgtttacttgctttagtttctttccccttaactacccacttgctgagaggggtaggagcagggattggctttagagaaacaagatacagtgtagattagctaatgtttgcgcttaacaaaacttgtcctgtttaacttacctgagggttctgcagcctaccgcagtaattttagttctagctgttttcagatatattgccttgtatcttcgttctttcgtctcctatcctttttagaaatttatcacctgtttctctttcagcctgacttacaaaatctaatttttggcctaaaaatttcccctagcttggtactagtccttttatttctgcctgtgattatattttaaaattaaacttaaatgaatctaattcattggatatataaaaaaaaaagtaagtggcttgctttgcttactctggttttccatcctcattcctggatataatcaagattgcagtaggctaacaatctaatgctgaaaacaagaatgaaaaacataccatcttttcaagttactttggacccatagagagaaagtggattggtacttaataccttccctgaatttaacagaattgatgtggactgtacataaaatatgttgaaaaataaaactatttttttggctat

SEQ ID NO: 131226 - DNA, 1207 bp, Homo sapiens
  Payload ID: 5620
  Gene Symbol: EIF3M
  Gene Name: eukaryotic translation initiation factor 3, subunit M
  Uniprot ID: Q7L2H7
  ENST ID: ENST00000524896
  CDS Start-End: 55-783
ttccggtcggcgtggtcttgcgagtggagtgtccgctgtgcccgggcctgcaccatgagcgtcccggccttcatcgacatcagtgaagaagatcaggttagaaaatggatttctgactggaatctcaccactgaaaaaaagcacacccttttaagactactttatgaggcacttgtggattgtaagaagagtgatgctgcttcaaaagtcatggtggaattgctcggaagttacacagaggacaatgcttcccaggctcgagttgatgcccacaggtgtattgtacgagcattgaaagatccaaatgcatttctttttgaccaccttcttactttaaaaccagtcaagtttttggaaggcgagcttattcatgatcttttaaccatttttgtgagtgctaaattggcatcatatgtcaagttttatcagaataataaagacttcattgattcacttggcctgttacatgaacagaatatggcaaaaatgagactacttacttttatgggaatggcagtagaaaataaggaaatttcttttgacacaatgcagcaagaacttcagattggagctgatgatgttgaagcatttgttattgacgccgtaagaactaaaatggtctactgcaaaattgatcagacccagagaaaagtagttgtcagtcatagcacacatcggacatttggaaaacagcagtggcaacaactgtatgacacacttaatgcctggaaacaaaatctgaacaaagtgaaaaacagccttttgagtctttctgatacctgagtttttatgcttataatttttgttctttgaaaaaaaagccctaaatcatagtaaaacattataaactaaaaaaatttgcctagtctggacagttattgtctcaaatttatactaaaatcacaaactccagaggatatgaagtaataaattacaaggggtcacaatgtctgtcatacaatacataaattctgttctttaaaaaaggatattgaagaagcaatgagcactttaaagaaaggataatatacagagagaagacagaagtagagtaatacaatttcttcacattagaaaaacttggaaaagcaaagacaaactgtagagctttaaatacaacagtcattttattctagtaaaaactataccagaatttcagttacataatttcactactgaaagcacttatctacattattttaatctg

SEQ ID NO: 131227 - DNA, 5516 bp, Homo sapiens
  Payload ID: 5621
  Gene Symbol: EIF4G1
  Gene Name: eukaryotic translation initiation factor 4 gamma, 1
  Uniprot ID: Q04637
  ENST ID: ENST00000346169
  CDS Start-End: 272-5071
cggcggcgcagatcgcccggcgcggctccgccccctgcgccggtcacgtgggggcgccggctgcgcctgcggagaagcggtggccgccgagcgggatctgtgcggggagccggaaatggttgtggactacgtctgtgcggctgcgtggggctcggccgcgcggactgaaggagactgaaggccctcggatgcccagaacctgtaggccgcaccgtggacttgttcttaatcgagggggtgctggggggaccctgatgtggcaccaaatgaaatgaacaaagctccacagtccacaggccccccacccgccccatcccccggactcccacagccagcgtttcccccggggcagacagcgccggtggtgttcagtacgccacaagcgacacaaatgaacacgccttctcagccccgccagcacttctaccctagccgggcccagcccccgagcagtgcagcctcccgagtgcagagtgcagcccctgcccgccctggcccagctgcccatgtctaccctgctggatcccaagtaatgatgatcccttcccagatctcctacccagcctcccagggggcctactacatccctggacaggggcgttccacatacgttgtcccgacacagcagtaccctgtgcagccaggagccccaggcttctatccaggtgcaagccctacagaatttgggacctacgctggcgcctactatccagcccaaggggtgcagcagtttcccactggcgtggcccccaccccagttttgatgaaccagccaccccagattgctcccaagagggagcgtaagacgatccgaattcgagatccaaaccaaggaggaaaggatatcacagaggagatcatgtctggggcccgcactgcctccacacccacccctccccagacgggaggcggtctggagcctcaagctaatggggagacgccccaggttgctgtcattgtccggccagatgaccggtcacagggagcaatcattgctgaccggccagggctgcctggcccagagcatagcccttcagaatcccagccttcgtcgccttctccgaccccatcaccatccccagtcttggaaccggggtctgagcctaatctcgcagtcctctctattcctggggacactatgacaactatacaaatgtctgtagaagaatcaacccccatctcccgtgaaactggggagccatatcgcctctctccagaacccactcctctcgccgaacccatactggaagtagaagtgacacttagcaaaccggttccagaatctgagttttcttccagtcctctccaggctcccacccctttggcatctcacacagtggaaattcatgagcctaatggcatggtcccatctgaagatctggaaccagaggtggagtcaagcccagagcttgctcctcccccagcttgcccctccgaatcccctgtgcccattgctccaactgcccaacctgaggaactgctcaacggagccccctcgccaccagctgtggacttaagcccagtcagtgagccagaggagcaggccaaggaggtgacagcatcaatggcgccccccaccatcccctctgctactccagctacggctccttcagctacttccccagctcaggaggaggaaatggaagaagaagaagaagaggaagaaggagaagcaggagaagcaggagaagctgagagtgagaaaggaggagaggaactgctccccccagagagtacccctattccagccaacttgtctcagaatttggaggcagcagcagccactcaagtggcagtatctgtgccaaagaggagacggaaaattaaggagctaaataagaaggaggctgttggagaccttctggatgccttcaaggaggcgaacccggcagtaccagaggtggaaaatcagcctcctgcaggcagcaatccaggcccagagtctgagggcagtggtgtgcccccacgtcctgaggaagcagatgagacctgggactcaaaggaagacaaaattcacaatgctgagaacatccagcccggggaacagaagtatgaatataagtcagatcagtggaagcctctaaacctagaggagaaaaaacgttacgaccgtgagttcctgcttggttttcagttcatctttgccagtatgcagaagccagagggattgccacatatcagtgacgtggtgctggacaaggccaataaaacaccactgcggccactggatcccactagactacaaggcataaattgtggcccagacttcactccatcctttgccaaccttggccggacaacccttagcacccgtgggcccccaaggggtgggccaggtggggagctgccccgtgggccggctggcctgggaccccggcgctctcagcagggaccccgaaaagaaccacgcaagatcattgccacagtgttaatgaccgaagatataaaactgaacaaagcagagaaagcctggaaacccagcagcaagcggacggcggctgataaggatcgaggggaagaagatgctgatggcagcaaaacccaggacctattccgcagggtgcgctccatcctgaataaactgacaccccagatgttccagcagctgatgaagcaagtgacgcagctggccatcgacaccgaggaacgcctcaaaggggtcattgacctcatttttgagaaggccatttcagagcccaacttctctgtggcctatgccaacatgtgccgctgcctcatggcgctgaaagtgcccactacggaaaagccaacagtgactgtgaacttccgaaagctgttgttgaatcgatgtcagaaggagtttgagaaagacaaagatgatgatgaggtttttgagaagaagcaaaaagagatggatgaagctgctacggcagaggaacgaggacgcctgaaggaagagctggaagaggctcgggacatagcccggcggcgctctttagggaatatcaagtttattggagagttgttcaaactgaagatgttaacagaggcaataatgcatgactgtgtggtcaaactgcttaagaaccatgatgaagagtcccttgagtgcctttgtcgtctgctcaccaccattggcaaagacctggactttgaaaaagccaagccccgaatggatcagtatttcaaccagatggaaaaaatcattaaagaaaagaagacgtcatcccgcatccgctttatgctgcaggacgtgctggatctgcgagggagcaattgggtgccacgccgaggggatcagggtcccaagaccattgaccagatccataaggaggctgagatggaagaacatcgagagcacatcaaagtgcagcagctcatggccaagggcagtgacaagcgtcggggcggtcctccaggccctcccatcagccgtggacttccccttgtggatgatggtggctggaacacagttcccatcagcaaaggtagccgccccattgacacctcacgactcaccaagatcaccaagcctggctccatcgattctaacaaccagctctttgcacctggagggcgactgagctggggcaagggcagcagcggaggctcaggagccaagccctcagacgcagcatcagaagctgctcgcccagctactagtactttgaatcgcttctcagcccttcaacaagcggtacccacagaaagcacagataatagacgtgtggtgcagaggagtagcttgagccgagaacgaggcgagaaagctggagaccgaggagaccgcctagagcggagtgaacggggaggggaccgtggggaccggcttgatcgtgcgcggacacctgctaccaagcggagcttcagcaaggaagtggaggagcggagtagagaacggccctcccagcctgaggggctgcgcaaggcagctagcctcacggaggatcgggaccgtgggcgggatgccgtgaagcgagaagctgccctacccccagtgagccccctgaaggcggctctctctgaggaggagttagagaagaaatccaaggctatcattgaggaatatctccatctcaatgacatgaaagaggcagtccagtgcgtgcaggagctggcctcaccctccttgctcttcatctttgtacggcatggtgtcgagtctacgctggagcgcagtgccattgctcgtgagcatatggggcagctgctgcaccagctgctctgtgctgggcatctgtctactgctcagtactaccaagggttgtatgaaatcttggaattggctgaggacatggaaattgacatcccccacgtgtggctctacctagcggaactggtaacacccattctgcaggaaggtggggtgcccatgggggagctgttcagggagattacaaagcctctgagaccgttgggcaaagctgcttccctgttgctggagatcctgggcctcctgtgcaaaagcatgggtcctaaaaaggtggggacgctgtggcgagaagccgggcttagctggaaggaatttctacctgaaggccaggacattggtgcattcgtcgctgaacagaaggtggagtataccctgggagaggagtcggaagcccctggccagagggcactcccctccgaggagctgaacaggcagctggagaagctgctgaaggagggcagcagtaaccagcgggtgttcgactggatagaggccaacctgagtgagcagcagatagtatccaacacgttagttcgagccctcatgacggctgtctgctattctgcaattatttttgagactcccctccgagtggacgttgcagtgctgaaagcgcgagcgaagctgctgcagaaatacctgtgtgacgagcagaaggagctacaggcgctctacgccctccaggcccttgtagtgaccttagaacagcctcccaacctgctgcggatgttctttgacgcactgtatgacgaggacgtggtgaaggaggatgccttctacagttgggagagtagcaaggaccccgctgagcagcagggcaagggtgtggcccttaaatctgtcacagccttcttcaagtggctccgtgaagcagaggaggagtctgaccacaactgagggctggtggggccggggacctggagccccatggacacacagatggcccggctagccgcctggactgcaggggggcggcagcagcggcggtggcagtgggtgcctgtagtgtgatgtgtctgaactaataaagtggctgaagaggcaggatggcttggggctgcctgggcccccctccaggatgccgccaggtgtccctctcctccccctggggcacagagatatattatatataaagtcttgaaatttggtgtgtcttggggtggggaggggcaccaacgcctgcccctggggtccttttttttattttctgaaaatcactctcgggactgccgtcctcgctgctgggggcatatgccccagcccctgtaccacccctgctgttgcctgggcagggggaagggggggcacggtgcctgtaattattaaacatgaattcaattaa

SEQ ID NO: 131228 - DNA, 4990 bp, Homo sapiens
  Payload ID: 5621
  Gene Symbol: EIF4G1
  Gene Name: eukaryotic translation initiation factor 4 gamma, 1
  Uniprot ID: Q04637
  ENST ID: ENST00000350481
  CDS Start-End: 238-4545
ggaaatggttgtggactacgtctgtgcggctgcgtggggctcggccgcgcggactgaaggagactgaaggggcgttccacatacgttgtcccgacacagcagtaccctgtgcagccaggagccccaggcttctatccaggtgcaagccctacagaatttgggacctacgctggcgcctactatccagcccaaggggtgcagcagtttcccactggcgtggcccccaccccagttttgatgaaccagccaccccagattgctcccaagagggagcgtaagacgatccgaattcgagatccaaaccaaggaggaaaggatatcacagaggagatcatgtctggggcccgcactgcctccacacccacccctccccagacgggaggcggtctggagcctcaagctaatggggagacgccccaggttgctgtcattgtccggccagatgaccggtcacagggagcaatcattgctgaccggccagggctgcctggcccagagcatagcccttcagaatcccagccttcgtcgccttctccgaccccatcaccatccccagtcttggaaccggggtctgagcctaatctcgcagtcctctctattcctggggacactatgacaactatacaaatgtctgtagaagaatcaacccccatctcccgtgaaactggggagccatatcgcctctctccagaacccactcctctcgccgaacccatactggaagtagaagtgacacttagcaaaccggttccagaatctgagttttcttccagtcctctccaggctcccacccctttggcatctcacacagtggaaattcatgagcctaatggcatggtcccatctgaagatctggaaccagaggtggagtcaagcccagagcttgctcctcccccagcttgcccctccgaatcccctgtgcccattgctccaactgcccaacctgaggaactgctcaacggagccccctcgccaccagctgtggacttaagcccagtcagtgagccagaggagcaggccaaggaggtgacagcatcaatggcgccccccaccatcccctctgctactccagctacggctccttcagctacttccccagctcaggaggaggaaatggaagaagaagaagaagaggaagaaggagaagcaggagaagcaggagaagctgagagtgagaaaggaggagaggaactgctccccccagagagtacccctattccagccaacttgtctcagaatttggaggcagcagcagccactcaagtggcagtatctgtgccaaagaggagacggaaaattaaggagctaaataagaaggaggctgttggagaccttctggatgccttcaaggaggcgaacccggcagtaccagaggtggaaaatcagcctcctgcaggcagcaatccaggcccagagtctgagggcagtggtgtgcccccacgtcctgaggaagcagatgagacctgggactcaaaggaagacaaaattcacaatgctgagaacatccagcccggggaacagaagtatgaatataagtcagatcagtggaagcctctaaacctagaggagaaaaaacgttacgaccgtgagttcctgcttggttttcagttcatctttgccagtatgcagaagccagagggattgccacatatcagtgacgtggtgctggacaaggccaataaaacaccactgcggccactggatcccactagactacaaggcataaattgtggcccagacttcactccatcctttgccaaccttggccggacaacccttagcacccgtgggcccccaaggggtgggccaggtggggagctgccccgtgggccggctggcctgggaccccggcgctctcagcagggaccccgaaaagaaccacgcaagatcattgccacagtgttaatgaccgaagatataaaactgaacaaagcagagaaagcctggaaacccagcagcaagcggacggcggctgataaggatcgaggggaagaagatgctgatggcagcaaaacccaggacctattccgcagggtgcgctccatcctgaataaactgacaccccagatgttccagcagctgatgaagcaagtgacgcagctggccatcgacaccgaggaacgcctcaaaggggtcattgacctcatttttgagaaggccatttcagagcccaacttctctgtggcctatgccaacatgtgccgctgcctcatggcgctgaaagtgcccactacggaaaagccaacagtgactgtgaacttccgaaagctgttgttgaatcgatgtcagaaggagtttgagaaagacaaagatgatgatgaggtttttgagaagaagcaaaaagagatggatgaagctgctacggcagaggaacgaggacgcctgaaggaagagctggaagaggctcgggacatagcccggcggcgctctttagggaatatcaagtttattggagagttgttcaaactgaagatgttaacagaggcaataatgcatgactgtgtggtcaaactgcttaagaaccatgatgaagagtcccttgagtgcctttgtcgtctgctcaccaccattggcaaagacctggactttgaaaaagccaagccccgaatggatcagtatttcaaccagatggaaaaaatcattaaagaaaagaagacgtcatcccgcatccgctttatgctgcaggacgtgctggatctgcgagggagcaattgggtgccacgccgaggggatcagggtcccaagaccattgaccagatccataaggaggctgagatggaagaacatcgagagcacatcaaagtgcagcagctcatggccaagggcagtgacaagcgtcggggcggtcctccaggccctcccatcagccgtggacttccccttgtggatgatggtggctggaacacagttcccatcagcaaaggtagccgccccattgacacctcacgactcaccaagatcaccaagcctggctccatcgattctaacaaccagctctttgcacctggagggcgactgagctggggcaagggcagcagcggaggctcaggagccaagccctcagacgcagcatcagaagctgctcgcccagctactagtactttgaatcgcttctcagcccttcaacaagcggtacccacagaaagcacagataatagacgtgtggtgcagaggagtagcttgagccgagaacgaggcgagaaagctggagaccgaggagaccgcctagagcggagtgaacggggaggggaccgtggggaccggcttgatcgtgcgcggacacctgctaccaagcggagcttcagcaaggaagtggaggagcggagtagagaacggccctcccagcctgaggggctgcgcaaggcagctagcctcacggaggatcgggaccgtgggcgggatgccgtgaagcgagaagctgccctacccccagtgagccccctgaaggcggctctctctgaggaggagttagagaagaaatccaaggctatcattgaggaatatctccatctcaatgacatgaaagaggcagtccagtgcgtgcaggagctggcctcaccctccttgctcttcatctttgtacggcatggtgtcgagtctacgctggagcgcagtgccattgctcgtgagcatatggggcagctgctgcaccagctgctctgtgctgggcatctgtctactgctcagtactaccaagggttgtatgaaatcttggaattggctgaggacatggaaattgacatcccccacgtgtggctctacctagcggaactggtaacacccattctgcaggaaggtggggtgcccatgggggagctgttcagggagattacaaagcctctgagaccgttgggcaaagctgcttccctgttgctggagatcctgggcctcctgtgcaaaagcatgggtcctaaaaaggtggggacgctgtggcgagaagccgggcttagctggaaggaatttctacctgaaggccaggacattggtgcattcgtcgctgaacagaaggtggagtataccctgggagaggagtcggaagcccctggccagagggcactcccctccgaggagctgaacaggcagctggagaagctgctgaaggagggcagcagtaaccagcgggtgttcgactggatagaggccaacctgagtgagcagcagatagtatccaacacgttagttcgagccctcatgacggctgtctgctattctgcaattatttttgagactcccctccgagtggacgttgcagtgctgaaagcgcgagcgaagctgctgcagaaatacctgtgtgacgagcagaaggagctacaggcgctctacgccctccaggcccttgtagtgaccttagaacagcctcccaacctgctgcggatgttctttgacgcactgtatgacgaggacgtggtgaaggaggatgccttctacagttgggagagtagcaaggaccccgctgagcagcagggcaagggtgtggcccttaaatctgtcacagccttcttcaagtggctccgtgaagcagaggaggagtctgaccacaactgagggctggtggggccggggacctggagccccatggacacacagatggcccggctagccgcctggactgcaggggggcggcagcagcggcggtggcagtgggtgcctgtagtgtgatgtgtctgaactaataaagtggctgaagaggcaggatggcttggggctgcctgggcccccctccaggatgccgccaggtgtccctctcctccccctggggcacagagatatattatatataaagtcttgaaatttggtgtgtcttggggtggggaggggcaccaacgcctgcccctggggtccttttttttattttctgaaaatcactctcgggactgccgtcctcgctgctgggggcatatgccccagcccctgtaccacccctgctgttgcctgggcagggggaagggggggcacggtgcctgtaattattaaacatgaattcaattaa

SEQ ID NO: 131229 - DNA, 5009 bp, Homo sapiens
  Payload ID: 5621
  Gene Symbol: EIF4G1
  Gene Name: eukaryotic translation initiation factor 4 gamma, 1
  ENST ID: ENST00000319274
  CDS Start-End: 369-4556
tctagatgggggtcctgggccccagggtgtgcagccactgacttggggactgctggtggggtagggatgagggagggaggggcattgtgatgtacagggctgctctgtgagatcaagggtctcttaagggtgggagctggggcagggactacgagagcagccagatgggctgaaagtggaactcaaggggtttctggcacctacctacctgcttcccgctggggggtggggagttggcccagagtcttaagattggggcagggtggagaggtgggctcttcctgcttcccactcatcttatagctttctttccccagatccgaattcgagatccaaaccaaggaggaaaggatatcacagaggagatcatgtctggggcccgcactgcctccacacccacccctccccagacgggaggcggtctggagcctcaagctaatggggagacgccccaggttgctgtcattgtccggccagatgaccggtcacagggagcaatcattgctgaccggccagggctgcctggcccagagcatagcccttcagaatcccagccttcgtcgccttctccgaccccatcaccatccccagtcttggaaccggggtctgagcctaatctcgcagtcctctctattcctggggacactatgacaactatacaaatgtctgtagaagaatcaacccccatctcccgtgaaactggggagccatatcgcctctctccagaacccactcctctcgccgaacccatactggaagtagaagtgacacttagcaaaccggttccagaatctgagttttcttccagtcctctccaggctcccacccctttggcatctcacacagtggaaattcatgagcctaatggcatggtcccatctgaagatctggaaccagaggtggagtcaagcccagagcttgctcctcccccagcttgcccctccgaatcccctgtgcccattgctccaactgcccaacctgaggaactgctcaacggagccccctcgccaccagctgtggacttaagcccagtcagtgagccagaggagcaggccaaggaggtgacagcatcaatggcgccccccaccatcccctctgctactccagctacggctccttcagctacttccccagctcaggaggaggaaatggaagaagaagaagaagaggaagaaggagaagcaggagaagcaggagaagctgagagtgagaaaggaggagaggaactgctccccccagagagtacccctattccagccaacttgtctcagaatttggaggcagcagcagccactcaagtggcagtatctgtgccaaagaggagacggaaaattaaggagctaaataagaaggaggctgttggagaccttctggatgccttcaaggaggcgaacccggcagtaccagaggtggaaaatcagcctcctgcaggcagcaatccaggcccagagtctgagggcagtggtgtgcccccacgtcctgaggaagcagatgagacctgggactcaaaggaagacaaaattcacaatgctgagaacatccagcccggggaacagaagtatgaatataagtcagatcagtggaagcctctaaacctagaggagaaaaaacgttacgaccgtgagttcctgcttggttttcagttcatctttgccagtatgcagaagccagagggattgccacatatcagtgacgtggtgctggacaaggccaataaaacaccactgcggccactggatcccactagactacaaggcataaattgtggcccagacttcactccatcctttgccaaccttggccggacaacccttagcacccgtgggcccccaaggggtgggccaggtggggagctgccccgtgggccgcaggctggcctgggaccccggcgctctcagcagggaccccgaaaagaaccacgcaagatcattgccacagtgttaatgaccgaagatataaaactgaacaaagcagagaaagcctggaaacccagcagcaagcggacggcggctgataaggatcgaggggaagaagatgctgatggcagcaaaacccaggacctattccgcagggtgcgctccatcctgaataaactgacaccccagatgttccagcagctgatgaagcaagtgacgcagctggccatcgacaccgagaacgcctcaaaggggtcattgacctcatttttgagaaggccatttcagagcccaacttctctgtggcctatgcaacatgtgccgctgcctcatggcgctgaaagtgcccactacggaaagccaacagtgactgtgaacttccgaaagctgttgttgaatcgatgtcagaaggagtttgagaaagacaaagatgatgatgaggtttttgagaagaagcaaaaagagatggatgaagctgctacggcagaggaacgaggacgcctgaaggaagagctggaagaggctcgggacatagcccggcggcgctctttagggaatatcaagtttattggagagttgttcaaactgaagatgttaacagaggcaataatgcatgactgtgtggtcaaactgcttaagaaccatgatgaagagtcccttgagtgcctttgtcgtctgctcaccaccattggcaaagacctggactttgaaaaagccaagccccgaatggatcagtatttcaaccagatggaaaaaatcattaaagaaaagaagacgtcatcccgcatccgctttatgctgcaggacgtgctggatctgcgagggagcaattgggtgccacgccgaggggatcagggtccaagaccattgaccagatccataaggaggctgagatggaagacatcgagagcacatcaaagtgcagcagctcatccaagggcagtgacaagcgtcggggcggtcctccaggccctcccatcagccgtggacttccccttgtggatgatggtggctaacacagttcccatcagcaaaggtagccgccccattgacacctcacgactcaccaagatcaccaagcctggctccatcgattctaacaaccagctctttgcacctggagggcgactgagctggggcaagggcagcagcggaggctcaggagccaagccctcagacgcagcatcagaagctgctcgcccagctactagtactttgaatcgcttctcagcccttcaacaagcggtacccacagaaagcacagataatagacgtgtggtgcagaggagtagcttgagccgagaacgaggcgagaaagctggagaccgaggagaccgcctagagcgggtgaacggggaggggaccgtggggaccggcttgatcgtgcgcacacctgctaccaagcggagcttcagcaaggaagtggaggagcggagtagagaacggccctcccagcctgaggggctgcgcaaggcagctagcctcacggaggatcgggaccgtgggcgggatgccgtgaagcgagaagctgccctacccccagtgagccccctgaaggcggctctctctgaggaggagttagagaagaaatccaaggctatcattgaggaatatctccatctcaatgacatgaaagaggcagtccagtgcgtgcaggagctggcctcaccctccttgctcttcatctttgtacggcatggtgtcgagtctacgctggagcgcagtgccattgctcgtgagcatatggggcagctgctgcaccagctgctctgtgctgggcatctgtctactgctcagtactaccaagggttgtatgaaatcttggaattggctgaggacatggaaattgacatcccccacgtgtggctctacctagcggaactggtaacacccattctgcaggaaggtggggtgcccatgggggagctgttcagggagattacaaagcctctgagaccgttgggcaaagctgcttccctgttgctggagatcctgggcctcctgtgcaaaagcatgggtcctaaaaaggtggggacgctgtggcgagaagccgggcttagctggaaggaatttctacctgaaggccaggacattggtgcattcgtcgctgaacagaaggtggagtataccctgggagaggagtcggaagcccctggccagagggcactcccctccgaggagctgaacaggcagctggagaagctgctgaaggagggcagcagtaaccagcgggtgttcgactggatagaggccaacctgagtgagcagcagatagtatccaacacgttagttcgagccctcatgacggctgtctgctattctgcaattatttttgagactcccctccgagtggacgttgcagtgctgaaagcgcgagcgaagctgctgcagaaatacctgtgtgacgaggaaggagctacaggcgctctacgcctccaggcccttgtagtgaccttagaacagcctcccaacctgctgcggatgttctttgacgcactgtatgacgaggacgtggtgaaggaggatgccttctacagttgggagagtagcaaggaccccgctgagcagcagggcaagggtgtggcccttaaatctgtcacagccttcttcaagtggctccgtgaagcaggaggagtctgaccacaactgagggctggtggggccggggacctggagccccatggacacacagatggcccggctagccgcctggactgcaggggggcggcagcagcggcggtggcagtgggtgcctgtagtgtgatgtgtctgaactaataaagtggctgaagaggcaggatggcttggggctgcctgggcccccctccaggatgccgccaggtgtccctctcctccccctggggcacagagatatattatatataaagtcttgaaatttggtgtgtcttggggtggggaggggcaccaacgcctgcccctggggtccttttttttattttctgaaaatcactctcgggactgccgtcctcgctgctgggggcatatgccccagcccctgtaccacccctgctgttgcctgggcagggggaagggggggcacggtgcctgtaattattaaacatgaattcaatt

SEQ ID NO: 131230 - DNA, 5484 bp, Homo sapiens
  Payload ID: 5621
  Gene Symbol: EIF4G1
  Gene Name: eukaryotic translation initiation factor 4 gamma, 1
  Uniprot ID: Q04637
  ENST ID: ENST00000352767
  CDS Start-End: 215-5035
cggcggcgcagatcgcccggcgcggctccgccccctgcgccggtcacgtgggggcgccggctgcgcctgcggagaagcggtggccgccgagcgggatctgtgcggggagccggaaatggttgtggactacgtctgtgcggctgcgtggggctcggccgcgcggactgaaggagactgaaggtgctggggggaccctgatgtggcaccaaatgaaatgaacaaagctccacagtccacaggccccccacccgccccatcccccggactcccacagccagcgtttcccccggggcagacagcgccggtggtgttcagtacgccacaagcgacacaaatgaacacgccttctcagccccgccagggaggattcaggtctctgcagcacttctaccctagccgggcccagcccccgagcagtgcagcctcccgagtgcagagtgcagcccctgcccgccctggcccagctgcccatgtctaccctgctggatcccaagtaatgatgatcccttcccagatctcctacccagcctcccagggggcctactacatccctggacaggggcgttccacatacgttgtcccgacacagcagtaccctgtgcagccaggagccccaggcttctatccaggtgcaagccctacagaatttgggacctacgctggcgcctactatccagcccaaggggtgcagcagtttcccactggcgtggcccccaccccagttttgatgaaccagccaccccagattgctcccaagagggagcgtaagacgatccgaattcgagatccaaaccaaggaggaaaggatatcacagaggagatcatgtctggggcccgcactgcctccacacccacccctccccagacgggaggcggtctggagcctcaagctaatggggagacgccccaggttgctgtcattgtccggccagatgaccggtcacagggagcaatcattgctgaccggccagggctgcctggcccagagcatagcccttcagaatcccagccttcgtcgccttctccgaccccatcaccatccccagtcttggaaccggggtctgagcctaatctcgcagtcctctctattcctggggacactatgacaactatacaaatgtctgtagaagaatcaacccccatctcccgtgaaactggggagccatatcgcctctctccagaacccactcctctcgccgaacccatactggaagtagaagtgacacttagcaaaccggttccagaatctgagttttcttccagtcctctccaggctcccacccctttggcatctcacacagtggaaattcatgagcctaatggcatggtcccatctgaagatctggaaccagaggtggagtcaagcccagagcttgctcctcccccagcttgcccctccgaatcccctgtgcccattgctccaactgcccaacctgaggaactgctcaacggagccccctcgccaccagctgtggacttaagcccagtcagtgagccagaggagcaggccaaggaggtgacagcatcaatggcgccccccaccatcccctctgctactccagctacggctccttcagctacttccccagctcaggaggaggaaatggaagaagaagaagaagaggaagaaggagaagcaggagaagcaggagaagctgagagtgagaaaggaggagaggaactgctccccccagagagtacccctattccagccaacttgtctcagaatttggaggcagcagcagccactcaagtggcagtatctgtgccaaagaggagacggaaaattaaggagctaaataagaaggaggctgttggagaccttctggatgccttcaaggaggcgaacccggcagtaccagaggtggaaaatcagcctcctgcaggcagcaatccaggcccagagtctgagggcagtggtgtgcccccacgtcctgaggaagcagatgagacctgggactcaaaggaagacaaaattcacaatgctgagaacatccagcccggggaacagaagtatgaatataagtcagatcagtggaagcctctaaacctagaggagaaaaaacgttacgaccgtgagttcctgcttggttttcagttcatctttgccagtatgcagaagccagagggattgccacatatcagtgacgtggtgctggacaaggccaataaaacaccactgcggccactggatcccactagactacaaggcataaattgtggcccagacttcactccatcctttgccaaccttggccggacaacccttagcacccgtgggcccccaaggggtgggccaggtggggagctgccccgtgggccggctggcctgggaccccggcgctctcagcagggaccccgaaaagaaccacgcaagatcattgccacagtgttaatgaccgaagatataaaactgaacaaagcagagaaagcctggaaacccagcagcaagcggacggcggctgataaggatcgaggggaagaagatgctgatggcagcaaaacccaggacctattccgcagggtgcgctccatcctgaataaactgacaccccagatgttccagcagctgatgaagcaagtgacgcagctggccatcgacaccgaggaacgcctcaaaggggtcattgacctcatttttgagaaggccatttcagagcccaacttctctgtggcctatgccaacatgtgccgctgcctcatggcgctgaaagtgcccactacggaaaagccaacagtgactgtgaacttccgaaagctgttgttgaatcgatgtcagaaggagtttgagaaagacaaagatgatgatgaggtttttgagaagaagcaaaaagagatggatgaagctgctacggcagaggaacgaggacgcctgaaggaagagctggaagaggctcgggacatagcccggcggcgctctttagggaatatcaagtttattggagagttgttcaaactgaagatgttaacagaggcaataatgcatgactgtgtggtcaaactgcttaagaaccatgatgaagagtcccttgagtgcctttgtcgtctgctcaccaccattggcaaagacctggactttgaaaaagccaagccccgaatggatcagtatttcaaccagatggaaaaaatcattaaagaaaagaagacgtcatcccgcatccgctttatgctgcaggacgtgctggatctgcgagggagcaattgggtgccacgccgaggggatcagggtcccaagaccattgaccagatccataaggaggctgagatggaagaacatcgagagcacatcaaagtgcagcagctcatggccaagggcagtgacaagcgtcggggcggtcctccaggccctcccatcagccgtggacttccccttgtggatgatggtggctggaacacagttcccatcagcaaaggtagccgccccattgacacctcacgactcaccaagatcaccaagcctggctccatcgattctaacaaccagctctttgcacctggagggcgactgagctggggcaagggcagcagcggaggctcaggagccaagccctcagacgcagcatcagaagctgctcgcccagctactagtactttgaatcgcttctcagcccttcaacaagcggtacccacagaaagcacagataatagacgtgtggtgcagaggagtagcttgagccgagaacgaggcgagaaagctggagaccgaggagaccgcctagagcggagtgaacggggaggggaccgtggggaccggcttgatcgtgcgcggacacctgctaccaagcggagcttcagcaaggaagtggaggagcggagtagagaacggccctcccagcctgaggggctgcgcaaggcagctagcctcacggaggatcgggaccgtgggcgggatgccgtgaagcgagaagctgccctacccccagtgagccccctgaaggcggctctctctgaggaggagttagagaagaaatccaaggctatcattgaggaatatctccatctcaatgacatgaaagaggcagtccagtgcgtgcaggagctggcctcaccctccttgctcttcatctttgtacggcatggtgtcgagtctacgctggagcgcagtgccattgctcgtgagcatatggggcagctgctgcaccagctgctctgtgctgggcatctgtctactgctcagtactaccaagggttgtatgaaatcttggaattggctgaggacatggaaattgacatcccccacgtgtggctctacctagcggaactggtaacacccattctgcaggaaggtggggtgcccatgggggagctgttcagggagattacaaagcctctgagaccgttgggcaaagctgcttccctgttgctggagatcctgggcctcctgtgcaaaagcatgggtcctaaaaaggtggggacgctgtggcgagaagccgggcttagctggaaggaatttctacctgaaggccaggacattggtgcattcgtcgctgaacagaaggtggagtataccctgggagaggagtcggaagcccctggccagagggcactcccctccgaggagctgaacaggcagctggagaagctgctgaaggagggcagcagtaaccagcgggtgttcgactggatagaggccaacctgagtgagcagcagatagtatccaacacgttagttcgagccctcatgacggctgtctgctattctgcaattatttttgagactcccctccgagtggacgttgcagtgctgaaagcgcgagcgaagctgctgcagaaatacctgtgtgacgagcagaaggagctacaggcgctctacgccctccaggcccttgtagtgaccttagaacagcctcccaacctgctgcggatgttctttgacgcactgtatgacgaggacgtggtgaaggaggatgccttctacagttgggagagtagcaaggaccccgctgagcagcagggcaagggtgtggcccttaaatctgtcacagccttcttcaagtggctccgtgaagcagaggaggagtctgaccacaactgagggctggtggggccggggacctggagccccatggacacacagatggcccggctagccgcctggactgcaggggggcggcagcagcggcggtggcagtgggtgcctgtagtgtgatgtgtctgaactaataaagtggctgaagaggcaggatggcttggggctgcctgggcccccctccaggatgccgccaggtgtccctctcctccccctggggcacagagatatattatatataaagtcttgaaatttggtgtgtcttggggtggggaggggcaccaacgcctgcccctggggtccttttttttattttctgaaaatcactctcgggactgccgtcctcgctgctgggggcatatgccccagcccctgtaccacccctgctgttgcctgggcagggggaagggggggcacggtgcctgtaattattaaacatgaattcaattaagctc

SEQ ID NO: 131231 - DNA, 5667 bp, Homo sapiens
  Payload ID: 5621
  Gene Symbol: EIF4G1
  Gene Name: eukaryotic translation initiation factor 4 gamma, 1
  Uniprot ID: Q04637
  ENST ID: ENST00000342981
  CDS Start-End: 415-5217
acttgcctgaaaccggctcctcgacggccgccgcccgcctggccttttagggcctgactcccgcccttcctggcctacactcctgggcggcggcaggcctagcttctggcccagtgcgggttccccggcggcaggcgtatcctgtgtgcccctgggccaggcccgaacccggtgtccccgggtggggggtggggacgccacggccgaagcagctagctccgttcgtgatccgggagcctggtgccagcgagacctggaatttccggtctggttggtctggggccccgcggagccaggttgataccctcacctcccaaccccaggccctcggatgcccagaacctgtaggccgcaccgtggacttgttcttaatcgagggggtgctggggggaccctgatgtggcaccaaatgaaatgaacaaagctccacagtccacaggccccccacccgccccatcccccggactcccacagccagcgtttcccccggggcagacagcgccggtggtgttcagtacgccacaagcgacacaaatgaacacgccttctcagccccgccagcacttctaccctagccgggcccagcccccgagcagtgcagcctcccgagtgcagagtgcagcccctgcccgccctggcccagctgcccatgtctaccctgctggatcccaagtaatgatgatcccttcccagatctcctacccagcctcccagggggcctactacatccctggacaggggcgttccacatacgttgtcccgacacagcagtaccctgtgcagccaggagccccaggcttctatccaggtgcaagccctacagaatttgggacctacgctggcgcctactatccagcccaaggggtgcagcagtttcccactggcgtggcccccaccccagttttgatgaaccagccaccccagattgctcccaagagggagcgtaagacgatccgaattcgagatccaaaccaaggaggaaaggatatcacagaggagatcatgtctggggcccgcactgcctccacacccacccctccccagacgggaggcggtctggagcctcaagctaatggggagacgccccaggttgctgtcattgtccggccagatgaccggtcacagggagcaatcattgctgaccggccagggctgcctggcccagagcatagcccttcagaatcccagccttcgtcgccttctccgaccccatcaccatccccagtcttggaaccggggtctgagcctaatctcgcagtcctctctattcctggggacactatgacaactatacaaatgtctgtagaagaatcaacccccatctcccgtgaaactggggagccatatcgcctctctccagaacccactcctctcgccgaacccatactggaagtagaagtgacacttagcaaaccggttccagaatctgagttttcttccagtcctctccaggctcccacccctttggcatctcacacagtggaaattcatgagcctaatggcatggtcccatctgaagatctggaaccagaggtggagtcaagcccagagcttgctcctcccccagcttgcccctccgaatcccctgtgcccattgctccaactgcccaacctgaggaactgctcaacggagccccctcgccaccagctgtggacttaagcccagtcagtgagccagaggagcaggccaaggaggtgacagcatcaatggcgccccccaccatcccctctgctactccagctacggctccttcagctacttccccagctcaggaggaggaaatggaagaagaagaagaagaggaagaaggagaagcaggagaagcaggagaagctgagagtgagaaaggaggagaggaactgctccccccagagagtacccctattccagccaacttgtctcagaatttggaggcagcagcagccactcaagtggcagtatctgtgccaaagaggagacggaaaattaaggagctaaataagaaggaggctgttggagaccttctggatgccttcaaggaggcgaacccggcagtaccagaggtggaaaatcagcctcctgcaggcagcaatccaggcccagagtctgagggcagtggtgtgcccccacgtcctgaggaagcagatgagacctgggactcaaaggaagacaaaattcacaatgctgagaacatccagcccggggaacagaagtatgaatataagtcagatcagtggaagcctctaaacctagaggagaaaaaacgttacgaccgtgagttcctgcttggttttcagttcatctttgccagtatgcagaagccagagggattgccacatatcagtgacgtggtgctggacaaggccaataaaacaccactgcggccactggatcccactagactacaaggcataaattgtggcccagacttcactccatcctttgccaaccttggccggacaacccttagcacccgtgggcccccaaggggtgggccaggtggggagctgccccgtgggccgcaggctggcctgggaccccggcgctctcagcagggaccccgaaaagaaccacgcaagatcattgccacagtgttaatgaccgaagatataaaactgaacaaagcagagaaagcctggaaacccagcagcaagcggacggcggctgataaggatcgaggggaagaagatgctgatggcagcaaaacccaggacctattccgcagggtgcgctccatcctgaataaactgacaccccagatgttccagcagctgatgaagcaagtgacgcagctggccatcgacaccgaggaacgcctcaaaggggtcattgacctcatttttgagaaggccatttcagagcccaacttctctgtggcctatgccaacatgtgccgctgcctcatggcgctgaaagtgcccactacggaaaagccaacagtgactgtgaacttccgaaagctgttgttgaatcgatgtcagaaggagtttgagaaagacaaagatgatgatgaggtttttgagaagaagcaaaaagagatggatgaagctgctacggcagaggaacgaggacgcctgaaggaagagctggaagaggctcgggacatagcccggcggcgctctttagggaatatcaagtttattggagagttgttcaaactgaagatgttaacagaggcaataatgcatgactgtgtggtcaaactgcttaagaaccatgatgaagagtcccttgagtgcctttgtcgtctgctcaccaccattggcaaagacctggactttgaaaaagccaagccccgaatggatcagtatttcaaccagatggaaaaaatcattaaagaaaagaagacgtcatcccgcatccgctttatgctgcaggacgtgctggatctgcgagggagcaattgggtgccacgccgaggggatcagggtcccaagaccattgaccagatccataaggaggctgagatggaagaacatcgagagcacatcaaagtgcagcagctcatggccaagggcagtgacaagcgtcggggcggtcctccaggccctcccatcagccgtggacttccccttgtggatgatggtggctggaacacagttcccatcagcaaaggtagccgccccattgacacctcacgactcaccaagatcaccaagcctggctccatcgattctaacaaccagctctttgcacctggagggcgactgagctggggcaagggcagcagcggaggctcaggagccaagccctcagacgcagcatcagaagctgctcgcccagctactagtactttgaatcgcttctcagcccttcaacaagcggtacccacagaaagcacagataatagacgtgtggtgcagaggagtagcttgagccgagaacgaggcgagaaagctggagaccgaggagaccgcctagagcggagtgaacggggaggggaccgtggggaccggcttgatcgtgcgcggacacctgctaccaagcggagcttcagcaaggaagtggaggagcggagtagagaacggccctcccagcctgaggggctgcgcaaggcagctagcctcacggaggatcgggaccgtgggcgggatgccgtgaagcgagaagctgccctacccccagtgagccccctgaaggcggctctctctgaggaggagttagagaagaaatccaaggctatcattgaggaatatctccatctcaatgacatgaaagaggcagtccagtgcgtgcaggagctggcctcaccctccttgctcttcatctttgtacggcatggtgtcgagtctacgctggagcgcagtgccattgctcgtgagcatatggggcagctgctgcaccagctgctctgtgctgggcatctgtctactgctcagtactaccaagggttgtatgaaatcttggaattggctgaggacatggaaattgacatcccccacgtgtggctctacctagcggaactggtaacacccattctgcaggaaggtggggtgcccatgggggagctgttcagggagattacaaagcctctgagaccgttgggcaaagctgcttccctgttgctggagatcctgggcctcctgtgcaaaagcatgggtcctaaaaaggtggggacgctgtggcgagaagccgggcttagctggaaggaatttctacctgaaggccaggacattggtgcattcgtcgctgaacagaaggtggagtataccctgggagaggagtcggaagcccctggccagagggcactcccctccgaggagctgaacaggcagctggagaagctgctgaaggagggcagcagtaaccagcgggtgttcgactggatagaggccaacctgagtgagcagcagatagtatccaacacgttagttcgagccctcatgacggctgtctgctattctgcaattatttttgagactcccctccgagtggacgttgcagtgctgaaagcgcgagcgaagctgctgcagaaatacctgtgtgacgagcagaaggagctacaggcgctctacgccctccaggcccttgtagtgaccttagaacagcctcccaacctgctgcggatgttctttgacgcactgtatgacgaggacgtggtgaaggaggatgccttctacagttgggagagtagcaaggaccccgctgagcagcagggcaagggtgtggcccttaaatctgtcacagccttcttcaagtggctccgtgaagcagaggaggagtctgaccacaactgagggctggtggggccggggacctggagccccatggacacacagatggcccggctagccgcctggactgcaggggggcggcagcagcggcggtggcagtgggtgcctgtagtgtgatgtgtctgaactaataaagtggctgaagaggcaggatggcttggggctgcctgggcccccctccaggatgccgccaggtgtccctctcctccccctggggcacagagatatattatatataaagtcttgaaatttggtgtgtcttggggtggggaggggcaccaacgcctgcccctggggtccttttttttattttctgaaaatcactctcgggactgccgtcctcgctgctgggggcatatgccccagcccctgtaccacccctgctgttgcctgggcagggggaagggggggcacggtgcctgtaattattaaacatgaattcaattaagctca

SEQ ID NO: 131232 - DNA, 5129 bp, Homo sapiens
  Payload ID: 5621
  Gene Symbol: EIF4G1
  Gene Name: eukaryotic translation initiation factor 4 gamma, 1
  Uniprot ID: Q04637
  ENST ID: ENST00000382330
  CDS Start-End: 200-5020
agaagcggtggccgccgagcgggatctgtgcggggagccggaaatggttgtggactacgtctgtgcggctgcgtggggctcggccgcgcggactgaaggagactgaaggccctcggatgcccagaacctgtaggccgcaccgtggacttgttcttaatcgagggggtgctggggggaccctgatgtggcaccaaatgaaatgaacaaagctccacagtccacaggccccccacccgccccatcccccggactcccacagccagcgtttcccccggggcagacagcgccggtggtgttcagtacgccacaagcgacacaaatgaacacgccttctcagccccgccagggaggattcaggtctctgcagcacttctaccctagccgggcccagcccccgagcagtgcagcctcccgagtgcagagtgcagcccctgcccgccctggcccagctgcccatgtctaccctgctggatcccaagtaatgatgatcccttcccagatctcctacccagcctcccagggggcctactacatccctggacaggggcgttccacatacgttgtcccgacacagcagtaccctgtgcagccaggagccccaggcttctatccaggtgcaagccctacagaatttgggacctacgctggcgcctactatccagcccaaggggtgcagcagtttcccactggcgtggcccccaccccagttttgatgaaccagccaccccagattgctcccaagagggagcgtaagacgatccgaattcgagatccaaaccaaggaggaaaggatatcacagaggagatcatgtctggggcccgcactgcctccacacccacccctccccagacgggaggcggtctggagcctcaagctaatggggagacgccccaggttgctgtcattgtccggccagatgaccggtcacagggagcaatcattgctgaccggccagggctgcctggcccagagcatagcccttcagaatcccagccttcgtcgccttctccgaccccatcaccatccccagtcttggaaccggggtctgagcctaatctcgcagtcctctctattcctggggacactatgacaactatacaaatgtctgtagaagaatcaacccccatctcccgtgaaactggggagccatatcgcctctctccagaacccactcctctcgccgaacccatactggaagtagaagtgacacttagcaaaccggttccagaatctgagttttcttccagtcctctccaggctcccacccctttggcatctcacacagtggaaattcatgagcctaatggcatggtcccatctgaagatctggaaccagaggtggagtcaagcccagagcttgctcctcccccagcttgcccctccgaatcccctgtgcccattgctccaactgcccaacctgaggaactgctcaacggagccccctcgccaccagctgtggacttaagcccagtcagtgagccagaggagcaggccaaggaggtgacagcatcaatggcgccccccaccatcccctctgctactccagctacggctccttcagctacttccccagctcaggaggaggaaatggaagaagaagaagaagaggaagaaggagaagcaggagaagcaggagaagctgagagtgagaaaggaggagaggaactgctccccccagagagtacccctattccagccaacttgtctcagaatttggaggcagcagcagccactcaagtggcagtatctgtgccaaagaggagacggaaaattaaggagctaaataagaaggaggctgttggagaccttctggatgccttcaaggaggcgaacccggcagtaccagaggtggaaaatcagcctcctgcaggcagcaatccaggcccagagtctgagggcagtggtgtgcccccacgtcctgaggaagcagatgagacctgggactcaaaggaagacaaaattcacaatgctgagaacatccagcccggggaacagaagtatgaatataagtcagatcagtggaagcctctaaacctagaggagaaaaaacgttacgaccgtgagttcctgcttggttttcagttcatctttgccagtatgcagaagccagagggattgccacatatcagtgacgtggtgctggacaaggccaataaaacaccactgcggccactggatcccactagactacaaggcataaattgtggcccagacttcactccatcctttgccaaccttggccggacaacccttagcacccgtgggcccccaaggggtgggccaggtggggagctgccccgtgggccggctggcctgggaccccggcgctctcagcagggaccccgaaaagaaccacgcaagatcattgccacagtgttaatgaccgaagatataaaactgaacaaagcagagaaagcctggaaacccagcagcaagcggacggcggctgataaggatcgaggggaagaagatgctgatggcagcaaaacccaggacctattccgcagggtgcgctccatcctgaataaactgacaccccagatgttccagcagctgatgaagcaagtgacgcagctggccatcgacaccgaggaacgcctcaaaggggtcattgacctcatttttgagaaggccatttcagagcccaacttctctgtggcctatgccaacatgtgccgctgcctcatggcgctgaaagtgcccactacggaaaagccaacagtgactgtgaacttccgaaagctgttgttgaatcgatgtcagaaggagtttgagaaagacaaagatgatgatgaggtttttgagaagaagcaaaaagagatggatgaagctgctacggcagaggaacgaggacgcctgaaggaagagctggaagaggctcgggacatagcccggcggcgctctttagggaatatcaagtttattggagagttgttcaaactgaagatgttaacagaggcaataatgcatgactgtgtggtcaaactgcttaagaaccatgatgaagagtcccttgagtgcctttgtcgtctgctcaccaccattggcaaagacctggactttgaaaaagccaagccccgaatggatcagtatttcaaccagatggaaaaaatcattaaagaaaagaagacgtcatcccgcatccgctttatgctgcaggacgtgctggatctgcgagggagcaattgggtgccacgccgaggggatcagggtcccaagaccattgaccagatccataaggaggctgagatggaagaacatcgagagcacatcaaagtgcagcagctcatggccaagggcagtgacaagcgtcggggcggtcctccaggccctcccatcagccgtggacttccccttgtggatgatggtggctggaacacagttcccatcagcaaaggtagccgccccattgacacctcacgactcaccaagatcaccaagcctggctccatcgattctaacaaccagctctttgcacctggagggcgactgagctggggcaagggcagcagcggaggctcaggagccaagccctcagacgcagcatcagaagctgctcgcccagctactagtactttgaatcgcttctcagcccttcaacaagcggtacccacagaaagcacagataatagacgtgtggtgcagaggagtagcttgagccgagaacgaggcgagaaagctggagaccgaggagaccgcctagagcggagtgaacggggaggggaccgtggggaccggcttgatcgtgcgcggacacctgctaccaagcggagcttcagcaaggaagtggaggagcggagtagagaacggccctcccagcctgaggggctgcgcaaggcagctagcctcacggaggatcgggaccgtgggcgggatgccgtgaagcgagaagctgccctacccccagtgagccccctgaaggcggctctctctgaggaggagttagagaagaaatccaaggctatcattgaggaatatctccatctcaatgacatgaaagaggcagtccagtgcgtgcaggagctggcctcaccctccttgctcttcatctttgtacggcatggtgtcgagtctacgctggagcgcagtgccattgctcgtgagcatatggggcagctgctgcaccagctgctctgtgctgggcatctgtctactgctcagtactaccaagggttgtatgaaatcttggaattggctgaggacatggaaattgacatcccccacgtgtggctctacctagcggaactggtaacacccattctgcaggaaggtggggtgcccatgggggagctgttcagggagattacaaagcctctgagaccgttgggcaaagctgcttccctgttgctggagatcctgggcctcctgtgcaaaagcatgggtcctaaaaaggtggggacgctgtggcgagaagccgggcttagctggaaggaatttctacctgaaggccaggacattggtgcattcgtcgctgaacagaaggtggagtataccctgggagaggagtcggaagcccctggccagagggcactcccctccgaggagctgaacaggcagctggagaagctgctgaaggagggcagcagtaaccagcgggtgttcgactggatagaggccaacctgagtgagcagcagatagtatccaacacgttagttcgagccctcatgacggctgtctgctattctgcaattatttttgagactcccctccgagtggacgttgcagtgctgaaagcgcgagcgaagctgctgcagaaatacctgtgtgacgagcagaaggagctacaggcgctctacgccctccaggcccttgtagtgaccttagaacagcctcccaacctgctgcggatgttctttgacgcactgtatgacgaggacgtggtgaaggaggatgccttctacagttgggagagtagcaaggaccccgctgagcagcagggcaagggtgtggcccttaaatctgtcacagccttcttcaagtggctccgtgaagcagaggaggagtctgaccacaactgagggctggtggggccggggacctggagccccatggacacacagatggcccggctagccgcctggactgcaggggggcggcagcagcggcggtggcagtgggtgcctgtag

SEQ ID NO: 131233 - DNA, 5229 bp, Homo sapiens
  Payload ID: 5621
  Gene Symbol: EIF4G1
  Gene Name: eukaryotic translation initiation factor 4 gamma, 1
  Uniprot ID: Q04637
  ENST ID: ENST00000392537
  CDS Start-End: 248-4786
gtgggggcgccggctgcgcctgcggagaagcggtggccgccgagcgggatctgtgcggggagccggaaatggttgtggactacgtctgtgcggctgcgtggggctcggccgcgcggactgaaggagactgaagcacttctaccctagccgggcccagcccccgagcagtgcagcctcccgagtgcagagtgcagcccctgcccgccctggcccagctgcccatgtctaccctgctggatcccaagtaatgatgatcccttcccagatctcctacccagcctcccagggggcctactacatccctggacaggggcgttccacatacgttgtcccgacacagcagtaccctgtgcagccaggagccccaggcttctatccaggtgcaagccctacagaatttgggacctacgctggcgcctactatccagcccaaggggtgcagcagtttcccactggcgtggcccccaccccagttttgatgaaccagccaccccagattgctcccaagagggagcgtaagacgatccgaattcgagatccaaaccaaggaggaaaggatatcacagaggagatcatgtctggggcccgcactgcctccacacccacccctccccagacgggaggcggtctggagcctcaagctaatggggagacgccccaggttgctgtcattgtccggccagatgaccggtcacagggagcaatcattgctgaccggccagggctgcctggcccagagcatagcccttcagaatcccagccttcgtcgccttctccgaccccatcaccatccccagtcttggaaccggggtctgagcctaatctcgcagtcctctctattcctggggacactatgacaactatacaaatgtctgtagaagaatcaacccccatctcccgtgaaactggggagccatatcgcctctctccagaacccactcctctcgccgaacccatactggaagtagaagtgacacttagcaaaccggttccagaatctgagttttcttccagtcctctccaggctcccacccctttggcatctcacacagtggaaattcatgagcctaatggcatggtcccatctgaagatctggaaccagaggtggagtcaagcccagagcttgctcctcccccagcttgcccctccgaatcccctgtgcccattgctccaactgcccaacctgaggaactgctcaacggagccccctcgccaccagctgtggacttaagcccagtcagtgagccagaggagcaggccaaggaggtgacagcatcaatggcgccccccaccatcccctctgctactccagctacggctccttcagctacttccccagctcaggaggaggaaatggaagaagaagaagaagaggaagaaggagaagcaggagaagcaggagaagctgagagtgagaaaggaggagaggaactgctccccccagagagtacccctattccagccaacttgtctcagaatttggaggcagcagcagccactcaagtggcagtatctgtgccaaagaggagacggaaaattaaggagctaaataagaaggaggctgttggagaccttctggatgccttcaaggaggcgaacccggcagtaccagaggtggaaaatcagcctcctgcaggcagcaatccaggcccagagtctgagggcagtggtgtgcccccacgtcctgaggaagcagatgagacctgggactcaaaggaagacaaaattcacaatgctgagaacatccagcccggggaacagaagtatgaatataagtcagatcagtggaagcctctaaacctagaggagaaaaaacgttacgaccgtgagttcctgcttggttttcagttcatctttgccagtatgcagaagccagagggattgccacatatcagtgacgtggtgctggacaaggccaataaaacaccactgcggccactggatcccactagactacaaggcataaattgtggcccagacttcactccatcctttgccaaccttggccggacaacccttagcacccgtgggcccccaaggggtgggccaggtggggagctgccccgtgggccggctggcctgggaccccggcgctctcagcagggaccccgaaaagaaccacgcaagatcattgccacagtgttaatgaccgaagatataaaactgaacaaagcagagaaagcctggaaacccagcagcaagcggacggcggctgataaggatcgaggggaagaagatgctgatggcagcaaaacccaggacctattccgcagggtgcgctccatcctgaataaactgacaccccagatgttccagcagctgatgaagcaagtgacgcagctggccatcgacaccgaggaacgcctcaaaggggtcattgacctcatttttgagaaggccatttcagagcccaacttctctgtggcctatgccaacatgtgccgctgcctcatggcgctgaaagtgcccactacggaaaagccaacagtgactgtgaacttccgaaagctgttgttgaatcgatgtcagaaggagtttgagaaagacaaagatgatgatgaggtttttgagaagaagcaaaaagagatggatgaagctgctacggcagaggaacgaggacgcctgaaggaagagctggaagaggctcgggacatagcccggcggcgctctttagggaatatcaagtttattggagagttgttcaaactgaagatgttaacagaggcaataatgcatgactgtgtggtcaaactgcttaagaaccatgatgaagagtcccttgagtgcctttgtcgtctgctcaccaccattggcaaagacctggactttgaaaaagccaagccccgaatggatcagtatttcaaccagatggaaaaaatcattaaagaaaagaagacgtcatcccgcatccgctttatgctgcaggacgtgctggatctgcgagggagcaattgggtgccacgccgaggggatcagggtcccaagaccattgaccagatccataaggaggctgagatggaagaacatcgagagcacatcaaagtgcagcagctcatggccaagggcagtgacaagcgtcggggcggtcctccaggccctcccatcagccgtggacttccccttgtggatgatggtggctggaacacagttcccatcagcaaaggtagccgccccattgacacctcacgactcaccaagatcaccaagcctggctccatcgattctaacaaccagctctttgcacctggagggcgactgagctggggcaagggcagcagcggaggctcaggagccaagccctcagacgcagcatcagaagctgctcgcccagctactagtactttgaatcgcttctcagcccttcaacaagcggtacccacagaaagcacagataatagacgtgtggtgcagaggagtagcttgagccgagaacgaggcgagaaagctggagaccgaggagaccgcctagagcggagtgaacggggaggggaccgtggggaccggcttgatcgtgcgcggacacctgctaccaagcggagcttcagcaaggaagtggaggagcggagtagagaacggccctcccagcctgaggggctgcgcaaggcagctagcctcacggaggatcgggaccgtgggcgggatgccgtgaagcgagaagctgccctacccccagtgagccccctgaaggcggctctctctgaggaggagttagagaagaaatccaaggctatcattgaggaatatctccatctcaatgacatgaaagaggcagtccagtgcgtgcaggagctggcctcaccctccttgctcttcatctttgtacggcatggtgtcgagtctacgctggagcgcagtgccattgctcgtgagcatatggggcagctgctgcaccagctgctctgtgctgggcatctgtctactgctcagtactaccaagggttgtatgaaatcttggaattggctgaggacatggaaattgacatcccccacgtgtggctctacctagcggaactggtaacacccattctgcaggaaggtggggtgcccatgggggagctgttcagggagattacaaagcctctgagaccgttgggcaaagctgcttccctgttgctggagatcctgggcctcctgtgcaaaagcatgggtcctaaaaaggtggggacgctgtggcgagaagccgggcttagctggaaggaatttctacctgaaggccaggacattggtgcattcgtcgctgaacagaaggtggagtataccctgggagaggagtcggaagcccctggccagagggcactcccctccgaggagctgaacaggcagctggagaagctgctgaaggagggcagcagtaaccagcgggtgttcgactggatagaggccaacctgagtgagcagcagatagtatccaacacgttagttcgagccctcatgacggctgtctgctattctgcaattatttttgagactcccctccgagtggacgttgcagtgctgaaagcgcgagcgaagctgctgcagaaatacctgtgtgacgagcagaaggagctacaggcgctctacgccctccaggcccttgtagtgaccttagaacagcctcccaacctgctgcggatgttctttgacgcactgtatgacgaggacgtggtgaaggaggatgccttctacagttgggagagtagcaaggaccccgctgagcagcagggcaagggtgtggcccttaaatctgtcacagccttcttcaagtggctccgtgaagcagaggaggagtctgaccacaactgagggctggtggggccggggacctggagccccatggacacacagatggcccggctagccgcctggactgcaggggggcggcagcagcggcggtggcagtgggtgcctgtagtgtgatgtgtctgaactaataaagtggctgaagaggcaggatggcttggggctgcctgggcccccctccaggatgccgccaggtgtccctctcctccccctggggcacagagatatattatatataaagtcttgaaatttggtgtgtcttggggtggggaggggcaccaacgcctgcccctggggtccttttttttattttctgaaaatcactctcgggactgccgtcctcgctgctgggggcatatgccccagcccctgtaccacccctgctgttgcctgggcagggggaagggggggcacggtgcctgtaattattaaacatgaattcaatt

SEQ ID NO: 131234 - DNA, 2808 bp, Homo sapiens
  Payload ID: 5621
  Gene Symbol: EIF4G1
  Gene Name: eukaryotic translation initiation factor 4 gamma, 1
  ENST ID: ENST00000413967
  CDS Start-End: 199-414
gaagcggtggccgccgagcgggatctgtgcggggagccggaaatggttgtggactacgtctgtgcggctgcgtggggctcggccgcgcggactgaaggagactgaaggccctcggatgcccagaacctgtaggccgcaccgtggacttgttcttaatcgagggggtgctggggggaccctgatgtggcaccaaatgaaatgaacaaagctccacagtccacaggccccccacccgccccatcccccggactcccacagccagcgtttcccccggggcagacagcgccggtggtgttcagtacgccacaagcgacacaaatgaacacgccttctcagccccgccagctggcgcctactatccagcccaaggggtgcagcagtttcccactggcgtggcccccaccccagttttgatgaaccagccaccccagattgctcccaagagggagcgtaagacgatccgaattcgagatccaaaccaaggaggaaaggatatcacagaggagatcatgtctggggcccgcactgcctccacacccacccctccccagacgggaggcggtctggagcctcaagctaatggggagacgccccaggttgctgtcattgtccggccagatgaccggtcacagggagcaatcattgctgaccggccagggctgcctggcccagagcatagcccttcagaatcccagccttcgtcgccttctccgaccccatcaccatccccagtcttggaaccggggtctgagcctaatctcgcagtcctctctattcctggggacactatgacaactatacaaatgtctgtagaagaatcaacccccatctcccgtgaaactggggagccatatcgcctctctccagaacccactcctctcgccgaacccatactggaagtagaagtgacacttagcaaaccggttccagaatctgagttttcttccagtcctctccaggctcccacccctttggcatctcacacagtggaaattcatgagcctaatggcatggtcccatctgaagatctggaaccagaggtggagtcaagcccagagcttgctcctcccccagcttgcccctccgaatcccctgtgcccattgctccaactgcccaacctgaggaactgctcaacggagccccctcgccaccagctgtggacttaagcccagtcagtgagccagaggagcaggccaaggaggtgacagcatcaatggcgccccccaccatcccctctgctactccagctacggctccttcagctacttccccagctcaggaggaggaaatggaagaagaagaagaagaggaagaaggagaagcaggagaagcaggagaagctgagagtgagaaaggaggagaggaactgctccccccagagagtacccctattccagccaacttgtctcagaatttggaggcagcagcagccactcaagtggcagtatctgtgccaaagaggagacggaaaattaaggagctaaataagaaggaggctgttggagaccttctggatgccttcaaggaggcgaacccggcagtaccagaggtggaaaatcagcctcctgcaggcagcaatccaggcccagagtctgagggcagtggtgtgcccccacgtcctgaggaagcagatgagacctgggactcaaaggaagacaaaattcacaatgctgagaacatccagcccggggaacagaagtatgaatataagtcagatcagtggaagcctctaaacctagaggagaaaaaacgttacgaccgtgagttcctgcttggttttcagttcatctttgccagtatgcagaagccagagggattgccacatatcagtgacgtggtgctggacaaggccaataaaacaccactgcggccactggatcccactagactacaaggcataaattgtggcccagacttcactccatcctttgccaaccttggccggacaacccttagcacccgtgggcccccaaggggtgggccaggtggggagctgccccgtgggccggctggcctgggaccccggcgctctcagcagggaccccgaaaagaaccacgcaagatcattgccacagtgttaatgaccgaagatataaaactgaacaaagcagagaaagcctggaaacccagcagcaagcggacggcggctgataaggatcgaggggaagaagatgctgatggcagcaaaacccaggacctattccgcagggtgcgctccatcctgaataaactgacaccccagatgttccagcagctgatgaagcaagtgacgcagctggccatcgacaccgaggaacgcctcaaaggggtcattgacctcatttttgagaaggccatttcagagcccaacttctctgtggcctatgccaacatgtgccgctgcctcatggcgctgaaagtgcccactacggaaaagccaacagtgactgtgaacttccgaaagctgttgttgaatcgatgtcagaaggagtttgagaaagacaaagatgatgatgaggtttttgagaagaagcaaaaagagatggatgaagctgctacggcagaggaacgaggacgcctgaaggaagagctggaagaggctcgggacatagcccggcggcgctctttagggaatatcaagtttattggagagttgttcaaactgaagatgttaacagaggcaataatgcatgactgtgtggtcaaactgcttaagaaccatgatgaagagtcccttgagtgcctttgtcgtctgctcaccaccattggcaaagacctggactttgaaaaagccaagccccgaatggatcagtatttcaaccagatgg

SEQ ID NO: 131235 - DNA, 2658 bp, Homo sapiens
  Payload ID: 5621
  Gene Symbol: EIF4G1
  Gene Name: eukaryotic translation initiation factor 4 gamma, 1
  ENST ID: ENST00000450424
  CDS Start-End: 158-2658
cggctgcgcctgcggagaagcggtggccgccgagcgggatctgtgcggggagccggaaatggttgtggactacgtctgtgcggctgcgtggggctcggccgcgcggactgaaggagactgaaggtgctggggggaccctgatgtggcaccaaatgaaatgaacaaagctccacagtccacaggccccccacccgccccatcccccggactcccacagccagcgtttcccccggggcagacagcgccggtggtgttcagtacgccacaagcgacacaaatgaacacgccttctcagccccgccagcacttctaccctagccgggcccagcccccgagcagtgcagcctcccgagtgcagagtgcagcccctgcccgccctggcccagctgcccatgtctaccctgctggatcccaagtaatgatgatcccttcccagatctcctacccagcctcccagggggcctactacatccctggacaggggcgttccacatacgttgtcccgacacagcagtaccctgtgcagccaggagccccaggcttctatccaggtgcaagccctacagaatttgggacctacgctggcgcctactatccagcccaaggggtgcagcagtttcccactggcgtggcccccaccccagttttgatgaaccagccaccccagattgctcccaagagggagcgtaagacgatccgaattcgagatccaaaccaaggaggaaaggatatcacagaggagatcatgtctggggcccgcactgcctccacacccacccctccccagacgggaggcggtctggagcctcaagctaatggggagacgccccaggttgctgtcattgtccggccagatgaccggtcacagggagcaatcattgctgaccggccagggctgcctggcccagagcatagcccttcagaatcccagccttcgtcgccttctccgaccccatcaccatccccagtcttggaaccggggtctgagcctaatctcgcagtcctctctattcctggggacactatgacaactatacaaatgtctgtagaagaatcaacccccatctcccgtgaaactggggagccatatcgcctctctccagaacccactcctctcgccgaacccatactggaagtagaagtgacacttagcaaaccggttccagaatctgagttttcttccagtcctctccaggctcccacccctttggcatctcacacagtggaaattcatgagcctaatggcatggtcccatctgaagatctggaaccagaggtggagtcaagcccagagcttgctcctcccccagcttgcccctccgaatcccctgtgcccattgctccaactgcccaacctgaggaactgctcaacggagccccctcgccaccagctgtggacttaagcccagtcagtgagccagaggagcaggccaaggaggtgacagcatcaatggcgccccccaccatcccctctgctactccagctacggctccttcagctacttccccagctcaggaggaggaaatggaagaagaagaagaagaggaagaaggagaagcaggagaagcaggagaagctgagagtgagaaaggaggagaggaactgctccccccagagagtacccctattccagccaacttgtctcagaatttggaggcagcagcagccactcaagtggcagtatctgtgccaaagaggagacggaaaattaaggagctaaataagaaggaggctgttggagaccttctggatgccttcaaggaggcgaacccggcagtaccagaggtggaaaatcagcctcctgcaggcagcaatccaggcccagagtctgagggcagtggtgtgcccccacgtcctgaggaagcagatgagacctgggactcaaaggaagacaaaattcacaatgctgagaacatccagcccggggaacagaagtatgaatataagtcagatcagtggaagcctctaaacctagaggagaaaaaacgttacgaccgtgagttcctgcttggttttcagttcatctttgccagtatgcagaagccagagggattgccacatatcagtgacgtggtgctggacaaggccaataaaacaccactgcggccactggatcccactagactacaaggcataaattgtggcccagacttcactccatcctttgccaaccttggccggacaacccttagcacccgtgggcccccaaggggtgggccaggtggggagctgccccgtgggccgcaggctggcctgggaccccggcgctctcagcagggaccccgaaaagaaccacgcaagatcattgccacagtgttaatgaccgaagatataaaactgaacaaagcagagaaagcctggaaacccagcagcaagcggacggcggctgataaggatcgaggggaagaagatgctgatggcagcaaaacccaggacctattccgcagggtgcgctccatcctgaataaactgacaccccagatgttccagcagctgatgaagcaagtgacgcagctggccatcgacaccgaggaacgcctcaaaggggtcattgacctcatttttgagaaggccatttcagagcccaacttctctgtggcctatgccaacatgtgccgctgcctcatggcgctgaaagtgcccactacggaaaagcc

SEQ ID NO: 131236 - DNA, 5569 bp, Homo sapiens
  Payload ID: 5621
  Gene Symbol: EIF4G1
  Gene Name: eukaryotic translation initiation factor 4 gamma, 1
  Uniprot ID: Q04637
  ENST ID: ENST00000414031
  CDS Start-End: 445-5124
gcagatcgcccggcgcggctccgccccctgcgccggtcacgtgggggcgccggctgcgcctgcggagaagcggtggccgccgagcgggatctgtgcggggagccggaaatggttgtggactacgtctgtgcggctgcgtggggctcggccgcgcggactgaaggagactgaaggccctcggatgcccagaacctgtaggccgcaccgtggacttgttcttaatcgagggggtgctggggggaccctgatgtggcaccaaatgaaatgaacaaagctccacagtccacaggccccccacccgccccatcccccggactcccacagcttgggtttctgccccacctgggcttcccctcttgctgaactctggtctcccctcttcagccagcgtttcccccggggcagacagcgccggtggtgttcagtacgccacaagcgacacaaatgaacacgccttctcagccccgccagcacttctaccctagccgggcccagcccccgagcagtgcagcctcccgagtgcagagtgcagcccctgcccgccctggcccagctgcccatgtctaccctgctggatcccaagtaatgatgatcccttcccagatctcctacccagcctcccagggggcctactacatccctggacaggggcgttccacatacgttgtcccgacacagcagtaccctgtgcagccaggagccccaggcttctatccaggtgcaagccctacagaatttgggacctacgctggcgcctactatccagcccaaggggtgcagcagtttcccactggcgtggcccccaccccagttttgatgaaccagccaccccagattgctcccaagagggagcgtaagacgatccgaattcgagatccaaaccaaggaggaaaggatatcacagaggagatcatgtctggggcccgcactgcctccacacccacccctccccagacgggaggcggtctggagcctcaagctaatggggagacgccccaggttgctgtcattgtccggccagatgaccggtcacagggagcaatcattgctgaccggccagggctgcctggcccagagcatagcccttcagaatcccagccttcgtcgccttctccgaccccatcaccatccccagtcttggaaccggggtctgagcctaatctcgcagtcctctctattcctggggacactatgacaactatacaaatgtctgtagaagaatcaacccccatctcccgtgaaactggggagccatatcgcctctctccagaacccactcctctcgccgaacccatactggaagtagaagtgacacttagcaaaccggttccagaatctgagttttcttccagtcctctccaggctcccacccctttggcatctcacacagtggaaattcatgagcctaatggcatggtcccatctgaagatctggaaccagaggtggagtcaagcccagagcttgctcctcccccagcttgcccctccgaatcccctgtgcccattgctccaactgcccaacctgaggaactgctcaacggagccccctcgccaccagctgtggacttaagcccagtcagtgagccagaggagcaggccaaggaggtgacagcatcaatggcgccccccaccatcccctctgctactccagctacggctccttcagctacttccccagctcaggaggaggaaatggaagaagaagaagaagaggaagaaggagaagcaggagaagcaggagaagctgagagtgagaaaggaggagaggaactgctccccccagagagtacccctattccagccaacttgtctcagaatttggaggcagcagcagccactcaagtggcagtatctgtgccaaagaggagacggaaaattaaggagctaaataagaaggaggctgttggagaccttctggatgccttcaaggaggcgaacccggcagtaccagaggtggaaaatcagcctcctgcaggcagcaatccaggcccagagtctgagggcagtggtgtgcccccacgtcctgaggaagcagatgagacctgggactcaaaggaagacaaaattcacaatgctgagaacatccagcccggggaacagaagtatgaatataagtcagatcagtggaagcctctaaacctagaggagaaaaaacgttacgaccgtgagttcctgcttggttttcagttcatctttgccagtatgcagaagccagagggattgccacatatcagtgacgtggtgctggacaaggccaataaaacaccactgcggccactggatcccactagactacaaggcataaattgtggcccagacttcactccatcctttgccaaccttggccggacaacccttagcacccgtgggcccccaaggggtgggccaggtggggagctgccccgtgggccggctggcctgggaccccggcgctctcagcagggaccccgaaaagaaccacgcaagatcattgccacagtgttaatgaccgaagatataaaactgaacaaagcagagaaagcctggaaacccagcagcaagcggacggcggctgataaggatcgaggggaagaagatgctgatggcagcaaaacccaggacctattccgcagggtgcgctccatcctgaataaactgacaccccagatgttccagcagctgatgaagcaagtgacgcagctggccatcgacaccgaggaacgcctcaaaggggtcattgacctcatttttgagaaggccatttcagagcccaacttctctgtggcctatgccaacatgtgccgctgcctcatggcgctgaaagtgcccactacggaaaagccaacagtgactgtgaacttccgaaagctgttgttgaatcgatgtcagaaggagtttgagaaagacaaagatgatgatgaggtttttgagaagaagcaaaaagagatggatgaagctgctacggcagaggaacgaggacgcctgaaggaagagctggaagaggctcgggacatagcccggcggcgctctttagggaatatcaagtttattggagagttgttcaaactgaagatgttaacagaggcaataatgcatgactgtgtggtcaaactgcttaagaaccatgatgaagagtcccttgagtgcctttgtcgtctgctcaccaccattggcaaagacctggactttgaaaaagccaagccccgaatggatcagtatttcaaccagatggaaaaaatcattaaagaaaagaagacgtcatcccgcatccgctttatgctgcaggacgtgctggatctgcgagggagcaattgggtgccacgccgaggggatcagggtcccaagaccattgaccagatccataaggaggctgagatggaagaacatcgagagcacatcaaagtgcagcagctcatggccaagggcagtgacaagcgtcggggcggtcctccaggccctcccatcagccgtggacttccccttgtggatgatggtggctggaacacagttcccatcagcaaaggtagccgccccattgacacctcacgactcaccaagatcaccaagcctggctccatcgattctaacaaccagctctttgcacctggagggcgactgagctggggcaagggcagcagcggaggctcaggagccaagccctcagacgcagcatcagaagctgctcgcccagctactagtactttgaatcgcttctcagcccttcaacaagcggtacccacagaaagcacagataatagacgtgtggtgcagaggagtagcttgagccgagaacgaggcgagaaagctggagaccgaggagaccgcctagagcggagtgaacggggaggggaccgtggggaccggcttgatcgtgcgcggacacctgctaccaagcggagcttcagcaaggaagtggaggagcggagtagagaacggccctcccagcctgaggggctgcgcaaggcagctagcctcacggaggatcgggaccgtgggcgggatgccgtgaagcgagaagctgccctacccccagtgagccccctgaaggcggctctctctgaggaggagttagagaagaaatccaaggctatcattgaggaatatctccatctcaatgacatgaaagaggcagtccagtgcgtgcaggagctggcctcaccctccttgctcttcatctttgtacggcatggtgtcgagtctacgctggagcgcagtgccattgctcgtgagcatatggggcagctgctgcaccagctgctctgtgctgggcatctgtctactgctcagtactaccaagggttgtatgaaatcttggaattggctgaggacatggaaattgacatcccccacgtgtggctctacctagcggaactggtaacacccattctgcaggaaggtggggtgcccatgggggagctgttcagggagattacaaagcctctgagaccgttgggcaaagctgcttccctgttgctggagatcctgggcctcctgtgcaaaagcatgggtcctaaaaaggtggggacgctgtggcgagaagccgggcttagctggaaggaatttctacctgaaggccaggacattggtgcattcgtcgctgaacagaaggtggagtataccctgggagaggagtcggaagcccctggccagagggcactcccctccgaggagctgaacaggcagctggagaagctgctgaaggagggcagcagtaaccagcgggtgttcgactggatagaggccaacctgagtgagcagcagatagtatccaacacgttagttcgagccctcatgacggctgtctgctattctgcaattatttttgagactcccctccgagtggacgttgcagtgctgaaagcgcgagcgaagctgctgcagaaatacctgtgtgacgagcagaaggagctacaggcgctctacgccctccaggcccttgtagtgaccttagaacagcctcccaacctgctgcggatgttctttgacgcactgtatgacgaggacgtggtgaaggaggatgccttctacagttgggagagtagcaaggaccccgctgagcagcagggcaagggtgtggcccttaaatctgtcacagccttcttcaagtggctccgtgaagcagaggaggagtctgaccacaactgagggctggtggggccggggacctggagccccatggacacacagatggcccggctagccgcctggactgcaggggggcggcagcagcggcggtggcagtgggtgcctgtagtgtgatgtgtctgaactaataaagtggctgaagaggcaggatggcttggggctgcctgggcccccctccaggatgccgccaggtgtccctctcctccccctggggcacagagatatattatatataaagtcttgaaatttggtgtgtcttggggtggggaggggcaccaacgcctgcccctggggtccttttttttattttctgaaaatcactctcgggactgccgtcctcgctgctgggggcatatgccccagcccctgtaccacccctgctgttgcctgggcagggggaagggggggcacggtgcctgtaattattaaacatgaattcaattaa

SEQ ID NO: 131237 - DNA, 677 bp, Homo sapiens
  Payload ID: 5621
  Gene Symbol: EIF4G1
  Gene Name: eukaryotic translation initiation factor 4 gamma, 1
  ENST ID: ENST00000448284
  CDS Start-End: 1-677
aaaaagccaagccccgaatggatcagtatttcaaccagatggaaaaaatcattaaagaaaagaagacgtcatcccgcatccgctttatgctgcaggacgtgctggatctgcgagggagcaattgggtgccacgccgaggggatcagggtcccaagaccattgaccagatccataaggaggctgagatggaagaacatcgagagcacatcaaagtgcagcagctcatggccaagggcagtgacaagcgtcggggcggtcctccaggccctcccatcagccgtggacttccccttgtggatgatggtggctggaacacagttcccatcagcaaaggtagccgccccattgacacctcacgactcaccaagatcaccaaggtagggcctggctccatcgattctaacaaccagctctttgcacctggagggcgactgagctggggcaagggcagcagcggaggctcaggagccaagccctcagacgcagcatcagaagctgctcgcccagctactagtactttgaatcgcttctcagcccttcaacaagcggtacccacagaaagcacagataatagacgtgtggtgcagaggagtagcttgagccgagaacgaggcgagaaagctggagaccgaggagaccgcctagagcggagtgaacggggaggggaccgtggggac

SEQ ID NO: 131238 - DNA, 4683 bp, Homo sapiens
  Payload ID: 5621
  Gene Symbol: EIF4G1
  Gene Name: eukaryotic translation initiation factor 4 gamma, 1
  ENST ID: ENST00000411531
  CDS Start-End: 1-4683
atgaacacgccttctcagccccgccagcacttctaccctagccgggcccagcccccgagcagtgcagcctcccgagtgcagagtgcagcccctgcccgccctggcccagctgcccatgtctaccctgctggatcccaagtaatgatgatcccttcccagatctcctacccagcctcccagggggcctactacatccctggacaggggcgttccacatacgttgtcccgacacagcagtaccctgtgcagccaggagccccaggcttctatccaggtgcaagccctacagaatttgggacctacgctggcgcctactatccagcccaaggggtgcagcagtttcccactggcgtggcccccaccccagttttgatgaaccagccaccccagattgctcccaagagggagcgtaagacgatccgaattcgagatccaaaccaaggaggaaaggatatcacagaggagatcatgtctggggcccgcactgcctccacacccacccctccccagacgggaggcggtctggagcctcaagctaatggggagacgccccaggttgctgtcattgtccggccagatgaccggtcacagggagcaatcattgctgaccggccagggctgcctggcccagagcatagcccttcagaatcccagccttcgtcgccttctccgaccccatcaccatccccagtcttggaaccggggtctgagcctaatctcgcagtcctctctattcctggggacactatgacaactatacaaatgtctgtagaagaatcaacccccatctcccgtgaaactggggagccatatcgcctctctccagaacccactcctctcgccgaacccatactggaagtagaagtgacacttagcaaaccggttccagaatctgagttttcttccagtcctctccaggctcccacccctttggcatctcacacagtggaaattcatgagcctaatggcatggtcccatctgaagatctggaaccagaggtggagtcaagcccagagcttgctcctcccccagcttgcccctccgaatcccctgtgcccattgctccaactgcccaacctgaggaactgctcaacggagccccctcgccaccagctgtggacttaagcccagtcagtgagccagaggagcaggccaaggaggtgacagcatcaatggcgccccccaccatcccctctgctactccagctacggctccttcagctacttccccagctcaggaggaggaaatggaagaagaagaagaagaggaagaaggagaagcaggagaagcaggagaagctgagagtgagaaaggaggagaggaactgctccccccagagagtacccctattccagccaacttgtctcagaatttggaggcagcagcagccactcaagtggcagtatctgtgccaaagaggagacggaaaattaaggagctaaataagaaggaggctgttggagaccttctggatgccttcaaggaggcgaacccggcagtaccagaggtggaaaatcagcctcctgcaggcagcaatccaggcccagagtctgagggcagtggtgtgcccccacgtcctgaggaagcagatgagacctgggactcaaaggaagacaaaattcacaatgctgagaacatccagcccggggaacagaagtatgaatataagtcagatcagtggaagcctctaaacctagaggagaaaaaacgttacgaccgtgagttcctgcttggttttcagttcatctttgccagtatgcagaagccagagggattgccacatatcagtgacgtggtgctggacaaggccaataaaacaccactgcggccactggatcccactagactacaaggcataaattgtggcccagacttcactccatcctttgccaaccttggccggacaacccttagcacccgtgggcccccaaggggtgggccaggtggggagctgccccgtgggccgcaggctggcctgggaccccggcgctctcagcagggaccccgaaaagaaccacgcaagatcattgccacagtgttaatgaccgaagatataaaactgaacaaagcagagaaagcctggaaacccagcagcaagcggacggcggctgataaggatcgaggggaagaagatgctgatggcagcaaaacccaggacctattccgcagggtgcgctccatcctgaataaactgacaccccagatgttccagcagctgatgaagcaagtgacgcagctggccatcgacaccgaggaacgcctcaaaggggtcattgacctcatttttgagaaggccatttcagagcccaacttctctgtggcctatgccaacatgtgccgctgcctcatggcgctgaaagtgcccactacggaaaagccaacagtgactgtgaacttccgaaagctgttgttgaatcgatgtcagaaggagtttgagaaagacaaagatgatgatgaggtttttgagaagaagcaaaaagagatggatgaagctgctacggcagaggaacgaggacgcctgaaggaagagctggaagaggctcgggacatagcccggcggcgctctttagggaatatcaagtttattggagagttgttcaaactgaagatgttaacagaggcaataatgcatgactgtgtggtcaaactgcttaagaaccatgatgaagagtcccttgagtgcctttgtcgtctgctcaccaccattggcaaagacctggactttgaaaaagccaagccccgaatggatcagtatttcaaccagatggaaaaaatcattaaagaaaagaagacgtcatcccgcatccgctttatgctgcaggacgtgctggatctgcgagggagcaattgggtgccacgccgaggggatcagggtcccaagaccattgaccagatccataaggaggctgagatggaagaacatcgagagcacatcaaagtgcagcagctcatggccaagggcagtgacaagcgtcggggcggtcctccaggccctcccatcagccgtggacttccccttgtggatgatggtggctggaacacagttcccatcagcaaaggtagccgccccattgacacctcacgactcaccaagatcaccaagcctggctccatcgattctaacaaccagctctttgcacctggagggcgactgagctggggcaagggcagcagcggaggctcaggagccaagccctcagacgcagcatcagaagctgctcgcccagctactagtactttgaatcgcttctcagcccttcaacaagcggtacccacagaaagcacagataatagacgtgtggtgcagaggagtagcttgagccgagaacgaggcgagaaagctggagaccgaggagaccgcctagagcggagtgaacggggaggggaccgtggggaccggcttgatcgtgcgcggacacctgctaccaagcggagcttcagcaaggaagtggaggagcggagtagagaacggccctcccagcctgaggggctgcgcaaggcagctagcctcacggaggatcgggaccgtgggcgggatgccgtgaagcgagaagctgccctacccccagtgagccccctgaaggcggctctctctgaggaggagttagagaagaaatccaaggctatcattgaggaatatctccatctcaatgacatgaaagaggcagtccagtgcgtgcaggagctggcctcaccctccttgctcttcatctttgtacggcatggtgtcgagtctacgctggagcgcagtgccattgctcgtgagcatatggggcagctgctgcaccagctgctctgtgctgggcatctgtctactgctcagtactaccaagggttgtatgaaatcttggaattggctgaggacatggaaattgacatcccccacgtgtggctctacctagcggaactggtaacacccattctgcaggaaggtggggtgcccatgggggagctgttcagggagattacaaagcctctgagaccgttgggcaaagctgcttccctgttgctggagatcctgggcctcctgtgcaaaagcatgggtcctaaaaaggtggggacgctgtggcgagaagccgggcttagctggaaggaatttctacctgaaggccaggacattggtgcattcgtcgctgaacagaaggtggagtataccctgggagaggagtcggaagcccctggccagagggcactcccctccgaggagctgaacaggcagctggagaagctgctgaaggagggcagcagtaaccagcgggtgttcgactggatagaggccaacctgagtgagcagcagatagtatccaacacgttagttcgagccctcatgacggctgtctgctattctgcaattatttttgagactcccctccgagtggacgttgcagtgctgaaagcgcgagcgaagctgctgcagaaatacctgtgtgacgagcagaaggagctacaggcgctctacgccctccaggcccttgtagtgaccttagaacagcctcccaacctgctgcggatgttctttgacgcactgtatgacgaggacgtggtgaaggaggatgccttctacagttgggagagtagcaaggaccccgctgagcagcagggcaagggtgtggcccttaaatctgtcacagccttcttcaagtggctccgtgaagcagaggaggagtctgaccacaactga

SEQ ID NO: 131239 - DNA, 750 bp, Homo sapiens
  Payload ID: 5621
  Gene Symbol: EIF4G1
  Gene Name: eukaryotic translation initiation factor 4 gamma, 1
  ENST ID: ENST00000422614
  CDS Start-End: 1-541
gctgcaccagctgctctgtgctgggcatctgtctactgctcagtactaccaagggttgtatgaaatcttggaattggctgaggacatggaaattgacatcccccacgtgtggctctacctagcggaactggtaacacccattctgcaggaaggtggggtgcccatgggggagctgttcagggagattacaaagcctctgagaccgttgggcaaagctgcttccctgttgctggagatcctgggcctcctgtgcaaaagcatgggtcctaaaaaggtggggacgctgtggcgagaagccgggcttagctggaaggaatttctacctgaaggccaggacattggtgcattcgtcgctgaacagaaggtggagtataccctgggagaggagtcggaagcccctggccagagggcactcccctccgaggagctgaacaggcagctggagaagctgctgaaggagggcagcagtaaccagcgggtgttcgactggatagagaatctggggatcatttgtttctcccatacaggccaacctgagtgagcagcagatagtatccaacacgttagttcgagccctcatgacggctgtctgctattctgcaattatttttgagactcccctccgagtggacgttgcagtgctgaaagcgcgagcgaagctgctgcagaaatacctgtgtgacgagcagaaggagctacaggcgctctacgccctccaggcccttgtagtgaccttagaacagcctccca

SEQ ID NO: 131240 - DNA, 2384 bp, Homo sapiens
  Payload ID: 5621
  Gene Symbol: EIF4G1
  Gene Name: eukaryotic translation initiation factor 4 gamma, 1
  ENST ID: ENST00000444861
  CDS Start-End: 114-2384
taaagggctggagacaggaactagactcaagttaaatggaacaggctggcgcctactatccagcccaaggggtgcagcagtttcccactggcgtggcccccaccccagttttgatgaaccagccaccccagattgctcccaagagggagcgtaagacgatccgaattcgagatccaaaccaaggaggaaaggatatcacagaggagatcatgtctggggcccgcactgcctccacacccacccctccccagacgggaggcggtctggagcctcaagctaatggggagacgccccaggttgctgtcattgtccggccagatgaccggtcacagggagcaatcattgctgaccggccagggctgcctggcccagagcatagcccttcagaatcccagccttcgtcgccttctccgaccccatcaccatccccagtcttggaaccggggtctgagcctaatctcgcagtcctctctattcctggggacactatgacaactatacaaatgtctgtagaagaatcaacccccatctcccgtgaaactggggagccatatcgcctctctccagaacccactcctctcgccgaacccatactggaagtagaagtgacacttagcaaaccggttccagaatctgagttttcttccagtcctctccaggctcccacccctttggcatctcacacagtggaaattcatgagcctaatggcatggtcccatctgaagatctggaaccagaggtggagtcaagcccagagcttgctcctcccccagcttgcccctccgaatcccctgtgcccattgctccaactgcccaacctgaggaactgctcaacggagccccctcgccaccagctgtggacttaagcccagtcagtgagccagaggagcaggccaaggaggtgacagcatcaatggcgccccccaccatcccctctgctactccagctacggctccttcagctacttccccagctcaggaggaggaaatggaagaagaagaagaagaggaagaaggagaagcaggagaagcaggagaagctgagagtgagaaaggaggagaggaactgctccccccagagagtacccctattccagccaacttgtctcagaatttggaggcagcagcagccactcaagtggcagtatctgtgccaaagaggagacggaaaattaaggagctaaataagaaggaggctgttggagaccttctggatgccttcaaggaggcgaacccggcagtaccagaggtggaaaatcagcctcctgcaggcagcaatccaggcccagagtctgagggcagtggtgtgcccccacgtcctgaggaagcagatgagacctgggactcaaaggaagacaaaattcacaatgctgagaacatccagcccggggaacagaagtatgaatataagtcagatcagtggaagcctctaaacctagaggagaaaaaacgttacgaccgtgagttcctgcttggttttcagttcatctttgccagtatgcagaagccagagggattgccacatatcagtgacgtggtgctggacaaggccaataaaacaccactgcggccactggatcccactagactacaaggcataaattgtggcccagacttcactccatcctttgccaaccttggccggacaacccttagcacccgtgggcccccaaggggtgggccaggtggggagctgccccgtgggccggctggcctgggaccccggcgctctcagcagggaccccgaaaagaaccacgcaagatcattgccacagtgttaatgaccgaagatataaaactgaacaaagcagagaaagcctggaaacccagcagcaagcggacggcggctgataaggatcgaggggaagaagatgctgatggcagcaaaacccaggacctattccgcagggtgcgctccatcctgaataaactgacaccccagatgttccagcagctgatgaagcaagtgacgcagctggccatcgacaccgaggaacgcctcaaaggggtcattgacctcatttttgagaaggccatttcagagcccaacttctctgtggcctatgccaacatgtgccgctgcctcatggcgctgaaagtgcccactacggaaaagccaacagtgactgtgaacttccgaaagctgttgttgaatcgatgtcagaaggagtttgagaaagacaaagatgatgatgaggtttttgagaagaagcaaaaagagatggatgaagctgctacggcagaggaacgaggacgcctgaaggaagagctggaagaggctcgggacatagcccggcggcgctctttagggaatatcaagtttattggagagttgttcaaactgaagatgttaacagaggcaataatgcatgactgtgtggtc

SEQ ID NO: 131241 - DNA, 4311 bp, Homo sapiens
  Payload ID: 5621
  Gene Symbol: EIF4G1
  Gene Name: eukaryotic translation initiation factor 4 gamma, 1
  ENST ID: ENST00000441154
  CDS Start-End: 1-4311
atgaaccagccaccccagattgctcccaagagggagcgtaagacgatccgaattcgagatccaaaccaaggaggaaaggatatcacagaggagatcatgtctggggcccgcactgcctccacacccacccctccccagacgggaggcggtctggagcctcaagctaatggggagacgccccaggttgctgtcattgtccggccagatgaccggtcacagggagcaatcattgctgaccggccagggctgcctggcccagagcatagcccttcagaatcccagccttcgtcgccttctccgaccccatcaccatccccagtcttggaaccggggtctgagcctaatctcgcagtcctctctattcctggggacactatgacaactatacaaatgtctgtagaagaatcaacccccatctcccgtgaaactggggagccatatcgcctctctccagaacccactcctctcgccgaacccatactggaagtagaagtgacacttagcaaaccggttccagaatctgagttttcttccagtcctctccaggctcccacccctttggcatctcacacagtggaaattcatgagcctaatggcatggtcccatctgaagatctggaaccagaggtggagtcaagcccagagcttgctcctcccccagcttgcccctccgaatcccctgtgcccattgctccaactgcccaacctgaggaactgctcaacggagccccctcgccaccagctgtggacttaagcccagtcagtgagccagaggagcaggccaaggaggtgacagcatcaatggcgccccccaccatcccctctgctactccagctacggctccttcagctacttccccagctcaggaggaggaaatggaagaagaagaagaagaggaagaaggagaagcaggagaagcaggagaagctgagagtgagaaaggaggagaggaactgctccccccagagagtacccctattccagccaacttgtctcagaatttggaggcagcagcagccactcaagtggcagtatctgtgccaaagaggagacggaaaattaaggagctaaataagaaggaggctgttggagaccttctggatgccttcaaggaggcgaacccggcagtaccagaggtggaaaatcagcctcctgcaggcagcaatccaggcccagagtctgagggcagtggtgtgcccccacgtcctgaggaagcagatgagacctgggactcaaaggaagacaaaattcacaatgctgagaacatccagcccggggaacagaagtatgaatataagtcagatcagtggaagcctctaaacctagaggagaaaaaacgttacgaccgtgagttcctgcttggttttcagttcatctttgccagtatgcagaagccagagggattgccacatatcagtgacgtggtgctggacaaggccaataaaacaccactgcggccactggatcccactagactacaaggcataaattgtggcccagacttcactccatcctttgccaaccttggccggacaacccttagcacccgtgggcccccaaggggtgggccaggtggggagctgccccgtgggccgcaggctggcctgggaccccggcgctctcagcagggaccccgaaaagaaccacgcaagatcattgccacagtgttaatgaccgaagatataaaactgaacaaagcagagaaagcctggaaacccagcagcaagcggacggcggctgataaggatcgaggggaagaagatgctgatggcagcaaaacccaggacctattccgcagggtgcgctccatcctgaataaactgacaccccagatgttccagcagctgatgaagcaagtgacgcagctggccatcgacaccgaggaacgcctcaaaggggtcattgacctcatttttgagaaggccatttcagagcccaacttctctgtggcctatgccaacatgtgccgctgcctcatggcgctgaaagtgcccactacggaaaagccaacagtgactgtgaacttccgaaagctgttgttgaatcgatgtcagaaggagtttgagaaagacaaagatgatgatgaggtttttgagaagaagcaaaaagagatggatgaagctgctacggcagaggaacgaggacgcctgaaggaagagctggaagaggctcgggacatagcccggcggcgctctttagggaatatcaagtttattggagagttgttcaaactgaagatgttaacagaggcaataatgcatgactgtgtggtcaaactgcttaagaaccatgatgaagagtcccttgagtgcctttgtcgtctgctcaccaccattggcaaagacctggactttgaaaaagccaagccccgaatggatcagtatttcaaccagatggaaaaaatcattaaagaaaagaagacgtcatcccgcatccgctttatgctgcaggacgtgctggatctgcgagggagcaattgggtgccacgccgaggggatcagggtcccaagaccattgaccagatccataaggaggctgagatggaagaacatcgagagcacatcaaagtgcagcagctcatggccaagggcagtgacaagcgtcggggcggtcctccaggccctcccatcagccgtggacttccccttgtggatgatggtggctggaacacagttcccatcagcaaaggtagccgccccattgacacctcacgactcaccaagatcaccaagcctggctccatcgattctaacaaccagctctttgcacctggagggcgactgagctggggcaagggcagcagcggaggctcaggagccaagccctcagacgcagcatcagaagctgctcgcccagctactagtactttgaatcgcttctcagcccttcaacaagcggtacccacagaaagcacagataatagacgtgtggtgcagaggagtagcttgagccgagaacgaggcgagaaagctggagaccgaggagaccgcctagagcggagtgaacggggaggggaccgtggggaccggcttgatcgtgcgcggacacctgctaccaagcggagcttcagcaaggaagtggaggagcggagtagagaacggccctcccagcctgaggggctgcgcaaggcagctagcctcacggaggatcgggaccgtgggcgggatgccgtgaagcgagaagctgccctacccccagtgagccccctgaaggcggctctctctgaggaggagttagagaagaaatccaaggctatcattgaggaatatctccatctcaatgacatgaaagaggcagtccagtgcgtgcaggagctggcctcaccctccttgctcttcatctttgtacggcatggtgtcgagtctacgctggagcgcagtgccattgctcgtgagcatatggggcagctgctgcaccagctgctctgtgctgggcatctgtctactgctcagtactaccaagggttgtatgaaatcttggaattggctgaggacatggaaattgacatcccccacgtgtggctctacctagcggaactggtaacacccattctgcaggaaggtggggtgcccatgggggagctgttcagggagattacaaagcctctgagaccgttgggcaaagctgcttccctgttgctggagatcctgggcctcctgtgcaaaagcatgggtcctaaaaaggtggggacgctgtggcgagaagccgggcttagctggaaggaatttctacctgaaggccaggacattggtgcattcgtcgctgaacagaaggtggagtataccctgggagaggagtcggaagcccctggccagagggcactcccctccgaggagctgaacaggcagctggagaagctgctgaaggagggcagcagtaaccagcgggtgttcgactggatagaggccaacctgagtgagcagcagatagtatccaacacgttagttcgagccctcatgacggctgtctgctattctgcaattatttttgagactcccctccgagtggacgttgcagtgctgaaagcgcgagcgaagctgctgcagaaatacctgtgtgacgagcagaaggagctacaggcgctctacgccctccaggcccttgtagtgaccttagaacagcctcccaacctgctgcggatgttctttgacgcactgtatgacgaggacgtggtgaaggaggatgccttctacagttgggagagtagcaaggaccccgctgagcagcagggcaagggtgtggcccttaaatctgtcacagccttcttcaagtggctccgtgaagcagaggaggagtctgaccacaactga

SEQ ID NO: 131242 - DNA, 983 bp, Homo sapiens
  Payload ID: 5621
  Gene Symbol: EIF4G1
  Gene Name: eukaryotic translation initiation factor 4 gamma, 1
  ENST ID: ENST00000457456
  CDS Start-End: 129-983
ctacgagagcagccagatgggctgaaagtggaactcaaggggtttctggcacctacctacctgcttcccgctgggggatccgaattcgagatccaaaccaaggaggaaaggatatcacagaggagatcatgtctggggcccgcactgcctccacacccacccctccccagacgggaggcggtctggagcctcaagctaatggggagacgccccaggttgctgtcattgtccggccagatgaccggtcacagggagcaatcattgctgaccggccagggctgcctggcccagagcatagcccttcagaatcccagccttcgtcgccttctccgaccccatcaccatccccagtcttggaaccggggtctgagcctaatctcgcagtcctctctattcctggggacactatgacaactatacaaatgtctgtagaagaatcaacccccatctcccgtgaaactggggagccatatcgcctctctccagaacccactcctctcgccgaacccatactggaagtagaagtgacacttagcaaaccggttccagaatctgagttttcttccagtcctctccaggctcccacccctttggcatctcacacagtggaaattcatgagcctaatggcatggtcccatctgaagatctggaaccagaggtggagtcaagcccagagcttgctcctcccccagcttgcccctccgaatcccctgtgcccattgctccaactgcccaacctgaggaactgctcaacggagccccctcgccaccagctgtggacttaagcccagtcagtgagccagaggagcaggccaaggaggtgacagcatcaatggcgccccccaccatcccctctgctactccagctacggctccttcagctacttccccagctcaggaggaggaaatggaagaagaagaagaagaggaagaaggagaagcaggagaagcaggagaagctgagagtgagaaaggaggagag

SEQ ID NO: 131243 - DNA, 5129 bp, Homo sapiens
  Payload ID: 5621
  Gene Symbol: EIF4G1
  Gene Name: eukaryotic translation initiation factor 4 gamma, 1
  ENST ID: ENST00000442406
  CDS Start-End: 293-445
ccggctgcgcctgcggagaagcggtggccgccgagcgggatctgtgcggggagccggaaatggttgtggactacgtctgtgcggctgcgtggggctcggccgcgcggactgaaggagactgaaggggcgttccacatacgttgtcccgacacagcagtaccctgtgcagccaggagccccaggcttctatccaggtgcaagccctacagaatttgggacctacgctggcgcctactatccagcccaaggggtgcagcagtttcccactggcgtggcccccaccccagttttgatgaaccagccaccccagattgctcccaagagggagcgtaagacgatccgaattcgagatccaaaccaaggaggaaaggatatcacagaggagatcatgtctggggcccgcactgcctccacacccacccctccccaggcagagctaaagtagaaatggctctagtaaagaagggttgtgggactcttcagtgcaaacttggtaaccctttgtgtcctgcagacgggaggcggtctggagcctcaagctaatggggagacgccccaggttgctgtcattgtccggccagatgaccggtcacagggagcaatcattgctgaccggccagggctgcctggcccagagcatagcccttcagaatcccagccttcgtcgccttctccgaccccatcaccatccccagtcttggaaccggggtctgagcctaatctcgcagtcctctctattcctggggacactatgacaactatacaaatgtctgtagaagaatcaacccccatctcccgtgaaactggggagccatatcgcctctctccagaacccactcctctcgccgaacccatactggaagtagaagtgacacttagcaaaccggttccagaatctgagttttcttccagtcctctccaggctcccacccctttggcatctcacacagtggaaattcatgagcctaatggcatggtcccatctgaagatctggaaccagaggtggagtcaagcccagagcttgctcctcccccagcttgcccctccgaatcccctgtgcccattgctccaactgcccaacctgaggaactgctcaacggagccccctcgccaccagctgtggacttaagcccagtcagtgagccagaggagcaggccaaggaggtgacagcatcaatggcgccccccaccatcccctctgctactccagctacggctccttcagctacttccccagctcaggaggaggaaatggaagaagaagaagaagaggaagaaggagaagcaggagaagcaggagaagctgagagtgagaaaggaggagaggaactgctccccccagagagtacccctattccagccaacttgtctcagaatttggaggcagcagcagccactcaagtggcagtatctgtgccaaagaggagacggaaaattaaggagctaaataagaaggaggctgttggagaccttctggatgccttcaaggaggcgaacccggcagtaccagaggtggaaaatcagcctcctgcaggcagcaatccaggcccagagtctgagggcagtggtgtgcccccacgtcctgaggaagcagatgagacctgggactcaaaggaagacaaaattcacaatgctgagaacatccagcccggggaacagaagtatgaatataagtcagatcagtggaagcctctaaacctagaggagaaaaaacgttacgaccgtgagttcctgcttggttttcagttcatctttgccagtatgcagaagccagagggattgccacatatcagtgacgtggtgctggacaaggccaataaaacaccactgcggccactggatcccactagactacaaggcataaattgtggcccagacttcactccatcctttgccaaccttggccggacaacccttagcacccgtgggcccccaaggggtgggccaggtggggagctgccccgtgggccggctggcctgggaccccggcgctctcagcagggaccccgaaaagaaccacgcaagatcattgccacagtgttaatgaccgaagatataaaactgaacaaagcagagaaagcctggaaacccagcagcaagcggacggcggctgataaggatcgaggggaagaagatgctgatggcagcaaaacccaggacctattccgcagggtgcgctccatcctgaataaactgacaccccagatgttccagcagctgatgaagcaagtgacgcagctggccatcgacaccgaggaacgcctcaaaggggtcattgacctcatttttgagaaggccatttcagagcccaacttctctgtggcctatgccaacatgtgccgctgcctcatggcgctgaaagtgcccactacggaaaagccaacagtgactgtgaacttccgaaagctgttgttgaatcgatgtcagaaggagtttgagaaagacaaagatgatgatgaggtttttgagaagaagcaaaaagagatggatgaagctgctacggcagaggaacgaggacgcctgaaggaagagctggaagaggctcgggacatagcccggcggcgctctttagggaatatcaagtttattggagagttgttcaaactgaagatgttaacagaggcaataatgcatgactgtgtggtcaaactgcttaagaaccatgatgaagagtcccttgagtgcctttgtcgtctgctcaccaccattggcaaagacctggactttgaaaaagccaagccccgaatggatcagtatttcaaccagatggaaaaaatcattaaagaaaagaagacgtcatcccgcatccgctttatgctgcaggacgtgctggatctgcgagggagcaattgggtgccacgccgaggggatcagggtcccaagaccattgaccagatccataaggaggctgagatggaagaacatcgagagcacatcaaagtgcagcagctcatggccaagggcagtgacaagcgtcggggcggtcctccaggccctcccatcagccgtggacttccccttgtggatgatggtggctggaacacagttcccatcagcaaaggtagccgccccattgacacctcacgactcaccaagatcaccaagcctggctccatcgattctaacaaccagctctttgcacctggagggcgactgagctggggcaagggcagcagcggaggctcaggagccaagccctcagacgcagcatcagaagctgctcgcccagctactagtactttgaatcgcttctcagcccttcaacaagcggtacccacagaaagcacagataatagacgtgtggtgcagaggagtagcttgagccgagaacgaggcgagaaagctggagaccgaggagaccgcctagagcggagtgaacggggaggggaccgtggggaccggcttgatcgtgcgcggacacctgctaccaagcggagcttcagcaaggaagtggaggagcggagtagagaacggccctcccagcctgaggggctgcgcaaggcagctagcctcacggaggatcgggaccgtgggcgggatgccgtgaagcgagaagctgccctacccccagtgagccccctgaaggcggctctctctgaggaggagttagagaagaaatccaaggctatcattgaggaatatctccatctcaatgacatgaaagaggcagtccagtgcgtgcaggagctggcctcaccctccttgctcttcatctttgtacggcatggtgtcgagtctacgctggagcgcagtgccattgctcgtgagcatatggggcagctgctgcaccagctgctctgtgctgggcatctgtctactgctcagtactaccaagggttgtatgaaatcttggaattggctgaggacatggaaattgacatcccccacgtgtggctctacctagcggaactggtaacacccattctgcaggaaggtggggtgcccatgggggagctgttcagggagattacaaagcctctgagaccgttgggcaaagctgcttccctgttgctggagatcctgggcctcctgtgcaaaagcatgggtcctaaaaaggtggggacgctgtggcgagaagccgggcttagctggaaggaatttctacctgaaggccaggacattggtgcattcgtcgctgaacagaaggtggagtataccctgggagaggagtcggaagcccctggccagagggcactcccctccgaggagctgaacaggcagctggagaagctgctgaaggagggcagcagtaaccagcgggtgttcgactggatagaggccaacctgagtgagcagcagatagtatccaacacgttagttcgagccctcatgacggctgtctgctattctgcaattatttttgagactcccctccgagtggacgttgcagtgctgaaagcgcgagcgaagctgctgcagaaatacctgtgtgacgagcagaaggagctacaggcgctctacgccctccaggcccttgtagtgaccttagaacagcctcccaacctgctgcggatgttctttgacgcactgtatgacgaggacgtggtgaaggaggatgccttctacagttgggagagtagcaaggaccccgctgagcagcagggcaagggtgtggcccttaaatctgtcacagccttcttcaagtggctccgtgaagcagaggaggagtctgaccacaactgagggctggtggggccggggacctggagccccatggacacacagatggcccggctagccgcctggactgcaggggggcggcagcagcggcggtggcagtgggtgcctgtagtgtgatgtgtctgaactaataaagtggctgaagaggcaggatggcttggggctgcctgggcccccctccaggatgccgccaggtgtccctctcctccccctggggcacagagatatattatatataaagtcttgaaatttggtgtgtcttggggtggggaggggcaccaacgcctgcccctggggtccttttttttattttctgaaaatcactctcgggactgccgtcctcgctgctgggggcatatgccccagcccctgtaccacccctgctgttgcctgggcagggggaagggggggcacggtgcctgtaattattaaacatgaattcaattaa

SEQ ID NO: 131244 - DNA, 2907 bp, Homo sapiens
  Payload ID: 5621
  Gene Symbol: EIF4G1
  Gene Name: eukaryotic translation initiation factor 4 gamma, 1
  ENST ID: ENST00000426123
  CDS Start-End: 198-2907
aagcggtggccgccgagcgggatctgtgcggggagccggaaatggttgtggactacgtctgtgcggctgcgtggggctcggccgcgcggactgaaggagactgaaggccctcggatgcccagaacctgtaggccgcaccgtggacttgttcttaatcgagggggtgctggggggaccctgatgtggcaccaaatgaaatgaacaaagctccacagtccacaggccccccacccgccccatcccccggactcccacagccagcgtttcccccggggcagacagcgccggtggtgttcagtacgccacaagcgacacaaatgaacacgccttctcagccccgccaggggcgttccacatacgttgtcccgacacagcagtaccctgtgcagccaggagccccaggcttctatccaggtgcaagccctacagaatttgggacctacgctggcgcctactatccagcccaaggggtgcagcagtttcccactggcgtggcccccaccccagttttgatgaaccagccaccccagattgctcccaagagggagcgtaagacgatccgaattcgagatccaaaccaaggaggaaaggatatcacagaggagatcatgtctggggcccgcactgcctccacacccacccctccccagacgggaggcggtctggagcctcaagctaatggggagacgccccaggttgctgtcattgtccggccagatgaccggtcacagggagcaatcattgctgaccggccagggctgcctggcccagagcatagcccttcagaatcccagccttcgtcgccttctccgaccccatcaccatccccagtcttggaaccggggtctgagcctaatctcgcagtcctctctattcctggggacactatgacaactatacaaatgtctgtagaagaatcaacccccatctcccgtgaaactggggagccatatcgcctctctccagaacccactcctctcgccgaacccatactggaagtagaagtgacacttagcaaaccggttccagaatctgagttttcttccagtcctctccaggctcccacccctttggcatctcacacagtggaaattcatgagcctaatggcatggtcccatctgaagatctggaaccagaggtggagtcaagcccagagcttgctcctcccccagcttgcccctccgaatcccctgtgcccattgctccaactgcccaacctgaggaactgctcaacggagccccctcgccaccagctgtggacttaagcccagtcagtgagccagaggagcaggccaaggaggtgacagcatcaatggcgccccccaccatcccctctgctactccagctacggctccttcagctacttccccagctcaggaggaggaaatggaagaagaagaagaagaggaagaaggagaagcaggagaagcaggagaagctgagagtgagaaaggaggagaggaactgctccccccagagagtacccctattccagccaacttgtctcagaatttggaggcagcagcagccactcaagtggcagtatctgtgccaaagaggagacggaaaattaaggagctaaataagaaggaggctgttggagaccttctggatgccttcaaggaggcgaacccggcagtaccagaggtggaaaatcagcctcctgcaggcagcaatccaggcccagagtctgagggcagtggtgtgcccccacgtcctgaggaagcagatgagacctgggactcaaaggaagacaaaattcacaatgctgagaacatccagcccggggaacagaagtatgaatataagtcagatcagtggaagcctctaaacctagaggagaaaaaacgttacgaccgtgagttcctgcttggttttcagttcatctttgccagtatgcagaagccagagggattgccacatatcagtgacgtggtgctggacaaggccaataaaacaccactgcggccactggatcccactagactacaaggcataaattgtggcccagacttcactccatcctttgccaaccttggccggacaacccttagcacccgtgggcccccaaggggtgggccaggtggggagctgccccgtgggccggctggcctgggaccccggcgctctcagcagggaccccgaaaagaaccacgcaagatcattgccacagtgttaatgaccgaagatataaaactgaacaaagcagagaaagcctggaaacccagcagcaagcggacggcggctgataaggatcgaggggaagaagatgctgatggcagcaaaacccaggacctattccgcagggtgcgctccatcctgaataaactgacaccccagatgttccagcagctgatgaagcaagtgacgcagctggccatcgacaccgaggaacgcctcaaaggggtcattgacctcatttttgagaaggccatttcagagcccaacttctctgtggcctatgccaacatgtgccgctgcctcatggcgctgaaagtgcccactacggaaaagccaacagtgactgtgaacttccgaaagctgttgttgaatcgatgtcagaaggagtttgagaaagacaaagatgatgatgaggtttttgagaagaagcaaaaagagatggatgaagctgctacggcagaggaacgaggacgcctgaaggaagagctggaagaggctcgggacatagcccggcggcgctctttagggaatatcaagtttattggagagttgttcaaactgaagatgttaacagaggcaataatgcatgactgtgtggtcaaactgcttaagaaccatgatgaagagtcccttgagtgcctttgtcgtctgctcaccaccattggcaaagacctggactttgaaaaagccaagccccgaatggatcagtatttcaaccagatgg

SEQ ID NO: 131245 - DNA, 4668 bp, Homo sapiens
  Payload ID: 5621
  Gene Symbol: EIF4G1
  Gene Name: eukaryotic translation initiation factor 4 gamma, 1
  Uniprot ID: Q04637
  ENST ID: ENST00000435046
  CDS Start-End: 18-4229
atatcacagaggagatcatgtctggggcccgcactgcctccacacccacccctccccagacgggaggcggtctggagcctcaagctaatggggagacgccccaggttgctgtcattgtccggccagatgaccggtcacagggagcaatcattgctgaccggccagggctgcctggcccagagcatagcccttcagaatcccagccttcgtcgccttctccgaccccatcaccatccccagtcttggaaccggggtctgagcctaatctcgcagtcctctctattcctggggacactatgacaactatacaaatgtctgtagaagaatcaacccccatctcccgtgaaactggggagccatatcgcctctctccagaacccactcctctcgccgaacccatactggaagtagaagtgacacttagcaaaccggttccagaatctgagttttcttccagtcctctccaggctcccacccctttggcatctcacacagtggaaattcatgagcctaatggcatggtcccatctgaagatctggaaccagaggtggagtcaagcccagagcttgctcctcccccagcttgcccctccgaatcccctgtgcccattgctccaactgcccaacctgaggaactgctcaacggagccccctcgccaccagctgtggacttaagcccagtcagtgagccagaggagcaggccaaggaggtgacagcatcaatggcgccccccaccatcccctctgctactccagctacggctccttcagctacttccccagctcaggaggaggaaatggaagaagaagaagaagaggaagaaggagaagcaggagaagcaggagaagctgagagtgagaaaggaggagaggaactgctccccccagagagtacccctattccagccaacttgtctcagaatttggaggcagcagcagccactcaagtggcagtatctgtgccaaagaggagacggaaaattaaggagctaaataagaaggaggctgttggagaccttctggatgccttcaaggaggcgaacccggcagtaccagaggtggaaaatcagcctcctgcaggcagcaatccaggcccagagtctgagggcagtggtgtgcccccacgtcctgaggaagcagatgagacctgggactcaaaggaagacaaaattcacaatgctgagaacatccagcccggggaacagaagtatgaatataagtcagatcagtggaagcctctaaacctagaggagaaaaaacgttacgaccgtgagttcctgcttggttttcagttcatctttgccagtatgcagaagccagagggattgccacatatcagtgacgtggtgctggacaaggccaataaaacaccactgcggccactggatcccactagactacaaggcataaattgtggcccagacttcactccatcctttgccaaccttggccggacaacccttagcacccgtgggcccccaaggggtgggccaggtggggagctgccccgtgggccggctggcctgggaccccggcgctctcagcagggaccccgaaaagaaccacgcaagatcattgccacagtgttaatgaccgaagatataaaactgaacaaagcagagaaagcctggaaacccagcagcaagcggacggcggctgataaggatcgaggggaagaagatgctgatggcagcaaaacccaggacctattccgcagggtgcgctccatcctgaataaactgacaccccagatgttccagcagctgatgaagcaagtgacgcagctggccatcgacaccgaggaacgcctcaaaggggtcattgacctcatttttgagaaggccatttcagagcccaacttctctgtggcctatgccaacatgtgccgctgcctcatggcgctgaaagtgcccactacggaaaagccaacagtgactgtgaacttccgaaagctgttgttgaatcgatgtcagaaggagtttgagaaagacaaagatgatgatgaggtttttgagaagaagcaaaaagagatggatgaagctgctacggcagaggaacgaggacgcctgaaggaagagctggaagaggctcgggacatagcccggcggcgctctttagggaatatcaagtttattggagagttgttcaaactgaagatgttaacagaggcaataatgcatgactgtgtggtcaaactgcttaagaaccatgatgaagagtcccttgagtgcctttgtcgtctgctcaccaccattggcaaagacctggactttgaaaaagccaagccccgaatggatcagtatttcaaccagatggaaaaaatcattaaagaaaagaagacgtcatcccgcatccgctttatgctgcaggacgtgctggatctgcgagggagcaattgggtgccacgccgaggggatcagggtcccaagaccattgaccagatccataaggaggctgagatggaagaacatcgagagcacatcaaagtgcagcagctcatggccaagggcagtgacaagcgtcggggcggtcctccaggccctcccatcagccgtggacttccccttgtggatgatggtggctggaacacagttcccatcagcaaaggtagccgccccattgacacctcacgactcaccaagatcaccaagcctggctccatcgattctaacaaccagctctttgcacctggagggcgactgagctggggcaagggcagcagcggaggctcaggagccaagccctcagacgcagcatcagaagctgctcgcccagctactagtactttgaatcgcttctcagcccttcaacaagcggtacccacagaaagcacagataatagacgtgtggtgcagaggagtagcttgagccgagaacgaggcgagaaagctggagaccgaggagaccgcctagagcggagtgaacggggaggggaccgtggggaccggcttgatcgtgcgcggacacctgctaccaagcggagcttcagcaaggaagtggaggagcggagtagagaacggccctcccagcctgaggggctgcgcaaggcagctagcctcacggaggatcgggaccgtgggcgggatgccgtgaagcgagaagctgccctacccccagtgagccccctgaaggcggctctctctgaggaggagttagagaagaaatccaaggctatcattgaggaatatctccatctcaatgacatgaaagaggcagtccagtgcgtgcaggagctggcctcaccctccttgctcttcatctttgtacggcatggtgtcgagtctacgctggagcgcagtgccattgctcgtgagcatatggggcagctgctgcaccagctgctctgtgctgggcatctgtctactgctcagtactaccaagggttgtatgaaatcttggaattggctgaggacatggaaattgacatcccccacgtgtggctctacctagcggaactggtaacacccattctgcaggaaggtggggtgcccatgggggagctgttcagggagattacaaagcctctgagaccgttgggcaaagctgcttccctgttgctggagatcctgggcctcctgtgcaaaagcatgggtcctaaaaaggtggggacgctgtggcgagaagccgggcttagctggaaggaatttctacctgaaggccaggacattggtgcattcgtcgctgaacagaaggtggagtataccctgggagaggagtcggaagcccctggccagagggcactcccctccgaggagctgaacaggcagctggagaagctgctgaaggagggcagcagtaaccagcgggtgttcgactggatagaggccaacctgagtgagcagcagatagtatccaacacgttagttcgagccctcatgacggctgtctgctattctgcaattatttttgagactcccctccgagtggacgttgcagtgctgaaagcgcgagcgaagctgctgcagaaatacctgtgtgacgagcagaaggagctacaggcgctctacgccctccaggcccttgtagtgaccttagaacagcctcccaacctgctgcggatgttctttgacgcactgtatgacgaggacgtggtgaaggaggatgccttctacagttgggagagtagcaaggaccccgctgagcagcagggcaagggtgtggcccttaaatctgtcacagccttcttcaagtggctccgtgaagcagaggaggagtctgaccacaactgagggctggtggggccggggacctggagccccatggacacacagatggcccggctagccgcctggactgcaggggggcggcagcagcggcggtggcagtgggtgcctgtagtgtgatgtgtctgaactaataaagtggctgaagaggcaggatggcttggggctgcctgggcccccctccaggatgccgccaggtgtccctctcctccccctggggcacagagatatattatatataaagtcttgaaatttggtgtgtcttggggtggggaggggcaccaacgcctgcccctggggtccttttttttattttctgaaaatcactctcgggactgccgtcctcgctgctgggggcatatgccccagcccctgtaccacccctgctgttgcctgggcagggggaagggggggcacggtgcctgtaattattaaacatgaattc

SEQ ID NO: 131246 - DNA, 578 bp, Homo sapiens
  Payload ID: 5621
  Gene Symbol: EIF4G1
  Gene Name: eukaryotic translation initiation factor 4 gamma, 1
  ENST ID: ENST00000440448
  CDS Start-End: 148-578
gactacgtctgtgcggctgcgtggggctcggccgcgcggactgaaggagactgaaggccctcggatgcccagaacctgtaggccgcaccgtggacttgttcttaatcgagggggtgctggggggaccctgatgtggcaccaaatgaaatgaacaaagctccacagtccacaggccccccacccgccccatcccccggactcccacagccagcgtttcccccggggcagacagcgccggtggtgttcagtacgccacaagcgacacaaatgaacacgccttctcagccccgccagcacttctaccctagccgggcccagcccccgagcagtgcagcctcccgagtgcagagtgcagcccctgcccgccctggcccagctgcccatgtctaccctgctggatcccaagtaatgatgatcccttcccagatctcctacccagcctcccagggggcctactacatccctggacagtaccctgtgcagccaggagccccaggcttctatccaggtgcaagccctacagaatttgggacctacgctggcgcctactatccagcccaaggggtgcagcagtttcc

SEQ ID NO: 131247 - DNA, 558 bp, Homo sapiens
  Payload ID: 5621
  Gene Symbol: EIF4G1
  Gene Name: eukaryotic translation initiation factor 4 gamma, 1
  ENST ID: ENST00000444134
  CDS Start-End: 177-558
gccggctgcgcctgcggagaagcggtggccgccgagcgggatctgtgcggggagccggaaatggttgtggactacgtctgtgcggctgcgtggggctcggccgcgcggactgaaggagactgaagatccgaattcgagatccaaaccaaggaggaaaggatatcacagaggagatcatgtctggggcccgcactgcctccacacccacccctccccagacgggaggcggtctggagcctcaagctaatggggagacgccccaggttgctgtcattgtccggccagatgaccggtcacagggagcaatcattgctgaccggccagggctgcctggcccagagcatagcccttcagaatcccagccttcgtcgccttctccgaccccatcaccatccccagtcttggaaccggggtctgagcctaatctcgcagtcctctctattcctggggacactatgacaactatacaaatgtctgtagaagaatcaacccccatctcccgtgaaactggggagccatatcgcctctctccagaacccactcctctcgccgaaccca

SEQ ID NO: 131248 - DNA, 5038 bp, Homo sapiens
  Payload ID: 5621
  Gene Symbol: EIF4G1
  Gene Name: eukaryotic translation initiation factor 4 gamma, 1
  ENST ID: ENST00000427845
  CDS Start-End: 497-5038
tcacttgcctgaaaccggctcctcgacggccgccgcccgcctggccttttagggcctgactcccgcccttcctggcctacactcctgggcggcggcaggcctagcttctggcccagtgcgggttccccggcggcaggcgtatcctgtgtgcccctgggccaggcccgaacccggtgtccccgggtggggggtggggacgccacggccgaagcagctagctccgttcgtgatccgggagcctggtgccagcgagacctggaatttccggtctggttggtctggggccccgcggagccaggttgataccctcacctcccaaccccaggccctcggatgcccagaacctgtaggccgcaccgtggacttgttcttaatcgaggggcacttctaccctagccgggcccagcccccgagcagtgcagcctcccgagtgcagagtgcagcccctgcccgccctggcccagctgcccatgtctaccctgctggatcccaagtaatgatgatcccttcccagatctcctacccagcctcccagggggcctactacatccctggacaggggcgttccacatacgttgtcccgacacagcagtaccctgtgcagccaggagccccaggcttctatccaggtgcaagccctacagaatttgggacctacgctggcgcctactatccagcccaaggggtgcagcagtttcccactggcgtggcccccaccccagttttgatgaaccagccaccccagattgctcccaagagggagcgtaagacgatccgaattcgagatccaaaccaaggaggaaaggatatcacagaggagatcatgtctggggcccgcactgcctccacacccacccctccccagacgggaggcggtctggagcctcaagctaatggggagacgccccaggttgctgtcattgtccggccagatgaccggtcacagggagcaatcattgctgaccggccagggctgcctggcccagagcatagcccttcagaatcccagccttcgtcgccttctccgaccccatcaccatccccagtcttggaaccggggtctgagcctaatctcgcagtcctctctattcctggggacactatgacaactatacaaatgtctgtagaagaatcaacccccatctcccgtgaaactggggagccatatcgcctctctccagaacccactcctctcgccgaacccatactggaagtagaagtgacacttagcaaaccggttccagaatctgagttttcttccagtcctctccaggctcccacccctttggcatctcacacagtggaaattcatgagcctaatggcatggtcccatctgaagatctggaaccagaggtggagtcaagcccagagcttgctcctcccccagcttgcccctccgaatcccctgtgcccattgctccaactgcccaacctgaggaactgctcaacggagccccctcgccaccagctgtggacttaagcccagtcagtgagccagaggagcaggccaaggaggtgacagcatcaatggcgccccccaccatcccctctgctactccagctacggctccttcagctacttccccagctcaggaggaggaaatggaagaagaagaagaagaggaagaaggagaagcaggagaagcaggagaagctgagagtgagaaaggaggagaggaactgctccccccagagagtacccctattccagccaacttgtctcagaatttggaggcagcagcagccactcaagtggcagtatctgtgccaaagaggagacggaaaattaaggagctaaataagaaggaggctgttggagaccttctggatgccttcaaggaggcgaacccggcagtaccagaggtggaaaatcagcctcctgcaggcagcaatccaggcccagagtctgagggcagtggtgtgcccccacgtcctgaggaagcagatgagacctgggactcaaaggaagacaaaattcacaatgctgagaacatccagcccggggaacagaagtatgaatataagtcagatcagtggaagcctctaaacctagaggagaaaaaacgttacgaccgtgagttcctgcttggttttcagttcatctttgccagtatgcagaagccagagggattgccacatatcagtgacgtggtgctggacaaggccaataaaacaccactgcggccactggatcccactagactacaaggcataaattgtggcccagacttcactccatcctttgccaaccttggccggacaacccttagcacccgtgggcccccaaggggtgggccaggtggggagctgccccgtgggccgcaggctggcctgggaccccggcgctctcagcagggaccccgaaaagaaccacgcaagatcattgccacagtgttaatgaccgaagatataaaactgaacaaagcagagaaagcctggaaacccagcagcaagcggacggcggctgataaggatcgaggggaagaagatgctgatggcagcaaaacccaggacctattccgcagggtgcgctccatcctgaataaactgacaccccagatgttccagcagctgatgaagcaagtgacgcagctggccatcgacaccgaggaacgcctcaaaggggtcattgacctcatttttgagaaggccatttcagagcccaacttctctgtggcctatgccaacatgtgccgctgcctcatggcgctgaaagtgcccactacggaaaagccaacagtgactgtgaacttccgaaagctgttgttgaatcgatgtcagaaggagtttgagaaagacaaagatgatgatgaggtttttgagaagaagcaaaaagagatggatgaagctgctacggcagaggaacgaggacgcctgaaggaagagctggaagaggctcgggacatagcccggcggcgctctttagggaatatcaagtttattggagagttgttcaaactgaagatgttaacagaggcaataatgcatgactgtgtggtcaaactgcttaagaaccatgatgaagagtcccttgagtgcctttgtcgtctgctcaccaccattggcaaagacctggactttgaaaaagccaagccccgaatggatcagtatttcaaccagatggaaaaaatcattaaagaaaagaagacgtcatcccgcatccgctttatgctgcaggacgtgctggatctgcgagggagcaattgggtgccacgccgaggggatcagggtcccaagaccattgaccagatccataaggaggctgagatggaagaacatcgagagcacatcaaagtgcagcagctcatggccaagggcagtgacaagcgtcggggcggtcctccaggccctcccatcagccgtggacttccccttgtggatgatggtggctggaacacagttcccatcagcaaaggtagccgccccattgacacctcacgactcaccaagatcaccaagcctggctccatcgattctaacaaccagctctttgcacctggagggcgactgagctggggcaagggcagcagcggaggctcaggagccaagccctcagacgcagcatcagaagctgctcgcccagctactagtactttgaatcgcttctcagcccttcaacaagcggtacccacagaaagcacagataatagacgtgtggtgcagaggagtagcttgagccgagaacgaggcgagaaagctggagaccgaggagaccgcctagagcggagtgaacggggaggggaccgtggggaccggcttgatcgtgcgcggacacctgctaccaagcggagcttcagcaaggaagtggaggagcggagtagagaacggccctcccagcctgaggggctgcgcaaggcagctagcctcacggaggatcgggaccgtgggcgggatgccgtgaagcgagaagctgccctacccccagtgagccccctgaaggcggctctctctgaggaggagttagagaagaaatccaaggctatcattgaggaatatctccatctcaatgacatgaaagaggcagtccagtgcgtgcaggagctggcctcaccctccttgctcttcatctttgtacggcatggtgtcgagtctacgctggagcgcagtgccattgctcgtgagcatatggggcagctgctgcaccagctgctctgtgctgggcatctgtctactgctcagtactaccaagggttgtatgaaatcttggaattggctgaggacatggaaattgacatcccccacgtgtggctctacctagcggaactggtaacacccattctgcaggaaggtggggtgcccatgggggagctgttcagggagattacaaagcctctgagaccgttgggcaaagctgcttccctgttgctggagatcctgggcctcctgtgcaaaagcatgggtcctaaaaaggtggggacgctgtggcgagaagccgggcttagctggaaggaatttctacctgaaggccaggacattggtgcattcgtcgctgaacagaaggtggagtataccctgggagaggagtcggaagcccctggccagagggcactcccctccgaggagctgaacaggcagctggagaagctgctgaaggagggcagcagtaaccagcgggtgttcgactggatagaggccaacctgagtgagcagcagatagtatccaacacgttagttcgagccctcatgacggctgtctgctattctgcaattatttttgagactcccctccgagtggacgttgcagtgctgaaagcgcgagcgaagctgctgcagaaatacctgtgtgacgagcagaaggagctacaggcgctctacgccctccaggcccttgtagtgaccttagaacagcctcccaacctgctgcggatgttctttgacgcactgtatgacgaggacgtggtgaaggaggatgccttctacagttgggagagtagcaaggaccccgctgagcagcagggcaagggtgtggcccttaaatctgtcacagccttcttcaagtggctccgtgaagcagaggaggagtctgaccacaactga

SEQ ID NO: 131249 - DNA, 596 bp, Homo sapiens
  Payload ID: 5621
  Gene Symbol: EIF4G1
  Gene Name: eukaryotic translation initiation factor 4 gamma, 1
  ENST ID: ENST00000427607
  CDS Start-End: 108-596
gagctggggcagggactacgagagcagccagatgggctgaaagtggaactcaagggatccgaattcgagatccaaaccaaggaggaaaggatatcacagaggagatcatgtctggggcccgcactgcctccacacccacccctccccagacgggaggcggtctggagcctcaagctaatggggagacgccccaggttgctgtcattgtccggccagatgaccggtcacagggagcaatcattgctgaccggccagggctgcctggcccagagcatagcccttcagaatcccagccttcgtcgccttctccgaccccatcaccatccccagtcttggaaccggggtctgagcctaatctcgcagtcctctctattcctggggacactatgacaactatacaaatgtctgtagaagaatcaacccccatctcccgtgaaactggggagccatatcgcctctctccagaacccactcctctcgccgaacccatactggaagtagaagtgacacttagcaaaccggttccagaatctgagttttcttccagtcctctccaggctcccacccctttggcatctcacacagtggaaattcat

SEQ ID NO: 131250 - DNA, 730 bp, Homo sapiens
  Payload ID: 5621
  Gene Symbol: EIF4G1
  Gene Name: eukaryotic translation initiation factor 4 gamma, 1
  ENST ID: ENST00000427141
  CDS Start-End: 455-730
gcggactgaaggagactgaaggccctcggatgcccagaacctgtaggccgcaccgtggacttgttcttaatcgagggggtgctggggggaccctgatgtggcaccaaatgaaatgaacaaagctccacagtccacaggccccccacccgccccatcccccggactcccacagcttgggtttctgccccacctgggcttcccctcttgctgaactctggtctcccctcttcagccagcgtttcccccggggcagacagcgccggtggtgttcagtacgccacaagcgacacaaatgaacacgccttctcagccccgccagggaggattcaggtctctgcagcacttctaccctagccgggcccagcccccgagcagtgcagcctcccgagtgcagagtgcagcccctgcccgccctggcccagctgcccatgtctaccctgctggatcccaagtaatgatgatcccttcccagatctcctacccagcctcccagggggcctactacatccctggacaggggcgttccacatacgttgtcccgacacagcagtaccctgtgcagccaggagccccaggcttctatccaggtgcaagccctacagaatttgggacctacgctggcgcctactatccagcccaaggggtgcagcagtttcccactggcgtggcccccaccccagttttgatgaaccagccaccccagattgctcccaagagggagcgtaagacg

SEQ ID NO: 131251 - DNA, 524 bp, Homo sapiens
  Payload ID: 5621
  Gene Symbol: EIF4G1
  Gene Name: eukaryotic translation initiation factor 4 gamma, 1
  ENST ID: ENST00000428387
  CDS Start-End: 94-524
agtgagccgattgggttctagatgggggtcctgggccccaggatccgaattcgagatccaaaccaaggaggaaaggatatcacagaggagatcatgtctggggcccgcactgcctccacacccacccctccccagacgggaggcggtctggagcctcaagctaatggggagacgccccaggttgctgtcattgtccggccagatgaccggtcacagggagcaatcattgctgaccggccagggctgcctggcccagagcatagcccttcagaatcccagccttcgtcgccttctccgaccccatcaccatccccagtcttggaaccggggtctgagcctaatctcgcagtcctctctattcctggggacactatgacaactatacaaatgtctgtagaagaatcaacccccatctcccgtgaaactggggagccatatcgcctctctccagaacccactcctctcgccgaacccatactggaagtagaagtgacacttagcaaaccggttccagaatctgagtt

SEQ ID NO: 131252 - DNA, 5026 bp, Homo sapiens
  Payload ID: 5621
  Gene Symbol: EIF4G1
  Gene Name: eukaryotic translation initiation factor 4 gamma, 1
  Uniprot ID: Q04637
  ENST ID: ENST00000434061
  CDS Start-End: 369-4583
tctagatgggggtcctgggccccagggtgtgcagccactgacttggggactgctggtggggtagggatgagggagggaggggcattgtgatgtacagggctgctctgtgagatcaagggtctcttaagggtgggagctggggcagggactacgagagcagccagatgggctgaaagtggaactcaaggggtttctggcacctacctacctgcttcccgctggggggtggggagttggcccagagtcttaagattggggcagggtggagaggtgggctcttcctgcttcccactcatcttatagctttctttccccagatccgaattcgagatccaaaccaaggaggaaaggatatcacagaggagatcatgtctggggcccgcactgcctccacacccacccctccccagacgggaggcggtctggagcctcaagctaatggggagacgccccaggttgctgtcattgtccggccagatgaccggtcacagggagcaatcattgctgaccggccagggctgcctggcccagagcatagcccttcagaatcccagccttcgtcgccttctccgaccccatcaccatccccagtcttggaaccggggtctgagcctaatctcgcagtcctctctattcctggggacactatgacaactatacaaatgtctgtagaagaatcaacccccatctcccgtgaaactggggagccatatcgcctctctccagaacccactcctctcgccgaacccatactggaagtagaagtgacacttagcaaaccggttccagaatctgagttttcttccagtcctctccaggctcccacccctttggcatctcacacagtggaaattcatgagcctaatggcatggtcccatctgaagatctggaaccagaggtggagtcaagcccagagcttgctcctcccccagcttgcccctccgaatcccctgtgcccattgctccaactgcccaacctgaggaactgctcaacggagccccctcgccaccagctgtggacttaagcccagtcagtgagccagaggagcaggccaaggaggtgacagcatcaatggcgccccccaccatcccctctgctactccagctacggctccttcagctacttccccagctcaggaggaggaaatggaagaagaagaagaagaggaagaaggagaagcaggagaagcaggagaagctgagagtgagaaaggaggagaggaactgctccccccagagagtacccctattccagccaacttgtctcagaatttggaggcagcagcagccactcaagtggcagtatctgtgccaaagaggagacggaaaattaaggagctaaataagaaggaggctgttggagaccttctggatgccttcaaggaggcgaacccggcagtaccagaggtggaaaatcagcctcctgcaggcagcaatccaggcccagagtctgagggcagtggtgtgcccccacgtcctgaggaagcagatgagacctgggactcaaaggaagacaaaattcacaatgctgagaacatccagcccggggaacagaagtatgaatataagtcagatcagtggaagcctctaaacctagaggagaaaaaacgttacgaccgtgagttcctgcttggttttcagttcatctttgccagtatgcagaagccagagggattgccacatatcagtgacgtggtgctggacaaggccaataaaacaccactgcggccactggatcccactagactacaaggcataaattgtggcccagacttcactccatcctttgccaaccttggccggacaacccttagcacccgtgggcccccaaggggtgggccaggtggggagctgccccgtgggccgcaggctggcctgggaccccggcgctctcagcagggaccccgaaaagaaccacgcaagatcattgccacagtgttaatgaccgaagatataaaactgaacaaagcagagaaagcctggaaacccagcagcaagcggacggcggctgataaggatcgaggggaagaagatgctgatggcagcaaaacccaggacctattccgcagggtgcgctccatcctgaataaactgacaccccagatgttccagcagctgatgaagcaagtgacgcagctggccatcgacaccgaggaacgcctcaaaggggtcattgacctcatttttgagaaggccatttcagagcccaacttctctgtggcctatgccaacatgtgccgctgcctcatggcgctgaaagtgcccactacggaaaagccaacagtgactgtgaacttccgaaagctgttgttgaatcgatgtcagaaggagtttgagaaagacaaagatgatgatgaggtttttgagaagaagcaaaaagagatggatgaagctgctacggcagaggaacgaggacgcctgaaggaagagctggaagaggctcgggacatagcccggcggcgctctttagggaatatcaagtttattggagagttgttcaaactgaagatgttaacagaggcaataatgcatgactgtgtggtcaaactgcttaagaaccatgatgaagagtcccttgagtgcctttgtcgtctgctcaccaccattggcaaagacctggactttgaaaaagccaagccccgaatggatcagtatttcaaccagatggaaaaaatcattaaagaaaagaagacgtcatcccgcatccgctttatgctgcaggacgtgctggatctgcgagggagcaattgggtgccacgccgaggggatcagggtcccaagaccattgaccagatccataaggaggctgagatggaagaacatcgagagcacatcaaagtgcagcagctcatggccaagggcagtgacaagcgtcggggcggtcctccaggccctcccatcagccgtggacttccccttgtggatgatggtggctggaacacagttcccatcagcaaaggtagccgccccattgacacctcacgactcaccaagatcaccaagcctggctccatcgattctaacaaccagctctttgcacctggagggcgactgagctggggcaagggcagcagcggaggctcaggagccaagccctcagacgcagcatcagaagctgctcgcccagctactagtactttgaatcgcttctcagcccttcaacaagcggtacccacagaaagcacagataatagacgtgtggtgcagaggagtagcttgagccgagaacgaggcgagaaagctggagaccgaggagaccgcctagagcggagtgaacggggaggggaccgtggggaccggcttgatcgtgcgcggacacctgctaccaagcggagcttcagcaaggaagtggaggagcggagtagagaacggccctcccagcctgaggggctgcgcaaggcagctagcctcacggaggatcgggaccgtgggcgggatgccgtgaagcgagaagctgccctacccccagtgagccccctgaaggcggctctctctgaggaggagttagagaagaaatccaaggctatcattgaggaatatctccatctcaatgacatgaaagaggcagtccagtgcgtgcaggagctggcctcaccctccttgctcttcatctttgtacggcatggtgtcgagtctacgctggagcgcagtgccattgctcgtgagcatatggggcagctgctgcaccagctgctctgtgctgggcatctgtctactgctcagtactaccaagggttgtatgaaatcttggaattggctgaggacatggaaattgacatcccccacgtgtggctctacctagcggaactggtaacacccattctgcaggaaggtggggtgcccatgggggagctgttcagggagattacaaagcctctgagaccgttgggcaaagctgcttccctgttgctggagatcctgggcctcctgtgcaaaagcatgggtcctaaaaaggtggggacgctgtggcgagaagccgggcttagctggaaggaatttctacctgaaggccaggacattggtgcattcgtcgctgaacagaaggtggagtataccctgggagaggagtcggaagcccctggccagagggcactcccctccgaggagctgaacaggcagctggagaagctgctgaaggagggcagcagtaaccagcgggtgttcgactggatagaggccaacctgagtgagcagcagatagtatccaacacgttagttcgagccctcatgacggctgtctgctattctgcaattatttttgagactcccctccgagtggacgttgcagtgctgaaagcgcgagcgaagctgctgcagaaatacctgtgtgacgagcagaaggagctacaggcgctctacgccctccaggcccttgtagtgaccttagaacagcctcccaacctgctgcggatgttctttgacgcactgtatgacgaggacgtggtgaaggaggatgccttctacagttgggagagtagcaaggaccccgctgagcagcagggcaagggtgtggcccttaaatctgtcacagccttcttcaagtggctccgtgaagcagaggaggagtctgaccacaactgagggctggtggggccggggacctggagccccatggacacacagatggcccggctagccgcctggactgcaggggggcggcagcagcggcggtggcagtgggtgcctgtagtgtgatgtgtctgaactaataaagtggctgaagaggcaggatggcttggggctgcctgggcccccctccaggatgccgccaggtgtccctctcctccccctggggcacagagatatattatatataaagtcttgaaatttggtgtgtcttggggtggggaggggcaccaacgcctgcccctggggtccttttttttattttctgaaaatcactctcgggactgccgtcctcgctgctgggggcatatgccccagcccctgtaccacccctgctgttgcctgggcagggggaagggggggcacggtgcctgtaattattaaacatgaattcaatt

SEQ ID NO: 131253 - DNA, 2755 bp, Homo sapiens
  Payload ID: 5621
  Gene Symbol: EIF4G1
  Gene Name: eukaryotic translation initiation factor 4 gamma, 1
  ENST ID: ENST00000421110
  CDS Start-End: 148-2755
tgcggagaagcggtggccgccgagcgggatctgtgcggggagccggaaatggttgtggactacgtctgtgcggctgcgtggggctcggccgcgcggactgaaggagactgaaggtgctggggggaccctgatgtggcaccaaatgaaatgaacaaagctccacagtccacaggccccccacccgccccatcccccggactcccacagccagcgtttcccccggggcagacagcgccggtggtgttcagtacgccacaagcgacacaaatgaacacgccttctcagccccgccagggaggattcaggtctctgcagcacttctaccctagccgggcccagcccccgagcagtgcagcctcccgagtgcagagtgcagcccctgcccgccctggcccagctgcccatgtctaccctgctggatcccaagtaatgatgatcccttcccagatctcctacccagcctcccagggggcctactacatccctggacaggggcgttccacatacgttgtcccgacacagcagtaccctgtgcagccaggagccccaggcttctatccaggtgcaagccctacagaatttgggacctacgctggcgcctactatccagcccaaggggtgcagcagtttcccactggcgtggcccccaccccagttttgatgaaccagccaccccagattgctcccaagagggagcgtaagacgatccgaattcgagatccaaaccaaggaggaaaggatatcacagaggagatcatgtctggggcccgcactgcctccacacccacccctccccagacgggaggcggtctggagcctcaagctaatggggagacgccccaggttgctgtcattgtccggccagatgaccggtcacagggagcaatcattgctgaccggccagggctgcctggcccagagcatagcccttcagaatcccagccttcgtcgccttctccgaccccatcaccatccccagtcttggaaccggggtctgagcctaatctcgcagtcctctctattcctggggacactatgacaactatacaaatgtctgtagaagaatcaacccccatctcccgtgaaactggggagccatatcgcctctctccagaacccactcctctcgccgaacccatactggaagtagaagtgacacttagcaaaccggttccagaatctgagttttcttccagtcctctccaggctcccacccctttggcatctcacacagtggaaattcatgagcctaatggcatggtcccatctgaagatctggaaccagaggtggagtcaagcccagagcttgctcctcccccagcttgcccctccgaatcccctgtgcccattgctccaactgcccaacctgaggaactgctcaacggagccccctcgccaccagctgtggacttaagcccagtcagtgagccagaggagcaggccaaggaggtgacagcatcaatggcgccccccaccatcccctctgctactccagctacggctccttcagctacttccccagctcaggaggaggaaatggaagaagaagaagaagaggaagaaggagaagcaggagaagcaggagaagctgagagtgagaaaggaggagaggaactgctccccccagagagtacccctattccagccaacttgtctcagaatttggaggcagcagcagccactcaagtggcagtatctgtgccaaagaggagacggaaaattaaggagctaaataagaaggaggctgttggagaccttctggatgccttcaaggaggcgaacccggcagtaccagaggtggaaaatcagcctcctgcaggcagcaatccaggcccagagtctgagggcagtggtgtgcccccacgtcctgaggaagcagatgagacctgggactcaaaggaagacaaaattcacaatgctgagaacatccagcccggggaacagaagtatgaatataagtcagatcagtggaagcctctaaacctagaggagaaaaaacgttacgaccgtgagttcctgcttggttttcagttcatctttgccagtatgcagaagccagagggattgccacatatcagtgacgtggtgctggacaaggccaataaaacaccactgcggccactggatcccactagactacaaggcataaattgtggcccagacttcactccatcctttgccaaccttggccggacaacccttagcacccgtgggcccccaaggggtgggccaggtggggagctgccccgtgggccgcaggctggcctgggaccccggcgctctcagcagggaccccgaaaagaaccacgcaagatcattgccacagtgttaatgaccgaagatataaaactgaacaaagcagagaaagcctggaaacccagcagcaagcggacggcggctgataaggatcgaggggaagaagatgctgatggcagcaaaacccaggacctattccgcagggtgcgctccatcctgaataaactgacaccccagatgttccagcagctgatgaagcaagtgacgcagctggccatcgacaccgaggaacgcctcaaaggggtcattgacctcatttttgagaaggccatttcagagcccaacttctctgtggcctatgccaacatgtgccgctgcctcatggcgctgaaagtgcccactacggaaaagccaacagtgactgtgaacttccgaaagctgttgttgaatcgatgtcagaaggagtttgagaaagacaaagatgatgatgaggtttttg

SEQ ID NO: 131254 - DNA, 542 bp, Homo sapiens
  Payload ID: 5621
  Gene Symbol: EIF4G1
  Gene Name: eukaryotic translation initiation factor 4 gamma, 1
  ENST ID: ENST00000455679
  CDS Start-End: 282-542
aaatggttgtggactacgtctgtgcggctgcgtggggctcggccgcgcggactgaaggagactgaaggtgctggggggaccctgatgtggcaccaaatgaaatgaacaaagctccacagtccacaggccccccacccgccccatcccccggactcccacagcttgggtttctgccccacctgggcttcccctcttgctgaactctggtctcccctcttcagccagcgtttcccccggggcagacagcgccggtggtgttcagtacgccacaagcgacacaaatgaacacgccttctcagccccgccagcacttctaccctagccgggcccagcccccgagcagtgcagcctcccgagtgcagagtgcagcccctgcccgccctggcccagctgcccatgtctaccctgctggatcccaagtaatgatgatcccttcccagatctcctacccagcctcccagggggcctactacatccctggacaggggcgttccacatacgttgtcccgacacagcagtaccctgtgcagccaggagcccca

SEQ ID NO: 131255 - DNA, 694 bp, Homo sapiens
  Payload ID: 5621
  Gene Symbol: EIF4G1
  Gene Name: eukaryotic translation initiation factor 4 gamma, 1
  ENST ID: ENST00000456033
  CDS Start-End: 215-694
gtgctggggggaccctgatgtggcaccaaatgaaatgaacaaagctccacagtccacaggccccccacccgccccatcccccggactcccacagcttgggtttctgccccacctgggcttcccctcttgctgaactctggtctcccctcttcagccagcgtttcccccggggcagacagcgccggtggtgttcagtacgccacaagcgacacaaatgaacacgccttctcagccccgccagcacttctaccctagccgggcccagcccccgagcagtgcagcctcccgagtgcagagtgcagcccctgcccgccctggcccagctgcccatgtctaccctgctggatcccaagtaatgatgatcccttcccagatctcctacccagcctcccagggggcctactacatccctggacagcagtaccctgtgcagccaggagccccaggcttctatccaggtgcaagccctacagaatttgggacctacgctggcgcctactatccagcccaaggggtgcagcagtttcccactggcgtggcccccaccccagttttgatgaaccagccaccccagattgctcccaagagggagcgtaagacgatccgaattcgagatccaaaccaaggaggaaaggatatcacagaggagatcatgtctggggcccgcactgcctccacacccacccctccccag

SEQ ID NO: 131256 - DNA, 5653 bp, Homo sapiens
  Payload ID: 5621
  Gene Symbol: EIF4G1
  Gene Name: eukaryotic translation initiation factor 4 gamma, 1
  Uniprot ID: Q04637
  ENST ID: ENST00000424196
  CDS Start-End: 390-5210
gccagcgagacctggaatttccggtctggttggtctggggccccgcggagccaggttgataccctcacctcccaaccccaggccctcggatgcccagaacctgtaggccgcaccgtggacttgttcttaatcgagggggtgagtgaggggtctgtttcagtaggtcaggggttggttggaagtgatgcgggtttgacagcatgttggtggggacaggctgtatcttttctgcttcaccctcttggcatctctgggactccgtatgggacccagcccttgcatcaaccctttcaccgccccatttgccttaagcttgggtcccttcctcttcctgagcgccactctttcccaacaggtgctggggggaccctgatgtggcaccaaatgaaatgaacaaagctccacagtccacaggccccccacccgccccatcccccggactcccacagccagcgtttcccccggggcagacagcgccggtggtgttcagtacgccacaagcgacacaaatgaacacgccttctcagccccgccagggaggattcaggtctctgcagcacttctaccctagccgggcccagcccccgagcagtgcagcctcccgagtgcagagtgcagcccctgcccgccctggcccagctgcccatgtctaccctgctggatcccaagtaatgatgatcccttcccagatctcctacccagcctcccagggggcctactacatccctggacaggggcgttccacatacgttgtcccgacacagcagtaccctgtgcagccaggagccccaggcttctatccaggtgcaagccctacagaatttgggacctacgctggcgcctactatccagcccaaggggtgcagcagtttcccactggcgtggcccccaccccagttttgatgaaccagccaccccagattgctcccaagagggagcgtaagacgatccgaattcgagatccaaaccaaggaggaaaggatatcacagaggagatcatgtctggggcccgcactgcctccacacccacccctccccagacgggaggcggtctggagcctcaagctaatggggagacgccccaggttgctgtcattgtccggccagatgaccggtcacagggagcaatcattgctgaccggccagggctgcctggcccagagcatagcccttcagaatcccagccttcgtcgccttctccgaccccatcaccatccccagtcttggaaccggggtctgagcctaatctcgcagtcctctctattcctggggacactatgacaactatacaaatgtctgtagaagaatcaacccccatctcccgtgaaactggggagccatatcgcctctctccagaacccactcctctcgccgaacccatactggaagtagaagtgacacttagcaaaccggttccagaatctgagttttcttccagtcctctccaggctcccacccctttggcatctcacacagtggaaattcatgagcctaatggcatggtcccatctgaagatctggaaccagaggtggagtcaagcccagagcttgctcctcccccagcttgcccctccgaatcccctgtgcccattgctccaactgcccaacctgaggaactgctcaacggagccccctcgccaccagctgtggacttaagcccagtcagtgagccagaggagcaggccaaggaggtgacagcatcaatggcgccccccaccatcccctctgctactccagctacggctccttcagctacttccccagctcaggaggaggaaatggaagaagaagaagaagaggaagaaggagaagcaggagaagcaggagaagctgagagtgagaaaggaggagaggaactgctccccccagagagtacccctattccagccaacttgtctcagaatttggaggcagcagcagccactcaagtggcagtatctgtgccaaagaggagacggaaaattaaggagctaaataagaaggaggctgttggagaccttctggatgccttcaaggaggcgaacccggcagtaccagaggtggaaaatcagcctcctgcaggcagcaatccaggcccagagtctgagggcagtggtgtgcccccacgtcctgaggaagcagatgagacctgggactcaaaggaagacaaaattcacaatgctgagaacatccagcccggggaacagaagtatgaatataagtcagatcagtggaagcctctaaacctagaggagaaaaaacgttacgaccgtgagttcctgcttggttttcagttcatctttgccagtatgcagaagccagagggattgccacatatcagtgacgtggtgctggacaaggccaataaaacaccactgcggccactggatcccactagactacaaggcataaattgtggcccagacttcactccatcctttgccaaccttggccggacaacccttagcacccgtgggcccccaaggggtgggccaggtggggagctgccccgtgggccggctggcctgggaccccggcgctctcagcagggaccccgaaaagaaccacgcaagatcattgccacagtgttaatgaccgaagatataaaactgaacaaagcagagaaagcctggaaacccagcagcaagcggacggcggctgataaggatcgaggggaagaagatgctgatggcagcaaaacccaggacctattccgcagggtgcgctccatcctgaataaactgacaccccagatgttccagcagctgatgaagcaagtgacgcagctggccatcgacaccgaggaacgcctcaaaggggtcattgacctcatttttgagaaggccatttcagagcccaacttctctgtggcctatgccaacatgtgccgctgcctcatggcgctgaaagtgcccactacggaaaagccaacagtgactgtgaacttccgaaagctgttgttgaatcgatgtcagaaggagtttgagaaagacaaagatgatgatgaggtttttgagaagaagcaaaaagagatggatgaagctgctacggcagaggaacgaggacgcctgaaggaagagctggaagaggctcgggacatagcccggcggcgctctttagggaatatcaagtttattggagagttgttcaaactgaagatgttaacagaggcaataatgcatgactgtgtggtcaaactgcttaagaaccatgatgaagagtcccttgagtgcctttgtcgtctgctcaccaccattggcaaagacctggactttgaaaaagccaagccccgaatggatcagtatttcaaccagatggaaaaaatcattaaagaaaagaagacgtcatcccgcatccgctttatgctgcaggacgtgctggatctgcgagggagcaattgggtgccacgccgaggggatcagggtcccaagaccattgaccagatccataaggaggctgagatggaagaacatcgagagcacatcaaagtgcagcagctcatggccaagggcagtgacaagcgtcggggcggtcctccaggccctcccatcagccgtggacttccccttgtggatgatggtggctggaacacagttcccatcagcaaaggtagccgccccattgacacctcacgactcaccaagatcaccaagcctggctccatcgattctaacaaccagctctttgcacctggagggcgactgagctggggcaagggcagcagcggaggctcaggagccaagccctcagacgcagcatcagaagctgctcgcccagctactagtactttgaatcgcttctcagcccttcaacaagcggtacccacagaaagcacagataatagacgtgtggtgcagaggagtagcttgagccgagaacgaggcgagaaagctggagaccgaggagaccgcctagagcggagtgaacggggaggggaccgtggggaccggcttgatcgtgcgcggacacctgctaccaagcggagcttcagcaaggaagtggaggagcggagtagagaacggccctcccagcctgaggggctgcgcaaggcagctagcctcacggaggatcgggaccgtgggcgggatgccgtgaagcgagaagctgccctacccccagtgagccccctgaaggcggctctctctgaggaggagttagagaagaaatccaaggctatcattgaggaatatctccatctcaatgacatgaaagaggcagtccagtgcgtgcaggagctggcctcaccctccttgctcttcatctttgtacggcatggtgtcgagtctacgctggagcgcagtgccattgctcgtgagcatatggggcagctgctgcaccagctgctctgtgctgggcatctgtctactgctcagtactaccaagggttgtatgaaatcttggaattggctgaggacatggaaattgacatcccccacgtgtggctctacctagcggaactggtaacacccattctgcaggaaggtggggtgcccatgggggagctgttcagggagattacaaagcctctgagaccgttgggcaaagctgcttccctgttgctggagatcctgggcctcctgtgcaaaagcatgggtcctaaaaaggtggggacgctgtggcgagaagccgggcttagctggaaggaatttctacctgaaggccaggacattggtgcattcgtcgctgaacagaaggtggagtataccctgggagaggagtcggaagcccctggccagagggcactcccctccgaggagctgaacaggcagctggagaagctgctgaaggagggcagcagtaaccagcgggtgttcgactggatagaggccaacctgagtgagcagcagatagtatccaacacgttagttcgagccctcatgacggctgtctgctattctgcaattatttttgagactcccctccgagtggacgttgcagtgctgaaagcgcgagcgaagctgctgcagaaatacctgtgtgacgagcagaaggagctacaggcgctctacgccctccaggcccttgtagtgaccttagaacagcctcccaacctgctgcggatgttctttgacgcactgtatgacgaggacgtggtgaaggaggatgccttctacagttgggagagtagcaaggaccccgctgagcagcagggcaagggtgtggcccttaaatctgtcacagccttcttcaagtggctccgtgaagcagaggaggagtctgaccacaactgagggctggtggggccggggacctggagccccatggacacacagatggcccggctagccgcctggactgcaggggggcggcagcagcggcggtggcagtgggtgcctgtagtgtgatgtgtctgaactaataaagtggctgaagaggcaggatggcttggggctgcctgggcccccctccaggatgccgccaggtgtccctctcctccccctggggcacagagatatattatatataaagtcttgaaatttggtgtgtcttggggtggggaggggcaccaacgcctgcccctggggtccttttttttattttctgaaaatcactctcgggactgccgtcctcgctgctgggggcatatgccccagcccctgtaccacccctgctgttgcctgggcagggggaagggggggcacggtgcctgtaattattaaacatgaattcaatt

SEQ ID NO: 131257 - DNA, 3978 bp, Homo sapiens
  Payload ID: 5622
  Gene Symbol: EIF4G2
  Gene Name: eukaryotic translation initiation factor 4 gamma, 2
  Uniprot ID: P78344
  ENST ID: ENST00000339995
  CDS Start-End: 493-3216
gcgcactgcggcggggctgcgccgcaaccgagctcagccctgtggctcctcctcgctgccctgcgcggattggtggcagacggcaaccgggccgctgattgggcggcgaaggagccattcggggagactctggtgggttcggctgccccaagagtgataagttcggcttcagacacgccttagcgccagcagtgagtcggagctctatggaggtggcagcgggtaccgagtggcggctgcagcagcgactcctctgagctgagtttgaggccgtccccgactccttcctcccccttccctcccccttttttttgttttccgttcccctttcccctcccttccctatccccgacgaccggatcctgaggaggcagctgcggtggcagctgctgagttctcggtgaaggtatttcatttctcctgtcccctcccctccccaccccatctattaatattattcttttgaagattcttcgttgtcaagccgccaaagtggagagtgcgattgcagaagggggtgcttctcgtttcagtgcttcttcgggcggaggaggaagtaggggtgcacctcagcactatcccaagactgctggcaacagcgagttcctggggaaaaccccagggcaaaacgctcagaaatggattcctgcacgaagcactagacgagatgacaactccgcagcaaacaactccgcaaacgaaaaagaacgacatgatgcaatcttcaggaaagtaagaggcatactaaataagcttactcctgaaaagtttgacaagctatgccttgagctcctcaatgtgggtgtagagtctaaactcatccttaaaggggtcatactgctgattgtggacaaagccctagaagagccaaagtatagctcactgtatgctcagctatgtctgcgattggcagaagatgcaccaaactttgatggcccagcagcagagggtcaaccaggacagaagcaaagcaccacattcagacgcctcctaatttccaaattacaagatgaatttgaaaaccgaactagaaatgttgatgtctatgataagcgtgaaaatcccctcctccccgaggaggaggaacagagagccattgctaagatcaagatgttgggaaacatcaaattcattggagagcttggcaagcttgatcttattcacgaatctatccttcataagtgcatcaaaacacttttggaaaagaagaagagagtccaactcaaagatatgggagaggatttggagtgcctctgtcagataatgaggacagtgggacctagattagaccatgaacgagccaagtccttaatggatcagtactttgcccgaatgtgctccttgatgttaagtaaggaattgccagcaaggattcgtttcctgctgcaggataccgtagagttgcgagaacaccattgggttcctcgcaaggcttttcttgacaatggaccaaagacgatcaatcaaattcgtcaagatgcagtaaaagatctaggggtgtttattcctgctcctatggctcaagggatgagaagtgacttctttctggagggaccgttcatgccacccaggatgaaaatggatagggacccacttggaggacttgctgatatgtttggacaaatgccaggtagcggaattggtactggtccaggagttatccaggatagattttcacccaccatgggacgtcatcgttcaaatcaactcttcaatggccatgggggacacatcatgcctcccacacaatcgcagtttggagagatgggaggcaagtttatgaaaagccaggggctaagccagctctaccataaccagagtcagggactcttatcccagctgcaaggacagtcgaaggatatgccacctcggttttctaagaaaggacagcttaatgcagatgagattagcctgaggcctgctcagtcgttcctaatgaataaaaatcaagtgccaaagcttcagccccagataactatgattcctcctagtgcacaaccaccacgcactcaaacaccacctctgggacagacacctcagcttggtctcaaaactaatccaccgcttatccaggaaaagcctgccaagaccagcaaaaagccaccaccgtcaaaggaagaactccttaaactaactgaaactgttgtgactgaatatctaaatagtggaaatgcaaatgaggctgtcaatggtgtaagagaaatgagggctcctaaacactttcttcctgagatgttaagcaaagtaatcatcctgtcactagatagaagcgatgaagataaagaaaaagcaagttctttgatcagtttactcaaacaggaagggatagccacaagtgacaacttcatgcaggctttcctgaatgtattggaccagtgtcccaaactggaggttgacatccctttggtgaaatcctatttagcacagtttgcagctcgtgccatcatttcagagctggtgagcatttcagaactagctcaaccactagaaagtggcacccattttcctctcttcctactttgtcttcagcagttagctaaattacaagatcgagaatggttaacagaactttttcaacaaagcaaggtcaatatgcagaaaatgctcccagaaattgatcagaataaggaccgcatgttggagattttggaaggaaagggactgagtttcttattcccactcctcaaattggagaaggaactgttgaagcaaataaagttggatccatcccctcaaaccatatataaatggattaaagataacatctctcccaaacttcatgtagataaaggatttgtgaacatcttaatgactagcttcttacagtacatttctagtgaagtaaacccccccagcgatgaaacagattcatcctctgctccttccaaagaacagttagagcaggaaaaacaactactactatctttcaagccagtaatgcagaaatttcttcatgatcacgttgatctacaagtcagtgccctgtatgctctccaggtgcactgctataacagcaacttcccaaaaggcatgttacttcgcttttttgtgcacttctatgacatggaaattattgaagaagaagctttcttggcttggaaagaagatataacccaagagtttccgggaaaaggcaaggctttgttccaggtgaatcagtggctaacctggttagaaactgctgaagaagaagaatcagaggaagaagctgactaaagaaccagccaaagccttaaattgtgcaaaacatactgttgctatgatgtaactgcatttgacctaaccactgcgaaaattcattccgctgtaatgttttcacaatatttaaagcagaagcacgtcagttaggatttccttctgcataaggtttttttgtagtgtaatgtcttaatcatagtctaccatcaaatattttaggagtatctttaatgtttagatagtatattagcagcatgcaataattacatcataagttctcaagcagaggcagtctattgcaaggaccttctttgctgccagttatcataggctgttttaagttagaaaactgaatagcaacactgaatactgtagaaatgcactttgctcagtaatacttgagttgttgcaatatttgattatccatttggttgttacagaaaaattcttaactgtaattgatggttgttgccgtaatagtatattgcctgtatttctacctctagtaatgggctttatgtgctagattttaatatccttgagcctgggcaagtgcacaagtctttttaaaagaaacatggtttacttgcacaaaactgatcagttttgagagatcgttaatgcccttgaagtggtttttgtgggtgtgaaacaaatggtgagaatttgaattggtccctcctattatagtattgaaattaagtctacttaatttatcaagtcatgttcatgccctgattttatatacttgtatctatcaataaacattgtgatacttga

SEQ ID NO: 131258 - DNA, 3346 bp, Homo sapiens
  Payload ID: 5622
  Gene Symbol: EIF4G2
  Gene Name: eukaryotic translation initiation factor 4 gamma, 2
  ENST ID: ENST00000396525
  CDS Start-End: 91-2700
gaaggtatttcatttctcctgtcccctcccctccccaccccatctattaatattattcttttgaagattcttcgttgtcaagccgccaaagtggagagtgcgattgcagaagggggtgcttctcgtttcagtgcttcttcgggcggaggaggaagtaggggtgcacctcagcactatcccaagactgctggcaacagcgagttcctggggaaaaccccagggcaaaacgctcagaaatggattcctgcacgaagcactagacgagatgacaactccgcagcaaacaactccgcaaacgaaaaagaacgacatgatgcaatcttcaggaaagtaagaggcatactaaataagcttactcctgaaaagtttgacaagctatgccttgagctcctcaatgtgggtgtagagtctaaactcatccttaaaggggtcatactgctgattgtggacaaagccctagaagagccaaagtatagctcactgtatgctcagctatgtctgcgattggcagaagatgcaccaaactttgatggcccagcagcagagggtcaaccaggacagaagcaaagcaccacattcagacgcctcctaatttccaaattacaagatgaatttgaaaaccgaactagaaatgttgatgtctatgataagcgtgaaaatcccctcctccccgaggaggaggaacagagagccattgctaagatcaagatgttgggaaacatcaaattcattggagagcttggcaagcttgatcttattcacgaatctatccttcataagtgcatcaaaacacttttggaaaagaagaagagagtccaactcaaagatatgggagaggatttggagtgcctctgtcagataatgaggacagtgggacctagattagaccatgaacgagccaagtccttaatggatcagtactttgcccgaatgtgctccttgatgttaagtaaggaattgccagcaaggattcgtttcctgctgcaggataccgtagagttgcgagaacaccattgggttcctcgcaaggcttttcttgacaatggaccaaagacgatcaatcaaattcgtcaagatgcagtaaaagatctaggggtgtttattcctgctcctatggctcaagggatgagaagtgacttctttctggagggaccgttcatgccacccaggatgaaaatggatagggacccacttggaggacttgctgatatgtttggacaaatgccaggtagcggaattggtactggtccaggagttatccaggatagattttcacccaccatgggacgtcatcgttcaaatcaactcttcaatggccatgggggacacatcatgcctcccacacaatcgcagtttggagagatgggaggcaagtttatgaaaagccagattagcctgaggcctgctcagtcgttcctaatgaataaaaatcaagtgccaaagcttcagccccagataactatgattcctcctagtgcacaaccaccacgcactcaaacaccacctctgggacagacacctcagcttggtctcaaaactaatccaccgcttatccaggaaaagcctgccaagaccagcaaaaagccaccaccgtcaaaggaagaactccttaaactaactgaaactgttgtgactgaatatctaaatagtggaaatgcaaatgaggctgtcaatggtgtaagagaaatgagggctcctaaacactttcttcctgagatgttaagcaaagtaatcatcctgtcactagatagaagcgatgaagataaagaaaaagcaagttctttgatcagtttactcaaacaggaagggatagccacaagtgacaacttcatgcaggctttcctgaatgtattggaccagtgtcccaaactggaggttgacatccctttggtgaaatcctatttagcacagtttgcagctcgtgccatcatttcagagctggtgagcatttcagaactagctcaaccactagaaagtggcacccattttcctctcttcctactttgtcttcagcagttagctaaattacaagatcgagaatggttaacagaactttttcaacaaagcaaggtcaatatgcagaaaatgctcccagaaattgatcagaataaggaccgcatgttggagattttggaaggaaagggactgagtttcttattcccactcctcaaattggagaaggaactgttgaagcaaataaagttggatccatcccctcaaaccatatataaatggattaaagataacatctctcccaaacttcatgtagataaaggatttgtgaacatcttaatgactagcttcttacagtacatttctagtgaagtaaacccccccagcgatgaaacagattcatcctctgctccttccaaagaacagttagagcaggaaaaacaactactactatctttcaagccagtaatgcagaaatttcttcatgatcacgttgatctacaagtcagtgccctgtatgctctccaggtgcactgctataacagcaacttcccaaaaggcatgttacttcgcttttttgtgcacttctatgacatggaaattattgaagaagaagctttcttggcttggaaagaagatataacccaagagtttccgggaaaaggcaaggctttgttccaggtgaatcagtggctaacctggttagaaactgctgaagaagaagaatcagaggaagaagctgactaaagaaccagccaaagccttaaattgtgcaaaacatactgttgctatgatgtaactgcatttgacctaaccactgcgaaaattcattccgctgtaatgttttcacaatatttaaagcagaagcacgtcagttaggatttccttctgcataaggtttttttgtagtgtaatgtcttaatcatagtctaccatcaaatattttaggagtatctttaatgtttagatagtatattagcagcatgcaataattacatcataagttctcaagcagaggcagtctattgcaaggaccttctttgctgccagttatcataggctgttttaagttagaaaactgaatagcaacactgaatactgtagaaatgcactttgctcagtaatacttgagttgttgcaatatttgattatccatttggttgttacagaaaaattcttaactgtaattgatggttgttgccgtaatagtatattgcctgtatttctacctctagtaatgggctttatgtgctagattttaatatccttgagcctgggcaagtgcacaagtctttttaaaagaaacatggtttacttgcacaaaactgatcagttttgagagatcgttaatgcccttgaagtggtttttgtgggtgtgaaacaaatggtgaga

SEQ ID NO: 131259 - DNA, 573 bp, Homo sapiens
  Payload ID: 5622
  Gene Symbol: EIF4G2
  Gene Name: eukaryotic translation initiation factor 4 gamma, 2
  ENST ID: ENST00000532570
  CDS Start-End: 185-573
agacacgccttagcgccagcagtgagtcggagctctatggaggtggcagcgggtaccgagaggcagctgcggtggcagctgctgagttctcggtgaaggtatttcatttctcctgtcccctcccctccccaccccatctattaatattattcttttgaagattcttcgttgtcaagccgccaaagtggagagtgcgattgcagaagggggtgcttctcgtttcagtgcttcttcgggcggaggaggaagtaggggtgcacctcagcactatcccaagactgctggcaacagcgagttcctggggaaaaccccagggcaaaacgctcagaaatggattcctgcacgaagcactagacgagatgacaactccgcagcaaacaactccgcaaacgaaaaagaacgacatgatgcaatcttcaggaaagtaagaggcatactaaataagcttactcctgaaaagtttgacaagctatgccttgagctcctcaatgtgggtgtagagtctaaactcatccttaaaggggtcatactgctgattgtggacaaagccctagaagagccaaagtatagctc

SEQ ID NO: 131260 - DNA, 1969 bp, Homo sapiens
  Payload ID: 5622
  Gene Symbol: EIF4G2
  Gene Name: eukaryotic translation initiation factor 4 gamma, 2
  ENST ID: ENST00000531416
  CDS Start-End: 638-1969
aaagagctgggcgccgggctggcgggggtggcctcagctgctcctccccgtcgagcgacccgggcctcgcggggaggttgtcggaagcacttccctaacttgcgcctgggtgggaggaatgctccgctcttttgttcccaggaagggaaaaacggggcggaggttcctgctgccatgttgtggccctggtcttccgcctgcaagtgctagtcctgtacacccggccccctctcgcgcgtctttccacgagctctccacggggaggaggcgaaagggtggacaggggaaaactgctgaagagctttcggagagacctcatctagtcgctggcctcgtcaaggcagtaaaaattcctagggcagacattttccacgtgatgttgctcgtgtctgtagttagacttttctattgatctcagtgctcagttttaaagatagtagaatgtggctttttcaaaagattcgttctgagccgtttaaaatgctcttgtgttctacgaagtctctttgcatccttgaacaccggggaatttccaggtggctaaacaaaatgtatttcatttctcctgtcccctcccctccccaccccatctattaatattattcttttgaagattcttcgttgtcaagccgccaaagtggagagtgcgattgcagaagggggtgcttctcgtttcagtgcttcttcgggcggaggaggaagtaggggtgcacctcagcactatcccaagactgctggcaacagcgagttcctggggaaaaccccagggcaaaacgctcagaaatggattcctgcacgaagcactagacgagatgacaactccgcagcaaacaactccgcaaacgaaaaagaacgacatgatgcaatcttcaggaaagtaagaggcatactaaataagcttactcctgaaaagtttgacaagctatgccttgagctcctcaatgtgggtgtagagtctaaactcatccttaaaggggtcatactgctgattgtggacaaagccctagaagagccaaagtatagctcactgtatgctcagctatgtctgcgattggcagaagatgcaccaaactttgatggcccagcagcagagggtcaaccaggacagaagcaaagcaccacattcagacgcctcctaatttccaaattacaagatgaatttgaaaaccgaactagaaatgttgatgtctatgataagcgtgaaaatcccctcctccccgaggaggaggaacagagagccattgctaagatcaagatgttgggaaacatcaaattcattggagagcttggcaagcttgatcttattcacgaatctatccttcataagtgcatcaaaacacttttggaaaagaagaagagagtccaactcaaagatatgggagaggatttggagtgcctctgtcagataatgaggacagtgggacctagattagaccatgaacgagccaagtccttaatggatcagtactttgcccgaatgtgctccttgatgttaagtaaggaattgccagcaaggattcgtttcctgctgcaggataccgtagagttgcgagaacaccattgggttcctcgcaaggcttttcttgacaatggaccaaagacgatcaatcaaattcgtcaagatgcagtaaaagatctaggggtgtttattcctgctcctatggctcaagggatgagaagtgacttctttctggagggaccgttcatgccacccaggatgaaaatggatagggacccacttggaggacttgctgatatgtttggacaaatgccaggtagcggaattggtactggtccaggagttatccaggatagattttcacccaccatgggacgtcatcgttcaaatcaactcttcaatggccatgggggacacatcatgcctcccacacaatcgcagtttggagagatgggaggcaagtttatgaaaagccagattagcctgaggcctgctcagtcgttcctaatg

SEQ ID NO: 131261 - DNA, 1069 bp, Homo sapiens
  Payload ID: 5622
  Gene Symbol: EIF4G2
  Gene Name: eukaryotic translation initiation factor 4 gamma, 2
  ENST ID: ENST00000532082
  CDS Start-End: 223-1069
aggcgtcccggagcctggcctcccggcggggaggtgtgtaggacctggagtcggcaggggctgcccttcgtcggggaggaaagagagagtgatgatttctgccccttttgtcagcagaggaggccgtggcgaggcggtatttcatttctcctgtcccctcccctccccaccccatctattaatattattcttttgaagattcttcgttgtcaagccgccaaagtggagagtgcgattgcagaagggggtgcttctcgtttcagtgcttcttcgggcggaggaggaagtaggggtgcacctcagcactatcccaagactgctggcaacagcgagttcctggggaaaaccccagggcaaaacgctcagaaatggattcctgcacgaagcactagacgagatgacaactccgcagcaaacaactccgcaaacgaaaaagaacgacatgatgcaatcttcaggaaagtaagaggcatactaaataagcttactcctgaaaagtttgacaagctatgccttgagctcctcaatgtgggtgtagagtctaaactcatccttaaaggggtcatactgctgattgtggacaaagccctagaagagccaaagtatagctcactgtatgctcagctatgtctgcgattggcagaagatgcaccaaactttgatggcccagcagcagagggtcaaccaggacagaagcaaagcaccacattcagacgcctcctaatttccaaattacaagatgaatttgaaaaccgaactagaaatgttgatgtctatgataagcgtgaaaatcccctcctccccgaggaggaggaacagagagccattgctaagatcaagatgttgggaaacatcaaattcattggagagcttggcaagcttgatcttattcacgaatctatccttcataagtgcatcaaaacacttttggaaaagaagaagagagtccaactcaaagatatgggagaggatttggagtgcctctgtcagataatgaggacagtgggacctagattagaccatgaacgagccaagtccttaatggatcagtactttgcccgaatgtgct

SEQ ID NO: 131262 - DNA, 579 bp, Homo sapiens
  Payload ID: 5622
  Gene Symbol: EIF4G2
  Gene Name: eukaryotic translation initiation factor 4 gamma, 2
  ENST ID: ENST00000531647
  CDS Start-End: 40-294
attattcttttgaagattcttcgttgtcaagccgccaaagtggagagtgcgattgcagaagggggtgcttctcgtttcagtgcttcttcgggcggaggaggaagtaggggtgcacctcagcactatcccaagactgctggcaacagcgagttcctggggaaaaccccagggcaaaacgctcagaaatggattcctgcacgaagcactagacgagatgacaactccgcagcaaacaactccgcaaacgaaaaagaacgacatgatgcaatcttcaggaaagtaagagggatctaggggtgtttattcctgctcctatggctcaagggatgagaagtgacttctttctggagggaccgttcatgccacccaggatgaaaatggatagggacccacttggaggacttgctgatatgtttggacaaatgccaggtagcggaattggtactggtccaggagttatccaggatagattttcacccaccatgggacgtcatcgttcaaatcaactcttcaatggccatgggggacacatcatgcctcccacacaatcgcagtttggagagatgggaggcaagttta

SEQ ID NO: 131263 - DNA, 591 bp, Homo sapiens
  Payload ID: 5622
  Gene Symbol: EIF4G2
  Gene Name: eukaryotic translation initiation factor 4 gamma, 2
  ENST ID: ENST00000530211
  CDS Start-End: 244-591
agcagtgagtcggagctctatggaggtggcagcgggtaccgagtggcggctgcagcagcgactcctctgagctgagtttgaggccgtccccgactccttcctcccccttccctcccccttttttttgttttccgttcccctttcccctcccttccctatccccgacgaccggatcctgaggaggcagctgcggtggcagctgctgagttctcggtgaagattcttcgttgtcaagccgccaaagtggagagtgcgattgcagaagggggtgcttctcgtttcagtgcttcttcgggcggaggaggaagtaggggtgcacctcagcactatcccaagactgctggcaacagcgagttcctggggaaaaccccagggcaaaacgctcagaaatggattcctgcacgaagcactagacgagatgacaactccgcagcaaacaactccgcaaacgaaaaagaacgacatgatgcaatcttcaggaaagtaagaggcatactaaataagcttactcctgaaaagtttgacaagctatgccttgagctcctcaatgtgggtgtagagtctaaactcatccttaaaggggtcatactg

SEQ ID NO: 131264 - DNA, 3654 bp, Homo sapiens
  Payload ID: 5622
  Gene Symbol: EIF4G2
  Gene Name: eukaryotic translation initiation factor 4 gamma, 2
  ENST ID: ENST00000525681
  CDS Start-End: 168-2891
ctgaaatacgttgtaattgaatgaaggcttatagatctgtatgttagcagtgtctaattttggtgctctttctcgttccaggtatttcatttctcctgtcccctcccctccccaccccatctattaatattattcttttgaagattcttcgttgtcaagccgccaaagtggagagtgcgattgcagaagggggtgcttctcgtttcagtgcttcttcgggcggaggaggaagtaggggtgcacctcagcactatcccaagactgctggcaacagcgagttcctggggaaaaccccagggcaaaacgctcagaaatggattcctgcacgaagcactagacgagatgacaactccgcagcaaacaactccgcaaacgaaaaagaacgacatgatgcaatcttcaggaaagtaagaggcatactaaataagcttactcctgaaaagtttgacaagctatgccttgagctcctcaatgtgggtgtagagtctaaactcatccttaaaggggtcatactgctgattgtggacaaagccctagaagagccaaagtatagctcactgtatgctcagctatgtctgcgattggcagaagatgcaccaaactttgatggcccagcagcagagggtcaaccaggacagaagcaaagcaccacattcagacgcctcctaatttccaaattacaagatgaatttgaaaaccgaactagaaatgttgatgtctatgataagcgtgaaaatcccctcctccccgaggaggaggaacagagagccattgctaagatcaagatgttgggaaacatcaaattcattggagagcttggcaagcttgatcttattcacgaatctatccttcataagtgcatcaaaacacttttggaaaagaagaagagagtccaactcaaagatatgggagaggatttggagtgcctctgtcagataatgaggacagtgggacctagattagaccatgaacgagccaagtccttaatggatcagtactttgcccgaatgtgctccttgatgttaagtaaggaattgccagcaaggattcgtttcctgctgcaggataccgtagagttgcgagaacaccattgggttcctcgcaaggcttttcttgacaatggaccaaagacgatcaatcaaattcgtcaagatgcagtaaaagatctaggggtgtttattcctgctcctatggctcaagggatgagaagtgacttctttctggagggaccgttcatgccacccaggatgaaaatggatagggacccacttggaggacttgctgatatgtttggacaaatgccaggtagcggaattggtactggtccaggagttatccaggatagattttcacccaccatgggacgtcatcgttcaaatcaactcttcaatggccatgggggacacatcatgcctcccacacaatcgcagtttggagagatgggaggcaagtttatgaaaagccaggggctaagccagctctaccataaccagagtcagggactcttatcccagctgcaaggacagtcgaaggatatgccacctcggttttctaagaaaggacagcttaatgcagatgagattagcctgaggcctgctcagtcgttcctaatgaataaaaatcaagtgccaaagcttcagccccagataactatgattcctcctagtgcacaaccaccacgcactcaaacaccacctctgggacagacacctcagcttggtctcaaaactaatccaccgcttatccaggaaaagcctgccaagaccagcaaaaagccaccaccgtcaaaggaagaactccttaaactaactgaaactgttgtgactgaatatctaaatagtggaaatgcaaatgaggctgtcaatggtgtaagagaaatgagggctcctaaacactttcttcctgagatgttaagcaaagtaatcatcctgtcactagatagaagcgatgaagataaagaaaaagcaagttctttgatcagtttactcaaacaggaagggatagccacaagtgacaacttcatgcaggctttcctgaatgtattggaccagtgtcccaaactggaggttgacatccctttggtgaaatcctatttagcacagtttgcagctcgtgccatcatttcagagctggtgagcatttcagaactagctcaaccactagaaagtggcacccattttcctctcttcctactttgtcttcagcagttagctaaattacaagatcgagaatggttaacagaactttttcaacaaagcaaggtcaatatgcagaaaatgctcccagaaattgatcagaataaggaccgcatgttggagattttggaaggaaagggactgagtttcttattcccactcctcaaattggagaaggaactgttgaagcaaataaagttggatccatcccctcaaaccatatataaatggattaaagataacatctctcccaaacttcatgtagataaaggatttgtgaacatcttaatgactagcttcttacagtacatttctagtgaagtaaacccccccagcgatgaaacagattcatcctctgctccttccaaagaacagttagagcaggaaaaacaactactactatctttcaagccagtaatgcagaaatttcttcatgatcacgttgatctacaagtcagtgccctgtatgctctccaggtgcactgctataacagcaacttcccaaaaggcatgttacttcgcttttttgtgcacttctatgacatggaaattattgaagaagaagctttcttggcttggaaagaagatataacccaagagtttccgggaaaaggcaaggctttgttccaggtgaatcagtggctaacctggttagaaactgctgaagaagaagaatcagaggaagaagctgactaaagaaccagccaaagccttaaattgtgcaaaacatactgttgctatgatgtaactgcatttgacctaaccactgcgaaaattcattccgctgtaatgttttcacaatatttaaagcagaagcacgtcagttaggatttccttctgcataaggtttttttgtagtgtaatgtcttaatcatagtctaccatcaaatattttaggagtatctttaatgtttagatagtatattagcagcatgcaataattacatcataagttctcaagcagaggcagtctattgcaaggaccttctttgctgccagttatcataggctgttttaagttagaaaactgaatagcaacactgaatactgtagaaatgcactttgctcagtaatacttgagttgttgcaatatttgattatccatttggttgttacagaaaaattcttaactgtaattgatggttgttgccgtaatagtatattgcctgtatttctacctctagtaatgggctttatgtgctagattttaatatccttgagcctgggcaagtgcacaagtctttttaaaagaaacatggtttacttgcacaaaactgatcagttttgagagatcgttaatgcccttgaagtggtttttgtgggtgtgaaacaaatggtgagaatttgaattggtccctcctattatagtattgaaattaagtctacttaatttatcaagtcatgttcatgccctgattttatatacttgtatctatcaataaacattgtgatacttgat

SEQ ID NO: 131265 - DNA, 557 bp, Homo sapiens
  Payload ID: 5622
  Gene Symbol: EIF4G2
  Gene Name: eukaryotic translation initiation factor 4 gamma, 2
  ENST ID: ENST00000531180
  CDS Start-End: 1-557
atgattcctcctagtgcacaaccaccacgcactcaaacaccacctctgggacagacacctcagcttggtctcaaaactaatccaccgcttatccaggaaaagcctgccaagaccagcaaaaagccaccaccgtcaaaggaagaactccttaaactaactgaaactgttgtgactgaatatctaaatagtggaaatgcaaatgaggctgtcaatggtgtaagagaaatgagggctcctaaacactttcttcctgagatgttaagcaaagtaatcatcctgtcactagatagaagcgatgaagataaagaaaaagcaagttctttgatcagtttactcaaacaggaagggatagccacaagtgacaacttcatgcaggctttcctgaatgtattggaccagtgtcccaaactggaggttgacatccctttggtgaaatcctatttagcacagtttgcagctcgtgccatcatttcagagctgttagctaaattacaagatcgagaatggttaacagaactttttcaacaaagcaaggtcaatatgcagaaaatgctccc

SEQ ID NO: 131266 - DNA, 4001 bp, Homo sapiens
  Payload ID: 5622
  Gene Symbol: EIF4G2
  Gene Name: eukaryotic translation initiation factor 4 gamma, 2
  ENST ID: ENST00000526148
  CDS Start-End: 512-3235
gggaggaatgctccgctcttttgttcccaggaagggaaaaacggggcggaggttcctgctgccatgttgtggccctggtcttccgcctgcaagtgctagtcctgtacacccggccccctctcgcgcgtctttccacgagctctccacggggaggaggcgaaagggtggacaggggaaaactgctgaagagctttcggagagacctcatctagtcgctggcctcgtcaaggcagtaaaaattcctagggcagacattttccacgtgatgttgctcgtgtctgtagttagacttttctattgatctcagtgctcagttttaaagatagtagaatgtggctttttcaaaagattcgttctgagccgtttaaaatgctcttgtgttctacgaagtctctttgcatccttgaacaccggggaatttccaggtatttcatttctcctgtcccctcccctccccaccccatctattaatattattcttttgaagattcttcgttgtcaagccgccaaagtggagagtgcgattgcagaagggggtgcttctcgtttcagtgcttcttcgggcggaggaggaagtaggggtgcacctcagcactatcccaagactgctggcaacagcgagttcctggggaaaaccccagggcaaaacgctcagaaatggattcctgcacgaagcactagacgagatgacaactccgcagcaaacaactccgcaaacgaaaaagaacgacatgatgcaatcttcaggaaagtaagaggcatactaaataagcttactcctgaaaagtttgacaagctatgccttgagctcctcaatgtgggtgtagagtctaaactcatccttaaaggggtcatactgctgattgtggacaaagccctagaagagccaaagtatagctcactgtatgctcagctatgtctgcgattggcagaagatgcaccaaactttgatggcccagcagcagagggtcaaccaggacagaagcaaagcaccacattcagacgcctcctaatttccaaattacaagatgaatttgaaaaccgaactagaaatgttgatgtctatgataagcgtgaaaatcccctcctccccgaggaggaggaacagagagccattgctaagatcaagatgttgggaaacatcaaattcattggagagcttggcaagcttgatcttattcacgaatctatccttcataagtgcatcaaaacacttttggaaaagaagaagagagtccaactcaaagatatgggagaggatttggagtgcctctgtcagataatgaggacagtgggacctagattagaccatgaacgagccaagtccttaatggatcagtactttgcccgaatgtgctccttgatgttaagtaaggaattgccagcaaggattcgtttcctgctgcaggataccgtagagttgcgagaacaccattgggttcctcgcaaggcttttcttgacaatggaccaaagacgatcaatcaaattcgtcaagatgcagtaaaagatctaggggtgtttattcctgctcctatggctcaagggatgagaagtgacttctttctggagggaccgttcatgccacccaggatgaaaatggatagggacccacttggaggacttgctgatatgtttggacaaatgccaggtagcggaattggtactggtccaggagttatccaggatagattttcacccaccatgggacgtcatcgttcaaatcaactcttcaatggccatgggggacacatcatgcctcccacacaatcgcagtttggagagatgggaggcaagtttatgaaaagccaggggctaagccagctctaccataaccagagtcagggactcttatcccagctgcaaggacagtcgaaggatatgccacctcggttttctaagaaaggacagcttaatgcagatgagattagcctgaggcctgctcagtcgttcctaatgaataaaaatcaagtgccaaagcttcagccccagataactatgattcctcctagtgcacaaccaccacgcactcaaacaccacctctgggacagacacctcagcttggtctcaaaactaatccaccgcttatccaggaaaagcctgccaagaccagcaaaaagccaccaccgtcaaaggaagaactccttaaactaactgaaactgttgtgactgaatatctaaatagtggaaatgcaaatgaggctgtcaatggtgtaagagaaatgagggctcctaaacactttcttcctgagatgttaagcaaagtaatcatcctgtcactagatagaagcgatgaagataaagaaaaagcaagttctttgatcagtttactcaaacaggaagggatagccacaagtgacaacttcatgcaggctttcctgaatgtattggaccagtgtcccaaactggaggttgacatccctttggtgaaatcctatttagcacagtttgcagctcgtgccatcatttcagagctggtgagcatttcagaactagctcaaccactagaaagtggcacccattttcctctcttcctactttgtcttcagcagttagctaaattacaagatcgagaatggttaacagaactttttcaacaaagcaaggtcaatatgcagaaaatgctcccagaaattgatcagaataaggaccgcatgttggagattttggaaggaaagggactgagtttcttattcccactcctcaaattggagaaggaactgttgaagcaaataaagttggatccatcccctcaaaccatatataaatggattaaagataacatctctcccaaacttcatgtagataaaggatttgtgaacatcttaatgactagcttcttacagtacatttctagtgaagtaaacccccccagcgatgaaacagattcatcctctgctccttccaaagaacagttagagcaggaaaaacaactactactatctttcaagccagtaatgcagaaatttcttcatgatcacgttgatctacaagtcagtgccctgtatgctctccaggtgcactgctataacagcaacttcccaaaaggcatgttacttcgcttttttgtgcacttctatgacatggaaattattgaagaagaagctttcttggcttggaaagaagatataacccaagagtttccgggaaaaggcaaggctttgttccaggtgaatcagtggctaacctggttagaaactgctgaagaagaagaatcagaggaagaagctgactaaagaaccagccaaagccttaaattgtgcaaaacatactgttgctatgatgtaactgcatttgacctaaccactgcgaaaattcattccgctgtaatgttttcacaatatttaaagcagaagcacgtcagttaggatttccttctgcataaggtttttttgtagtgtaatgtcttaatcatagtctaccatcaaatattttaggagtatctttaatgtttagatagtatattagcagcatgcaataattacatcataagttctcaagcagaggcagtctattgcaaggaccttctttgctgccagttatcataggctgttttaagttagaaaactgaatagcaacactgaatactgtagaaatgcactttgctcagtaatacttgagttgttgcaatatttgattatccatttggttgttacagaaaaattcttaactgtaattgatggttgttgccgtaatagtatattgcctgtatttctacctctagtaatgggctttatgtgctagattttaatatccttgagcctgggcaagtgcacaagtctttttaaaagaaacatggtttacttgcacaaaactgatcagttttgagagatcgttaatgcccttgaagtggtttttgtgggtgtgaaacaaatggtgagaatttgaattggtccctcctattatagtattgaaattaagtctacttaatttatcaagtcatgttcatgccctgattttatatacttgtatctatcaataaacattgtgatacttgatgta

SEQ ID NO: 131267 - DNA, 702 bp, Homo sapiens
  Payload ID: 5622
  Gene Symbol: EIF4G2
  Gene Name: eukaryotic translation initiation factor 4 gamma, 2
  ENST ID: ENST00000528839
  CDS Start-End: 1-702
atcagtttactcaaacaggaagggatagccacaagtgacaacttcatgcaggctttcctgaatgtattggaccagtgtcccaaactggaggttgacatccctttggtgaaatcctatttagcacagtttgcagctcgtgccatcatttcagagctggtgagcatttcagaactagctcaaccactagaaagtggcacccattttcctctcttcctactttgtcttcagcagttagctaaattacaagatcgagaatggttaacagaactttttcaacaaagcaaggtcaatatgcagaaaatgctcccagataacatctctcccaaacttcatgtagataaaggatttgtgaacatcttaatgactagcttcttacagtacatttctagtgaagtaaacccccccagcgatgaaacagattcatcctctgctccttccaaagaacagttagagcaggaaaaacaactactactatctttcaagccagtaatgcagaaatttcttcatgatcacgttgatctacaagtcagtgccctgtatgctctccaggtgcactgctataacagcaacttcccaaaaggcatgttacttcgcttttttgtgcacttctatgacatggaaattattgaagaagaagctttcttggcttggaaagaagatataacccaagagtttccgggaaaaggcaaggctttgttccag

SEQ ID NO: 131268 - DNA, 571 bp, Homo sapiens
  Payload ID: 5622
  Gene Symbol: EIF4G2
  Gene Name: eukaryotic translation initiation factor 4 gamma, 2
  ENST ID: ENST00000527419
  CDS Start-End: 306-571
agcagtgagtcggagctctatggaggtggcagcgggtaccgagtggcggctgcagcagcgactcctctgagctgagtttgaggccgtccccgactccttcctcccccttccctcccccttttttttgttttccgttcccctttcccctcccttccctatccccgacgaccggatcctgaggaggcagctgcggtggcagctgctgagttctcggtgaaggtatttcatttctcctgtcccctcccctccccaccccatctattaatattattcttttgaagattcttcgttgtcaagccgccaaagtggagaaacgacatgatgcaatcttcaggaaagtaagaggcatactaaataagcttactcctgaaaagtttgacaagctatgccttgagctcctcaatgtgggtgtagagtctaaactcatccttaaaggggtcatactgctgattgtggacaaagccctagaagagccaaagtatagctcactgtatgctcagctatgtctgcgattggcagaagatgcaccaaactttgatggcccagcagcagagggtcaaccaggacagaa

SEQ ID NO: 131269 - DNA, 601 bp, Homo sapiens
  Payload ID: 5622
  Gene Symbol: EIF4G2
  Gene Name: eukaryotic translation initiation factor 4 gamma, 2
  ENST ID: ENST00000528562
  CDS Start-End: 307-447
cagcagtgagtcggagctctatggaggtggcagcgggtaccgagtggcggctgcagcagcgactcctctgagctgagtttgaggccgtccccgactccttcctcccccttccctcccccttttttttgttttccgttcccctttcccctcccttccctatccccgacgaccggatcctgaggaggcagctgcggtggcagctgctgagttctcggtgaaggtatttcatttctcctgtcccctcccctccccaccccatctattaatattattcttttgaagattcttcgttgtcaagccgccaaagtggagagtgcgattgcagaagggggtgcttctcgtttcagaaatggattcctgcacgaagcactagacgagatgacaactccgcagcaaacaactccgcaaacgaaaaagaacgacatgatgcaatcttcaggaaagtaagaggcatactaaataagcttactcctgaaaagtttgacaagctatgccttgagctcctcaatgtgggtgtagagtctaaactcatccttaaaggggtcatactgctgattgtggacaaagccctagaagagccaaagtatagctcactgtatgc

SEQ ID NO: 131270 - DNA, 1286 bp, Homo sapiens
  Payload ID: 5622
  Gene Symbol: EIF4G2
  Gene Name: eukaryotic translation initiation factor 4 gamma, 2
  ENST ID: ENST00000524932
  CDS Start-End: 555-1286
agacacgccttagcgccagcagtgagtcggagctctatggaggtggcagcgggtaccgagtggcggctgcagcagcgactcctctgagctgagtttgaggccgtccccgactccttcctcccccttccctcccccttttttttgttttccgttcccctttcccctcccttccctatccccgacgaccggatcctgaggaggcagctgcggtggcagctgctgagttctcggtgaagaaggaaaacgtcagtgttggccaggccgccgtgcggtcatggccggatggccgacgcctgcagggacgaggccgtggcggaccgaggcacggctgtgctcggacggcgagggagcgtggctcggaccgctagcgccgtggcgggaggcacgcgggccggcagggaaggccaggccgttggcgcgggaccagggaaccgcaggcgtcccggagcctggcctcccggcggggaggtatttcatttctcctgtcccctcccctccccaccccatctattaatattattcttttgaagattcttcgttgtcaagccgccaaagtggagagtgcgattgcagaagggggtgcttctcgtttcagtgcttcttcgggcggaggaggaagtaggggtgcacctcagcactatcccaagactgctggcaacagcgagttcctggggaaaaccccagggcaaaacgctcagaaatggattcctgcacgaagcactagacgagatgacaactccgcagcaaacaactccgcaaacgaaaaagaacgacatgatgcaatcttcaggaaagtaagaggcatactaaataagcttactcctgaaaagtttgacaagctatgccttgagctcctcaatgtgggtgtagagtctaaactcatccttaaaggggtcatactgctgattgtggacaaagccctagaagagccaaagtatagctcactgtatgctcagctatgtctgcgattggcagaagatgcaccaaactttgatggcccagcagcagagggtcaaccaggacagaagcaaagcaccacattcagacgcctcctaatttccaaattacaagatgaatttgaaaaccgaactagaaatgttgatgtctatgataagcgtgaaaatcccctcctccccgaggaggaggaacagagagccattgctaagatcaagatgttgggaaacatcaaattcattggagagcttggcaagcttgatcttattcacgaatctatccttcataagtgcatcaaaacacttttggaaaagaagaagagagtccaactc

SEQ ID NO: 131271 - DNA, 563 bp, Homo sapiens
  Payload ID: 5622
  Gene Symbol: EIF4G2
  Gene Name: eukaryotic translation initiation factor 4 gamma, 2
  ENST ID: ENST00000530702
  CDS Start-End: 312-563
agcgccagcagtgagtcggagctctatggaggtggcagcgggtaccgagtggcggctgcagcagcgactcctctgagctgagtttgaggccgtccccgactccttcctcccccttccctcccccttttttttgttttccgttcccctttcccctcccttccctatccccgacgaccggatcctgaggaggcagctgcggtggcagctgctgagttctcggtgaaggtatttcatttctcctgtcccctcccctccccaccccatctattaatattattcttttgaagattcttcgttgtcaagccgccaaagtggagagtgcgattgcagaagggggtgcttctcgtttcagcgagttcctggggaaaaccccagggcaaaacgctcagaaatggattcctgcacgaagcactagacgagatgacaactccgcagcaaacaactccgcaaacgaaaaagaacgacatgatgcaatcttcaggaaagtaagaggcatactaaataagcttactcctgaaaagtttgacaagctatgccttgagctcctcaatgtgggtgtagag

SEQ ID NO: 131272 - DNA, 555 bp, Homo sapiens
  Payload ID: 5622
  Gene Symbol: EIF4G2
  Gene Name: eukaryotic translation initiation factor 4 gamma, 2
  ENST ID: ENST00000527526
  CDS Start-End: 219-555
agtcctgtacacccggccccctctcgcgcgtctttccacgagctctccacggggaggaggcgaaagggtggacaggggaaaactgctgaagagctttcggagagacctcatctagtcgctggcctcgtcaaggtatttcatttctcctgtcccctcccctccccaccccatctattaatattattcttttgaagattcttcgttgtcaagccgccaaagtggagagtgcgattgcagaagggggtgcttctcgtttcagtgcttcttcgggcggaggaggaagtaggggtgcacctcagcactatcccaagactgctggcaacagcgagttcctggggaaaaccccagggcaaaacgctcagaaatggattcctgcacgaagcactagacgagatgacaactccgcagcaaacaactccgcaaacgaaaaagaacgacatgatgcaatcttcaggaaagtaagaggcatactaaataagcttactcctgaaaagtttgacaagctatgccttgagctcctcaatgtgggtgtagagtctaaactcatccttaaag

SEQ ID NO: 131273 - DNA, 198 bp, Homo sapiens
  Payload ID: 5622
  Gene Symbol: EIF4G2
  Gene Name: eukaryotic translation initiation factor 4 gamma, 2
  ENST ID: ENST00000534605
  CDS Start-End: 1-62
acgaaaaagaacgacatgatgcaatcttcaggaaagtaagaggattgtggacaaagccctagaagagccaaagtatagctcactgtatgctcagctatgtctgcgattggcagaagatgcaccaaactttgatggcccagcagcagagggtcaaccaggacagaagcaaagcaccacattcagacgcctcctaatttc

SEQ ID NO: 131274 - DNA, 5802 bp, Homo sapiens
  Payload ID: 5623
  Gene Symbol: EIF4G3
  Gene Name: eukaryotic translation initiation factor 4 gamma, 3
  Uniprot ID: O43432
  ENST ID: ENST00000264211
  CDS Start-End: 196-4953
gtaacacaagtggcaagacagccgggaacccctaccccatccccttattcagcacatgaaataaacaaggggcatccaaatcttgcggcaacgcccccgggacatgcatcgtcccctggactctctcaaaccccttatccctctggacagaatgcaggtccaaccacgctggtataccctcaaacccctcagacaatgaattcacaacctcaaacccgttctccgtttttccagaggcctcaaatacagcctcctagagctaccatcccgaacagcagtccttccattcgtcctggtgcacagacacccactgcagtgtaccaggctaatcagcacatcatgatggttaaccatctgcccatgccgtacccagtgccccaggggcctcagtactgtataccacagtaccgtcatagtggccctccttatgttgggcccccccaacaatatccagttcaaccaccggggccaggtcctttttatcctggaccaggacctggggacttccccaatgcttatggaacgcctttttacccaagtcagccggtgtatcagtcagcacctatcatagtgcctacgcagcaacagccgcctccagccaagagagagaaaaaaactataagaattcgggatccaaaccagggaggtaaagacataacagaggagattatgtctggaggtggcagcagaaatcctactccacccataggaagacccacgtccacacctactcctcctcagcagctgcccagccaggtccccgagcacagccctgtggtttatgggactgtggagagcgctcatcttgctgccagcacccctgtcactgcagctagcgaccagaagcaagaggagaagccaaaaccagatccagtgttaaagtctccttccccagtccttaggctagtcctcagtggagagaagaaagaacaagaaggccagacatctgaaactactgcaatagtatccatagcagagcttcctctgcctccatcacctaccactgtttcttctgttgctcgaagtacaattgcagcccccacctcttctgctcttagtagccaaccaatattcaccactgctatagatgacagatgtgaactctcatccccaagagaagacacaattcctatacccagcctcacatcttgcacagaaacatcagaccctttaccaacaaatgaaaatgatgatgatatatgcaagaaaccctgtagtgtagcacctaatgatattccactggtttctagtactaacctaattaatgaaataaatggagttagcgaaaaattatcagccacggagagcattgtggaaatagtaaaacaggaagtattgccattgactcttgaattggagattctcgaaaatcccccagaagaaatgaaactggagtgtatcccagctcccatcaccccttccacagttccttcctttcctccaactcctccaactcctccagcttctcctcctcacactccagtcattgttcctgctgctgccactactgttagttctccgagtgctgccatcacagtccagagagtcctagaggaggacgagagcataagaacttgccttagtgaagatgcaaaagagattcagaacaaaatagaggtagaagcagatgggcaaacagaagagattttggattctcaaaacttaaattcaagaaggagccctgtcccagctcaaatagctataactgtaccaaagacatggaagaaaccaaaagatcggacccgaaccactgaagagatgttagaggcagaattggagcttaaagctgaagaggagctttccattgacaaagtacttgaatctgaacaagataaaatgagccaggggtttcatcctgaaagagacccctctgacctaaaaaaagtgaaagctgtggaagaaaatggagaagaagctgagccagtacgtaatggtgctgagagtgtttctgagggtgaaggaatagatgctaattcaggctccacagatagttctggtgatggggttacatttccatttaaaccagaatcctggaagcctactgatactgaaggtaagaagcagtatgacagggagtttctgctggacttccagttcatgcctgcctgtatacaaaaaccagagggcctgcctcctatcagtgatgtggttcttgacaagatcaaccaacccaaattgccaatgcgaactctggatcctcgaattttgcctcgaggaccagactttacaccagcctttgctgattttggaaggcagacacctggtggaagaggcgtacctttgttgaatgttgggtcacgaagatctcaacctggccaaagaagagaacccagaaagatcatcacagtttctgtaaaagaagatgtacacctgaaaaaggcagaaaatgcctggaagccaagccaaaaacgagacagccaagccgatgatcccgaaaacattaaaacccaggagctttttagaaaagttcgaagtatcttaaataaattgacaccacagatgttcaatcaactgatgaagcaagtgtcaggacttactgttgacacagaggagcggctgaaaggagttattgacctggtctttgagaaggctattgatgaacccagtttctctgtggcttacgcaaacatgtgtcgatgtctagtaacgctgaaagtacccatggcagacaagcctggtaacacagtgaatttccggaagctgctactgaaccgttgccagaaggagtttgaaaaagataaagcagatgatgatgtctttgagaagaagcagaaagaacttgaggctgccagtgctccagaggagaggacaaggcttcatgatgaactggaagaagccaaggacaaagcccggcggagatccattggcaacatcaagtttattggagaactctttaaactcaaaatgctgactgaagccatcatgcatgactgtgtggtgaagctgctaaagaaccatgatgaagaatccctggagtgcctgtgtcgcctgctcaccaccattggcaaagacttggactttgaaaaagcaaagccacgtatggaccagtactttaatcagatggagaaaattgtgaaagaaagaaaaacctcatctaggattcggttcatgcttcaagatgttatagacctaaggctgtgcaattgggtatctcgaagagcagatcaagggcctaaaactatcgaacagattcacaaagaggctaaaatagaagaacaagaagagcaaaggaaggtccagcaactcatgaccaaagagaagagaagaccaggtgtccagagagtggacgaaggtgggtggaacactgtacaaggggccaagaacagtcgggtactggacccctcaaaattcctaaaaatcactaagcctacaattgatgaaaaaattcagctggtacctaaagcacagctaggcagctggggaaaaggcagcagtggtggagcaaaggcaagtgagactgatgccttacggtcaagtgcttccagtttaaacagattctctgccctgcaacctccagcaccctcagggtccacgccatccacgcctgtagagtttgattcccgaaggaccttaactagtcgtggaagtatgggcagggagaagaatgacaagccccttccatctgcaacagctcggccaaatactttcatgaggggtggcagcagtaaagacctgctagacaatcagtctcaagaagagcagcggagagagatgctggagaccgtgaagcagctcacaggaggtgtggatgtggagaggaacagcactgaggctgagcgaaataaaacaagggagtcagcaaaaccagaaatttcagcaatgtcagctcatgacaaggctgcattatcagaagaggaactggagaggaagtcgaaatctatcattgatgaatttctacacattaatgattttaaggaagccatgcagtgtgtggaagagctgaatgcccagggcctactacatgtttttgtgagagtgggagtggagtccaccctggaaaggagccagatcaccagggatcacatgggccaattactctatcagctggtacagtcagaaaaactcagcaaacaggactttttcaaaggtttttcagaaactttggaattggcagatgacatggccattgatattccccatatttggttgtaccttgctgaactggtgacccccatgttaaaagaaggtggaatctccatgagagaacttaccatagaatttagcaaacctttacttcctgttggaagagctggggtcttgctatctgaaatattgcacctactatgcaaacaaatgagccataagaaagtgggagccttatggagggaggctgacctcagctggaaggactttttaccagaaggagaagatgtacataattttcttttggagcagaagttggacttcatagagtctgacagtccctgttcctctgaagcactttcaaagaaagaactgtctgccgaagagctgtataagcgactcgagaaactcattattgaggacaaagcgaatgatgaacagatctttgactgggtagaggctaatctagacgaaatccagatgagttcacctacattccttagagctttaatgactgctgtttgtaaagcagctattatagccgactcttctaccttcagagtggacactgctgttatcaagcagagagtgccgatcttactcaagtacctagactcagatacagagaaggaactgcaagcactttatgcactacaagcatcgatagtaaaacttgatcaacctgccaatttgctgcggatgttttttgattgtctatatgacgaggaggtgatctccgaggatgccttctacaaatgggagagcagcaaggaccctgcagagcagaatgggaagggcgtggctctgaaatctgtcacggcattcttcacgtggctgcgggaagcagaagaggagtctgaggataactaaaacttcaaatacacaaaatgaaacaaaagaaacaatttaagtatttttttaaaaagtttcacgtcttcgccaatcacagtgcagcaaggccaattctcgcagaaacccccacgtgtgcacgagtgggagaggggaaagagaaaaaaaggtgatcatggaggaaaaaggtactggataaaagtaaacttcaaaccttagggcgggagcactaaaaccaaaatacatgtattatttatagaaaatattttctgttttaatcttttctttttaaacaaggactcatacttaaaaaaatgtttagcaaaaaaaaaaaaagttgagaacttttaatttattttaaggactgcaaatgccagtgtaattttttaatttgcagtttctgtaaacaacttgtataatagaaaagcagagaaataaatttccctccccttcaagatgcacctcatgtttgttttaaggtatagcatttagtccagatttgagaaagtttggggtgaacaaggtaagaaagatttttttttttttggcatcaaatctttctgcctgcctctcagcttgcttcagaaaatttaaaaaatcacaatagtaatcaaaacatacataacattgaaacagaaggaaatgctgtggaccacagaactccaagaattgtttaaaaaaaaaaaagtgctaccctgagaaaagtactcttaatactcttgaaatctttagagcaactttaaggcttgtaaatacatagaacaaatatttaaaaaaacaaaaagaaattgactcagtactatttcttttcactttgaaaatataaagaacaaaataaagacaaacattgcaagtttaaaagaaagtaaa

SEQ ID NO: 131275 - DNA, 2179 bp, Homo sapiens
  Payload ID: 5623
  Gene Symbol: EIF4G3
  Gene Name: eukaryotic translation initiation factor 4 gamma, 3
  Uniprot ID: O43432
  ENST ID: ENST00000356916
  CDS Start-End: 498-2045
taacttagcgttgcttatggaaaacctgatggaatagcattgacccagtttacaaagccatctgaagtgcctgagttgtatttgaaggaatattttttcacctttggcttttagcttagaagttatgactgcacattacaaaggggaatgttcaaacctttatcacaatcccacagagtattgatgaggaaactgaagtttggagcgatcacatcattttcccaagaattcctagaggacctgtgcaacaacctcttgaggatcgaatcttcactcccgctgtctcagcagtctacagcacggtaacacaagtggcaagacagccgggaacccctaccccatccccttattcagcacatgaaataaacaaggggcatccaaatcttgcggcaacgcccccgggacatgcatcgtcccctggactctctcaaaccccttatccctctggacagaatgcaggtccaaccacgctggtataccctcaaacccctcagacaatgaattcacaacctcaaacccgttctccgtttgcagcggggcctcgacctccccatcatcagtttttccagaggcctcaaatacagcctcctagagctaccatcccgaacagcagtccttccattcgtcctggtgcacagacacccactgcagtgtaccaggctaatcagcacatcatgatggttaaccatctgcccatgccgtacccagtgccccaggggcctcagtactgtataccacagtaccgtcatagtggccctccttatgttgggcccccccaacaatatccagttcaaccaccggggccaggtcctttttatcctggaccaggacctggggacttccccaatgcttatggaacgcctttttacccaagtcagccggtgtatcagtcagcacctatcatagtgcctacgcagcaacagccgcctccagccaagagagagaaaaaaactataagaattcgggatccaaaccagggaggtaaagacataacagaggagattatgtctggaggtggcagcagaaatcctactccacccataggaagacccacgtccacacctactcctcctcagcagctgcccagccaggtccccgagcacagccctgtggtttatgggactgtggagagcgctcatcttgctgccagcacccctgtcactgcagctagcgaccagaagcaagaggagaagccaaaaccagatccagtgttaaagtctccttccccagtccttaggctagtcctcagtggagagaagaaagaacaagaaggccagacatctgaaactactgcaatagtatccatagcagagcttcctctgcctccatcacctaccactgtttcttctgttgctcgaagtacaattgcagcccccacctcttctgctcttagtagccaaccaatattcaccactgctatagatgacagatgtgaactctcatccccaagagaagacacaattcctatacccagcctcacatcttgcacagaaacatcagaccctttaccaacaaatgaaaatgatgatgatatatgcaagaaaccctgtagtgtagcacctaatgatattccactggtttctagtactaacctaattaatgaaataaatggagttagcgaaaaattatcagccacggagagcattgtggaaatagtaaaacaggaagtattgccattgactcttgaattggagattctcgaaaatcccccagaagaaatgaaactggagtgtatcccagctcccatcaccccttccacagttccttcctttcctccaactcctccaactcctccagcttctcctcctcacactccagtcattgttcctgctgctgccactactgttagttctccgagtgctgccatcacagtccagagagtcctagaggaggacgagagcataagaacttgccttagtgaagatgcaaaagagattcagaacaaaatagaggtagaagcagatgggcaaacagaagagattttggattctcaaaacttaaattcaagaaggagccctgtcccagaaacatcgaatgaatgctgaaattcctagtctggtttcttcagtggtgtgtttgtgttttagtacaacctgcaaaagagttactccattgtctaaaaatgcaaatgagaatttccaaatatacaaaatgcctccaaggtatatgtcacgaaaca

SEQ ID NO: 131276 - DNA, 5567 bp, Homo sapiens
  Payload ID: 5623
  Gene Symbol: EIF4G3
  Gene Name: eukaryotic translation initiation factor 4 gamma, 3
  Uniprot ID: O43432
  ENST ID: ENST00000374935
  CDS Start-End: 623-4540
gccggactgctggaggcggccacagcgccatgttggatgctctgctcgttgagtgaagaaaatccaccggcatcgcctgagccccgctaccgagaagggcgccgcttcctccggggagggggataaagatcccccgccgccggcccatgaggatattgccgtgaaaggcacagcgactgcagcaggaaccggacccggcaccggagcggcggcggcggcggcagcagcggtaccgcctcctcacccggcggcggcagcagcggcggcggcggcggcggcggcggcggcggcggcagcggtcccccctcctcacccgaacatcagggccctccagactcaggcgccccaacaaattcctagaggacctgtgcaacaacctcttgaggatcgaatcttcactcccgctgtctcagcagtctacagcacggtaacacaagtggcaagacagccgggaacccctaccccatccccttattcagcacatgaaataaacaaggggcatccaaatcttgcggcaacgcccccgggacatgcatcgtcccctggactctctcaaaccccttatccctctggacagaatgcaggtccaaccacgctggtataccctcaaacccctcagacaatgaattcacaacctcaaacccgttctccgtttttccagaggcctcaaatacagcctcctagagctaccatcccgaacagcagtccttccattcgtcctggtgcacagacacccactgcagtgtaccaggctaatcagcacatcatgatggttaaccatctgcccatgccgtacccagtgccccaggggcctcagtactgtataccacagtaccgtcatagtggccctccttatgttgggcccccccaacaatatccagttcaaccaccggggccaggtcctttttatcctggaccaggacctggggacttccccaatgcttatggaacgcctttttacccaagtcagccggtgtatcagtcagcacctatcatagtgcctacgcagcaacagccgcctccagccaagagagagaaaaaaactataagaattcgggatccaaaccagggaggtaaagacataacagaggagattatgtctggaggtggcagcagaaatcctactccacccataggaagacccacgtccacacctactcctcctcagcagctgcccagccaggtccccgagcacagccctgtggtttatgggactgtggagagcgctcatcttgctgccagcacccctgtcactgcagctagcgaccagaagcaagctcaaatagctataactgtaccaaagacatggaagaaaccaaaagatcggacccgaaccactgaagagatgttagaggcagaattggagcttaaagctgaagaggagctttccattgacaaagtacttgaatctgaacaagataaaatgagccaggggtttcatcctgaaagagacccctctgacctaaaaaaagtgaaagctgtggaagaaaatggagaagaagctgagccagtacgtaatggtgctgagagtgtttctgagggtgaaggaatagatgctaattcaggctccacagatagttctggtgatggggttacatttccatttaaaccagaatcctggaagcctactgatactgaaggtaagaagcagtatgacagggagtttctgctggacttccagttcatgcctgcctgtatacaaaaaccagagggcctgcctcctatcagtgatgtggttcttgacaagatcaaccaacccaaattgccaatgcgaactctggatcctcgaattttgcctcgaggaccagactttacaccagcctttgctgattttggaaggcagacacctggtggaagaggcgtacctttgttgaatgttgggtcacgaagatctcaacctggccaaagaagagaacccagaaagatcatcacagtttctgtaaaagaagatgtacacctgaaaaaggcagaaaatgcctggaagccaagccaaaaacgagacagccaagccgatgatcccgaaaacattaaaacccaggagctttttagaaaagttcgaagtatcttaaataaattgacaccacagatgttcaatcaactgatgaagcaagtgtcaggacttactgttgacacagaggagcggctgaaaggagttattgacctggtctttgagaaggctattgatgaacccagtttctctgtggcttacgcaaacatgtgtcgatgtctagtaacgctgaaagtacccatggcagacaagcctggtaacacagtgaatttccggaagctgctactgaaccgttgccagaaggagtttgaaaaagataaagcagatgatgatgtctttgagaagaagcagaaagaacttgaggctgccagtgctccagaggagaggacaaggcttcatgatgaactggaagaagccaaggacaaagcccggcggagatccattggcaacatcaagtttattggagaactctttaaactcaaaatgctgactgaagccatcatgcatgactgtgtggtgaagctgctaaagaaccatgatgaagaatccctggagtgcctgtgtcgcctgctcaccaccattggcaaagacttggactttgaaaaagcaaagccacgtatggaccagtactttaatcagatggagaaaattgtgaaagaaagaaaaacctcatctaggattcggttcatgcttcaagatgttatagacctaaggctgtgcaattgggtatctcgaagagcagatcaagggcctaaaactatcgaacagattcacaaagaggctaaaatagaagaacaagaagagcaaaggaaggtccagcaactcatgaccaaagagaagagaagaccaggtgtccagagagtggacgaaggtgggtggaacactgtacaaggggccaagaacagtcgggtactggacccctcaaaattcctaaaaatcactaagcctacaattgatgaaaaaattcagctggtacctaaagcacagctaggcagctggggaaaaggcagcagtggtggagcaaaggcaagtgagactgatgccttacggtcaagtgcttccagtttaaacagattctctgccctgcaacctccagcaccctcagggtccacgccatccacgcctgtagagtttgattcccgaaggaccttaactagtcgtggaagtatgggcagggagaagaatgacaagccccttccatctgcaacagctcggccaaatactttcatgaggggtggcagcagtaaagacctgctagacaatcagtctcaagaagagcagcggagagagatgctggagaccgtgaagcagctcacaggaggtgtggatgtggagaggaacagcactgaggctgagcgaaataaaacaagggagtcagcaaaaccagaaatttcagcaatgtcagctcatgacaaggctgcattatcagaagaggaactggagaggaagtcgaaatctatcattgatgaatttctacacattaatgattttaaggaagccatgcagtgtgtggaagagctgaatgcccagggcctactacatgtttttgtgagagtgggagtggagtccaccctggaaaggagccagatcaccagggatcacatgggccaattactctatcagctggtacagtcagaaaaactcagcaaacaggactttttcaaaggtttttcagaaactttggaattggcagatgacatggccattgatattccccatatttggttgtaccttgctgaactggtgacccccatgttaaaagaaggtggaatctccatgagagaacttaccatagaatttagcaaacctttacttcctgttggaagagctggggtcttgctatctgaaatattgcacctactatgcaaacaaatgagccataagaaagtgggagccttatggagggaggctgacctcagctggaaggactttttaccagaaggagaagatgtacataattttcttttggagcagaagttggacttcatagagtctgacagtccctgttcctctgaagcactttcaaagaaagaactgtctgccgaagagctgtataagcgactcgagaaactcattattgaggacaaagcgaatgatgaacagatctttgactgggtagaggctaatctagacgaaatccagatgagttcacctacattccttagagctttaatgactgctgtttgtaaagcagctattatagccgactcttctaccttcagagtggacactgctgttatcaagcagagagtgccgatcttactcaagtacctagactcagatacagagaaggaactgcaagcactttatgcactacaagcatcgatagtaaaacttgatcaacctgccaatttgctgcggatgttttttgattgtctatatgacgaggaggtgatctccgaggatgccttctacaaatgggagagcagcaaggaccctgcagagcagaatgggaagggcgtggctctgaaatctgtcacggcattcttcacgtggctgcgggaagcagaagaggagtctgaggataactaaaacttcaaatacacaaaatgaaacaaaagaaacaatttaagtatttttttaaaaagtttcacgtcttcgccaatcacagtgcagcaaggccaattctcgcagaaacccccacgtgtgcacgagtgggagaggggaaagagaaaaaaaggtgatcatggaggaaaaaggtactggataaaagtaaacttcaaaccttagggcgggagcactaaaaccaaaatacatgtattatttatagaaaatattttctgttttaatcttttctttttaaacaaggactcatacttaaaaaaatgtttagcaaaaaaaaaaaaagttgagaacttttaatttattttaaggactgcaaatgccagtgtaattttttaatttgcagtttctgtaaacaacttgtataatagaaaagcagagaaataaatttccctccccttcaagatgcacctcatgtttgttttaaggtatagcatttagtccagatttgagaaagtttggggtgaacaaggtaagaaagatttttttttttttggcatcaaatctttctgcctgcctctcagcttgcttcagaaaatttaaaaaatcacaatagtaatcaaaacatacataacattgaaacagaaggaaatgctgtggaccacagaactccaagaattgtttaaaaaaaaaaaagtgctaccctgagaaaagtactcttaatactcttgaaatctttagagcaactttaaggcttgtaaatacatagaacaaatatttaaaaaaacaaaaagaaattgactcagtactatttcttttcactttgaaaatataaagaacaaaataaagacaaacattgcaagtttaaaagaaagtaaagtgacttctcctttggacagctgctgcatgtgtgcccattcctgggggtgctgtctggctatttattgtctaattcaaatcactcctgaggggagagagataaaacgagagagagtgagagagtgtgtgtatgtgcgtgtatgcgcacgtatgtgcatgcacatgtatgtatgtatat

SEQ ID NO: 131277 - DNA, 5762 bp, Homo sapiens
  Payload ID: 5623
  Gene Symbol: EIF4G3
  Gene Name: eukaryotic translation initiation factor 4 gamma, 3
  ENST ID: ENST00000400422
  CDS Start-End: 582-5447
ctgctcgttgagtgaagaaaatccaccggcatcgcctgagccccgctaccgagaagggcgccgcttcctccggggagggggataaagatcccccgccgccggcccatgaggatattgccgtgaaaggcacagcgactgcagcaggaaccggacccggcaccggagcggcggcggcggcggcagcagcggtaccgcctcctcacccggcggcggcagcagcggcggcggcggcggcggcggcggcggcggcggcagcggtcccccctcctcacccgaacatcagggccctccagactcaggcgccccaacaaattcctagaggacctgtgcaacaacctcttgaggatcgaatcttcactcccgctgtctcagcagtctacagcacggtaacacaagtggcaagacagccgggaacccctaccccatccccttattcagcacatgaaataaacaaggggcatccaaatcttgcggcaacgcccccgggacatgcatcgtcccctggactctctcaaaccccttatccctctggacagaatgcaggtccaaccacgctggtataccctcaaacccctcagacaatgaattcacaacctcaaacccgttctccgtttttccagaggcctcaaatacagcctcctagagctaccatcccgaacagcagtccttccattcgtcctggtgcacagacacccactgcagtgtaccaggctaatcagcacatcatgatggttaaccatctgcccatgccgtacccagtgccccaggggcctcagtactgtataccacagtaccgtcatagtggccctccttatgttgggcccccccaacaatatccagttcaaccaccggggccaggtcctttttatcctggaccaggacctggggacttccccaatgcttatggaacgcctttttacccaagtcagccggtgtatcagtcagcacctatcatagtgcctacgcagcaacagccgcctccagccaagagagagaaaaaaactataagaattcgggatccaaaccagggaggtaaagacataacagaggagattatgtctggaggtggcagcagaaatcctactccacccataggaagacccacgtccacacctactcctcctcagctgcccagccaggtccccgagcacagccctgtggtttatgggactgtggagagcgctcatcttgctgccagcacccctgtcactgcagctagcgaccagaagcaagaggagaagccaaaaccagatccagtgttaaagtctccttccccagtccttaggctagtcctcagtggagagaagaaagaacaagaaggccagacatctgaaactactgcaatagtatccatagcagagcttcctctgcctccatcacctaccactgtttcttctgttgctcgaagtacaattgcagcccccacctcttctgctcttagtagccaaccaatattcaccactgctatagatgacagatgtgaactctcatccccaagagaagacacaattcctatacccagcctcacatcttgcacagaaacatcagaccctttaccaacaaatgaaaatgatgatgatatatgcaagaaaccctgtagtgtagcacctaatgatattccactggtttctagtactaacctaattaatgaaataaatggagttagcgaaaaattatcagccacggagagcattgtggaaatagtaaaacaggaagtattgccattgactcttgaattggagattctcgaaaatcccccagaagaaatgaaactggagtgtatcccagctcccatcaccccttccacagttccttcctttcctccaactcctccaactcctccagcttctcctcctcacactccagtcattgttcctgctgctgccactactgttagttctccgagtgctgccatcacagtccagagagtcctagaggaggacgagagcataagaacttgccttagtgaagatgcaaaagagattcagaacaaaatagaggtagaagcagatgggcaaacagaagagattttggattctcaaaacttaaattcaagaaggagccctgtcccagctcaaatagctataactgtaccaaagacatggaagaaaccaaaagatcggacccgaaccactgaagagatgttagaggcagaattggagcttaaagctgaagaggagctttccattgacaaagtacttgaatctgaacaagataaaatgagccaggggtttcatcctgaaagagacccctctgacctaaaaaaagtgaaagctgtggaagaaaatggagaagaagctgagccagtacgtaatggtgctgagagtgtttctgagggtgaaggaatagatgctaattcaggctccacagatagttctggtgatggggttacatttccatttaaaccagaatcctggaagcctactgatactgaaggtaagaagcagtatgacagggagtttctgctggacttccagttcatgcctgcctgtatacaaaaaccagagggcctgcctcctatcagtgatgtggttcttgacaagatcaaccaacccaaattgccaatgcgaactctggatcctcgaattttgcctcgaggaccagactttacaccagcctttgctgattttggaaggcagacacctggtggaagaggcgtacctatttgcaaagtgcagagcaggcatggattgccaattctggaacagagcaaagccccaacttgccctccactggtgatgtcacacccacccatgaagagcctgcctctagggttgttgaatgttgggtcacgaagatctcaacctggccaaagaagagaacccagaaagatcatcacagtttctgtaaaagaagatgtacacctgaaaaaggcagaaaatgcctggaagccaagccaaaaacgagacagccaagccgatgatcccgaaaacattaaaacccaggagctttttagaaaagttcgaagtatcttaaataaattgacaccacagatgttcaatcaactgatgaagcaagtgtcaggacttactgttgacacagaggagcggctgaaaggagttattgacctggtctttgagaaggctattgatgaacccagtttctctgtggcttacgcaaacatgtgtcgatgtctagtaacgctgaaagtacccatggcagacaagcctggtaacacagtgaatttccggaagctgctactgaaccgttgccagaaggagtttgaaaaagataaagcagatgatgatgtctttgagaagaagcagaaagaacttgaggctgccagtgctccagaggagaggacaaggcttcatgatgaactggaagaagccaaggacaaagcccggcggagatccattggcaacatcaagtttattggagaactctttaaactcaaaatgctgactgaagccatcatgcatgactgtgtggtgaagctgctaaagaaccatgatgaagaatccctggagtgcctgtgtcgcctgctcaccaccattggcaaagacttggactttgaaaaagcaaagccacgtatggaccagtactttaatcagatggagaaaattgtgaaagaaagaaaaacctcatctaggattcggttcatgcttcaagatgttatagacctaaggctgtgcaattgggtatctcgaagagcagatcaagggcctaaaactatcgaacagattcacaaagaggctaaaatagaagaacaagaagagcaaaggaaggtccagcaactcatgaccaaagagaagagaagaccaggtgtccagagagtggacgaaggtgggtggaacactgtacaaggggccaagaacagtcgggtactggacccctcaaaattcctaaaaatcactaagcctacaattgatgaaaaaattcagctggtacctaaagcacagctaggcagctggggaaaaggcagcagtggtggagcaaaggcaagtgagactgatgccttacggtcaagtgcttccagtttaaacagattctctgccctgcaacctccagcaccctcagggtccacgccatccacgcctgtagagtttgattcccgaaggaccttaactagtcgtggaagtatgggcagggagaagaatgacaagccccttccatctgcaacagctcggccaaatactttcatgaggggtggcagcagtaaagacctgctagacaatcagtctcaagaagagcagcggagagagatgctggagaccgtgaagcagctcacaggaggtgtggatgtggagaggaacagcactgaggctgagcgaaataaaacaagggagtcagcaaaaccagaaatttcagcaatgtcagctcatgacaaggctgcattatcagaagaggaactggagaggaagtcgaaatctatcattgatgaatttctacacattaatgattttaaggaagccatgcagtgtgtggaagagctgaatgcccagggcctactacatgtttttgtgagagtgggagtggagtccaccctggaaaggagccagatcaccagggatcacatgggccaattactctatcagctggtacagtcagaaaaactcagcaaacaggactttttcaaaggtttttcagaaactttggaattggcagatgacatggccattgatattccccatatttggttgtaccttgctgaactggtgacccccatgttaaaagaaggtggaatctccatgagagaacttaccatagaatttagcaaacctttacttcctgttggaagagctggggtcttgctatctgaaatattgcacctactatgcaaacaaatgagccataagaaagtgggagccttatggagggaggctgacctcagctggaaggactttttaccagaaggagaagatgtacataattttcttttggagcagaagttggacttcatagagtctgacagtccctgttcctctgaagcactttcaaagaaagaactgtctgccgaagagctgtataagcgactcgagaaactcattattgaggacaaagcgaatgatgaacagatctttgactgggtagaggctaatctagacgaaatccagatgagttcacctacattccttagagctttaatgactgctgtttgtaaagcagctattatagccgactcttctaccttcagagtggacactgctgttatcaagcagagagtgccgatcttactcaagtacctagactcagatacagagaaggaactgcaagcactttatgcactacaagcatcgatagtaaaacttgatcaacctgccaatttgctgcggatgttttttgattgtctatatgacgaggaggtgatctccgaggatgccttctacaaatgggagagcagcaaggaccctgcagagcagaatgggaagggcgtggctctgaaatctgtcacggcattcttcacgtggctgcgggaagcagaagaggagtctgaggataactaaaacttcaaatacacaaaatgaaacaaaagaaacaatttaagtatttttttaaaaagtttcacgtcttcgccaatcacagtgcagcaaggccaattctcgcagaaacccccacgtgtgcacgagtgggagaggggaaagagaaaaaaaggtgatcatggaggaaaaaggtactggataaaagtaaacttcaaaccttagggcgggagcactaaaaccaaaatacatgtattatttatagaaaatattttctgttttaatcttttctttttaaacaaggactcatacttaaaaaaatgtttagcaaaaaaaaaaaaa

SEQ ID NO: 131278 - DNA, 1270 bp, Homo sapiens
  Payload ID: 5623
  Gene Symbol: EIF4G3
  Gene Name: eukaryotic translation initiation factor 4 gamma, 3
  ENST ID: ENST00000438975
  CDS Start-End: 619-1270
gactgctggaggcggccacagcgccatgttggatgctctgctcgttgagtgaagaaaatccaccggcatcgcctgagccccgctaccgagaagggcgccgcttcctccggggagggggataaagatcccccgccgccggcccatgaggatattgccgtgaaaggcacagcgactgcagcaggaaccggacccggcaccggagcggcggcggcggcggcagcagcggtaccgcctcctcacccggcggcggcagcagcggcggcggcggcggcggcggcggcggcggcggcagcggtcccccctcctcacccgaacatcagggccctccagactcaggcgccccaacaaattcctagaggacctgtgcaacaacctcttgaggatcgaatcttcactcccgctgtctcagcagtctacagcacggtaacacaagtggcaagacagccgggaacccctaccccatccccttattcagcacatgaaataaacaaggggcatccaaatcttgcggcaacgcccccgggacatgcatcgtcccctggactctctcaaaccccttatccctctggacagaatgcaggtccaaccacgctggtataccctcaaacccctcagacaatgaattcacaacctcaaacccgttctccgtttttccagaggcctcaaatacagcctcctagagctaccatcccgaacagcagtccttccattcgtcctggtgcacagacacccactgcagtgtaccaggctaatcagcacatcatgatggttaaccatctgcccatgccgtacccagtgccccaggggcctcagtactgtataccacagtaccgtcatagtggccctccttatgttgggcccccccaacaatatccagttcaaccaccggggccaggtcctttttatcctggaccaggacctggggacttccccaatgcttatggaacgcctttttacccaagtcagccggtgtatcagtcagcacctatcatagtgcctacgcagcaacagccgcctccagccaagagagagaaaaaaactataagaattcgggatccaaaccagggaggtaaagacataacagaggagattatgtctggaggtggcagcagaaatcctactccacccataggaagacccacgtccacacctactcctcctcagcagctgcccagccaggtccccgagcacagccctgtggtttatgggactgtggagagcgctcatcttgctgccagcacccctgtcactgcagctagcgaccagaagc

SEQ ID NO: 131279 - DNA, 1122 bp, Homo sapiens
  Payload ID: 5623
  Gene Symbol: EIF4G3
  Gene Name: eukaryotic translation initiation factor 4 gamma, 3
  ENST ID: ENST00000411888
  CDS Start-End: 463-1122
gttggatgctctgctcgttgagtgaagaaaatccaccggcatcgcctgagccccgctaccgagaagggcgccgcttcctccggggagggggataaagatcccccgccgccggcccatgaggatattgccgtgaaaggcacagcgactgcagcaggaaccggacccggcaccggagcggcggcggcggcggcagcagcggtaccgcctcctcacccggcggcggcagcagcggcggcggcggcggcggcggcggcggcggcggcagcggtcccccctcctcacccgaacatcagggccctccagactcaggcgccccaacaaattcctagaggacctgtgcaacaacctcttgaggatcgaatcttcactcccgctgtctcagcagtctacagcacgaccccttatccctctggacagaatgcaggtccaaccacgctggtataccctcaaacccctcagacaatgaattcacaacctcaaacccgttctccgcccagcagaacagtgccaatacattgcacagacaactggaagaggaggaaggttttggaacagactcccgtttacaggtccttggctggaagaggctggataaaatactgcatttttttccagaggcctcaaatacagcctcctagagctaccatcccgaacagcagtccttccattcgtcctggtgcacagacacccactgcagtgtaccaggctaatcagcacatcatgatggttaaccatctgcccatgccgtacccagtgccccaggggcctcagtactgtataccacagtaccgtcatagtggccctccttatgttgggcccccccaacaatatccagttcaaccaccggggccaggtcctttttatcctggaccaggacctggggacttccccaatgcttatggaacgcctttttacccaagtcagccggtgtatcagtcagcacctatcatagtgcctacgcagcaacagccgcctccagccaagagagagaaaaaaactataagaattcgggatccaaaccagggaggtaaagacataacagaggagattatgtctggaggtggcagcagaaatcctactccacccataggaagacccacgtccacacctactcctcctcag

SEQ ID NO: 131280 - DNA, 6196 bp, Homo sapiens
  Payload ID: 5623
  Gene Symbol: EIF4G3
  Gene Name: eukaryotic translation initiation factor 4 gamma, 3
  Uniprot ID: O43432
  ENST ID: ENST00000602326
  CDS Start-End: 585-5360
gctctgctcgttgagtgaagaaaatccaccggcatcgcctgagccccgctaccgagaagggcgccgcttcctccggggagggggataaagatcccccgccgccggcccatgaggatattgccgtgaaaggcacagcgactgcagcaggaaccggacccggcaccggagcggcggcggcggcggcagcagcggtaccgcctcctcacccggcggcggcagcagcggcggcggcggcggcggcggcggcggcggcggcagcggtcccccctcctcacccgaacatcagggccctccagactcaggcgccccaacaaattcctagaggacctgtgcaacaacctcttgaggatcgaatcttcactcccgctgtctcagcagtctacagcacggtaacacaagtggcaagacagccgggaacccctaccccatccccttattcagcacatgaaataaacaaggggcatccaaatcttgcggcaacgcccccgggacatgcatcgtcccctggactctctcaaaccccttatccctctggacagaatgcaggtccaaccacgctggtataccctcaaacccctcagacaatgaattcacaacctcaaacccgttctccgggaggattcagacctatccagtttttccagaggcctcaaatacagcctcctagagctaccatcccgaacagcagtccttccattcgtcctggtgcacagacacccactgcagtgtaccaggctaatcagcacatcatgatggttaaccatctgcccatgccgtacccagtgccccaggggcctcagtactgtataccacagtaccgtcatagtggccctccttatgttgggcccccccaacaatatccagttcaaccaccggggccaggtcctttttatcctggaccaggacctggggacttccccaatgcttatggaacgcctttttacccaagtcagccggtgtatcagtcagcacctatcatagtgcctacgcagcaacagccgcctccagccaagagagagaaaaaaactataagaattcgggatccaaaccagggaggtaaagacataacagaggagattatgtctggaggtggcagcagaaatcctactccacccataggaagacccacgtccacacctactcctcctcagctgcccagccaggtccccgagcacagccctgtggtttatgggactgtggagagcgctcatcttgctgccagcacccctgtcactgcagctagcgaccagaagcaagaggagaagccaaaaccagatccagtgttaaagtctccttccccagtccttaggctagtcctcagtggagagaagaaagaacaagaaggccagacatctgaaactactgcaatagtatccatagcagagcttcctctgcctccatcacctaccactgtttcttctgttgctcgaagtacaattgcagcccccacctcttctgctcttagtagccaaccaatattcaccactgctatagatgacagatgtgaactctcatccccaagagaagacacaattcctatacccagcctcacatcttgcacagaaacatcagaccctttaccaacaaatgaaaatgatgatgatatatgcaagaaaccctgtagtgtagcacctaatgatattccactggtttctagtactaacctaattaatgaaataaatggagttagcgaaaaattatcagccacggagagcattgtggaaatagtaaaacaggaagtattgccattgactcttgaattggagattctcgaaaatcccccagaagaaatgaaactggagtgtatcccagctcccatcaccccttccacagttccttcctttcctccaactcctccaactcctccagcttctcctcctcacactccagtcattgttcctgctgctgccactactgttagttctccgagtgctgccatcacagtccagagagtcctagaggaggacgagagcataagaacttgccttagtgaagatgcaaaagagattcagaacaaaatagaggtagaagcagatgggcaaacagaagagattttggattctcaaaacttaaattcaagaaggagccctgtcccagctcaaatagctataactgtaccaaagacatggaagaaaccaaaagatcggacccgaaccactgaagagatgttagaggcagaattggagcttaaagctgaagaggagctttccattgacaaagtacttgaatctgaacaagataaaatgagccaggggtttcatcctgaaagagacccctctgacctaaaaaaagtgaaagctgtggaagaaaatggagaagaagctgagccagtacgtaatggtgctgagagtgtttctgagggtgaaggaatagatgctaattcaggctccacagatagttctggtgatggggttacatttccatttaaaccagaatcctggaagcctactgatactgaaggtaagaagcagtatgacagggagtttctgctggacttccagttcatgcctgcctgtatacaaaaaccagagggcctgcctcctatcagtgatgtggttcttgacaagatcaaccaacccaaattgccaatgcgaactctggatcctcgaattttgcctcgaggaccagactttacaccagcctttgctgattttggaaggcagacacctggtggaagaggcgtacctttgttgaatgttgggtcacgaagatctcaacctggccaaagaagagaacccagaaagatcatcacagtttctgtaaaagaagatgtacacctgaaaaaggcagaaaatgcctggaagccaagccaaaaacgagacagccaagccgatgatcccgaaaacattaaaacccaggagctttttagaaaagttcgaagtatcttaaataaattgacaccacagatgttcaatcaactgatgaagcaagtgtcaggacttactgttgacacagaggagcggctgaaaggagttattgacctggtctttgagaaggctattgatgaacccagtttctctgtggcttacgcaaacatgtgtcgatgtctagtaacgctgaaagtacccatggcagacaagcctggtaacacagtgaatttccggaagctgctactgaaccgttgccagaaggagtttgaaaaagataaagcagatgatgatgtctttgagaagaagcagaaagaacttgaggctgccagtgctccagaggagaggacaaggcttcatgatgaactggaagaagccaaggacaaagcccggcggagatccattggcaacatcaagtttattggagaactctttaaactcaaaatgctgactgaagccatcatgcatgactgtgtggtgaagctgctaaagaaccatgatgaagaatccctggagtgcctgtgtcgcctgctcaccaccattggcaaagacttggactttgaaaaagcaaagccacgtatggaccagtactttaatcagatggagaaaattgtgaaagaaagaaaaacctcatctaggattcggttcatgcttcaagatgttatagacctaaggctgtgcaattgggtatctcgaagagcagatcaagggcctaaaactatcgaacagattcacaaagaggctaaaatagaagaacaagaagagcaaaggaaggtccagcaactcatgaccaaagagaagagaagaccaggtgtccagagagtggacgaaggtgggtggaacactgtacaaggggccaagaacagtcgggtactggacccctcaaaattcctaaaaatcactaagcctacaattgatgaaaaaattcagctggtacctaaagcacagctaggcagctggggaaaaggcagcagtggtggagcaaaggcaagtgagactgatgccttacggtcaagtgcttccagtttaaacagattctctgccctgcaacctccagcaccctcagggtccacgccatccacgcctgtagagtttgattcccgaaggaccttaactagtcgtggaagtatgggcagggagaagaatgacaagccccttccatctgcaacagctcggccaaatactttcatgaggggtggcagcagtaaagacctgctagacaatcagtctcaagaagagcagcggagagagatgctggagaccgtgaagcagctcacaggaggtgtggatgtggagaggaacagcactgaggctgagcgaaataaaacaagggagtcagcaaaaccagaaatttcagcaatgtcagctcatgacaaggctgcattatcagaagaggaactggagaggaagtcgaaatctatcattgatgaatttctacacattaatgattttaaggaagccatgcagtgtgtggaagagctgaatgcccagggcctactacatgtttttgtgagagtgggagtggagtccaccctggaaaggagccagatcaccagggatcacatgggccaattactctatcagctggtacagtcagaaaaactcagcaaacaggactttttcaaaggtttttcagaaactttggaattggcagatgacatggccattgatattccccatatttggttgtaccttgctgaactggtgacccccatgttaaaagaaggtggaatctccatgagagaacttaccatagaatttagcaaacctttacttcctgttggaagagctggggtcttgctatctgaaatattgcacctactatgcaaacaaatgagccataagaaagtgggagccttatggagggaggctgacctcagctggaaggactttttaccagaaggagaagatgtacataattttcttttggagcagaagttggacttcatagagtctgacagtccctgttcctctgaagcactttcaaagaaagaactgtctgccgaagagctgtataagcgactcgagaaactcattattgaggacaaagcgaatgatgaacagatctttgactgggtagaggctaatctagacgaaatccagatgagttcacctacattccttagagctttaatgactgctgtttgtaaagcagctattatagccgactcttctaccttcagagtggacactgctgttatcaagcagagagtgccgatcttactcaagtacctagactcagatacagagaaggaactgcaagcactttatgcactacaagcatcgatagtaaaacttgatcaacctgccaatttgctgcggatgttttttgattgtctatatgacgaggaggtgatctccgaggatgccttctacaaatgggagagcagcaaggaccctgcagagcagaatgggaagggcgtggctctgaaatctgtcacggcattcttcacgtggctgcgggaagcagaagaggagtctgaggataactaaaacttcaaatacacaaaatgaaacaaaagaaacaatttaagtatttttttaaaaagtttcacgtcttcgccaatcacagtgcagcaaggccaattctcgcagaaacccccacgtgtgcacgagtgggagaggggaaagagaaaaaaaggtgatcatggaggaaaaaggtactggataaaagtaaacttcaaaccttagggcgggagcactaaaaccaaaatacatgtattatttatagaaaatattttctgttttaatcttttctttttaaacaaggactcatacttaaaaaaatgtttagcaaaaaaaaaaaaagttgagaacttttaatttattttaaggactgcaaatgccagtgtaattttttaatttgcagtttctgtaaacaacttgtataatagaaaagcagagaaataaatttccctccccttcaagatgcacctcatgtttgttttaaggtatagcatttagtccagatttgagaaagtttggggtgaacaaggtaagaaagatttttttttttttggcatcaaatctttctgcctgcctctcagcttgcttcagaaaatttaaaaaatcacaatagtaatcaaaacatacataacattgaaacagaaggaaatgctgtggaccacagaactccaagaattgtttaaaaaaaaaaaagtgctaccctgagaaaagtactcttaatactcttgaaatctttagagcaactttaaggcttgtaaatacatagaacaaatatttaaaaaaacaaaaagaaattgactcagtactatttcttttcactttgaaaatataaagaacaaaataaagacaaacattgcaagttt

SEQ ID NO: 131281 - DNA, 5325 bp, Homo sapiens
  Payload ID: 5623
  Gene Symbol: EIF4G3
  Gene Name: eukaryotic translation initiation factor 4 gamma, 3
  ENST ID: ENST00000634879
  CDS Start-End: 1-5325
gtgaagaaaatccaccggcatcgcctgagccccgctaccgagaagggcgccgcttcctccggggagggggataaagatcccccgccgccggcccatgaggatattgccgtgaaaggcacagcgactgcagcaggaaccggacccggcaccggagcggcggcggcggcggcagcagcggtaccgcctcctcacccggcggcggcagcagcggcggcggcggcggcggcggcggcggcggcggcagcggtcccccctcctcacccgaacatcagggccctccagactcaggcgccccaacaaattcctagaggacctgtgcaacaacctcttgaggatcgaatcttcactcccgctgtctcagcagtctacagcacggtaacacaagtggcaagacagccgggaacccctaccccatccccttattcagcacatgaaataaacaaggggcatccaaatcttgcggcaacgcccccgggacatgcatcgtcccctggactctctcaaaccccttatccctctggacagaatgcaggtccaaccacgctggtataccctcaaacccctcagacaatgaattcacaacctcaaacccgttctccgtttttccagaggcctcaaatacagcctcctagagctaccatcccgaacagcagtccttccattcgtcctggtgcacagacacccactgcagtgtaccaggctaatcagcacatcatgatggttaaccatctgcccatgccgtacccagtgccccaggggcctcagtactgtataccacagtaccgtcatagtggccctccttatgttgggcccccccaacaatatccagttcaaccaccggggccaggtcctttttatcctggaccaggacctggggacttccccaatgcttatggaacgcctttttacccaagtcagccggtgtatcagtcagcacctatcatagtgcctacgcagcaacagccgcctccagccaagagagagaaaaaaactataagaattcgggatccaaaccagggaggtaaagacataacagaggagattatgtctggaggtggcagcagaaatcctactccacccataggaagacccacgtccacacctactcctcctcagctgcccagccaggtccccgagcacagccctgtggtttatgggactgtggagagcgctcatcttgctgccagcacccctgtcactgcagctagcgaccagaagcaagaggagaagccaaaaccagatccagtgttaaagtctccttccccagtccttaggctagtcctcagtggagagaagaaagaacaagaaggccagacatctgaaactactgcaatagtatccatagcagagcttcctctgcctccatcacctaccactgtttcttctgttgctcgaagtacaattgcagcccccacctcttctgctcttagtagccaaccaatattcaccactgctatagatgacagatgtgaactctcatccccaagagaagacacaattcctatacccagcctcacatcttgcacagaaacatcagaccctttaccaacaaatgaaaatgatgatgatatatgcaagaaaccctgtagtgtagcacctaatgatattccactggtttctagtactaacctaattaatgaaataaatggagttagcgaaaaattatcagccacggagagcattgtggaaatagtaaaacaggaagtattgccattgactcttgaattggagattctcgaaaatcccccagaagaaatgaaactggagtgtatcccagctcccatcaccccttccacagttccttcctttcctccaactcctccaactcctccagcttctcctcctcacactccagtcattgttcctgctgctgccactactgttagttctccgagtgctgccatcacagtccagagagtcctagaggaggacgagagcataagaacttgccttagtgaagatgcaaaagagattcagaacaaaatagaggtagaagcagatgggcaaacagaagagattttggattctcaaaacttaaattcaagaaggagccctgtcccagctcaaatagctataactgtaccaaagacatggaagaaaccaaaagatcggacccgaaccactgaagagatgttagaggcagaattggagcttaaagctgaagaggagctttccattgacaaagtacttgaatctgaacaagataaaatgagccaggggtttcatcctgaaagagacccctctgacctaaaaaaagtgaaagctgtggaagaaaatggagaagaagctgagccagtacgtaatggtgctgagagtgtttctgagggtgaaggaatagatgctaattcaggctccacagatagttctggtgatggggttacatttccatttaaaccagaatcctggaagcctactgatactgaaggtaagaagcagtatgacagggagtttctgctggacttccagttcatgcctgcctgtatacaaaaaccagagggcctgcctcctatcagtgatgtggttcttgacaagatcaaccaacccaaattgccaatgcgaactctggatcctcgaattttgcctcgaggaccagactttacaccagcctttgctgattttggaaggcagacacctggtggaagaggcgtacctttgttgaatgttgggtcacgaagatctcaacctggccaaagaagagaacccagaaagatcatcacagtttctgtaaaagaagatgtacacctgaaaaaggcagaaaatgcctggaagccaagccaaaaacgagacagccaagccgatgatcccgaaaacattaaaacccaggagctttttagaaaagttcgaagtatcttaaataaattgacaccacagatgttcaatcaactgatgaagcaagtgtcaggacttactgttgacacagaggagcggctgaaaggagttattgacctggtctttgagaaggctattgatgaacccagtttctctgtggcttacgcaaacatgtgtcgatgtctagtaacgctgaaagtacccatggcagacaagcctggtaacacagtgaatttccggaagctgctactgaaccgttgccagaaggagtttgaaaaagataaagcagatgatgatgtctttgagaagaagcagaaagaacttgaggctgccagtgctccagaggagaggacaaggcttcatgatgaactggaagaagccaaggacaaagcccggcggagatccattggcaacatcaagtttattggagaactctttaaactcaaaatgctgactgaagccatcatgcatgactgtgtggtgaagctgctaaagaaccatgatgaagaatccctggagtgcctgtgtcgcctgctcaccaccattggcaaagacttggactttgaaaaagcaaagccacgtatggaccagtactttaatcagatggagaaaattgtgaaagaaagaaaaacctcatctaggattcggttcatgcttcaagatgttatagacctaaggctgtgcaattgggtatctcgaagagcagatcaagggcctaaaactatcgaacagattcacaaagaggctaaaatagaagaacaagaagagcaaaggaaggtccagcaactcatgaccaaagagaagagaagaccaggtgtccagagagtggacgaaggtgggtggaacactgtacaaggggccaagaacagtcgggtactggacccctcaaaattcctaaaaatcactaagcctacaattgatgaaaaaattcagctggtacctaaagcacagctaggcagctggggaaaaggcagcagtggtggagcaaaggcaagtgagactgatgccttacggtcaagtgcttccagtttaaacagattctctgccctgcaacctccagcaccctcagggtccacgccatccacgcctgtagagtttgattcccgaaggaccttaactagtcgtggaagtatgggcagggagaagaatgacaagccccttccatctgcaacagctcggccaaatactttcatgaggggtggcagcagtaaagacctgctagacaatcagtctcaagaagagcagcggagagagatgctggagaccgtgaagcagctcacaggaggtgtggatgtggagaggaacagcactgaggctgagcgaaataaaacaagggagtcagcaaaaccagaaatttcagcaatgtcagctcatgacaaggctgcattatcagaagaggaactggagaggaagtcgaaatctatcattgatgaatttctacacattaatgattttaaggaagccatgcagtgtgtggaagagctgaatgcccagggcctactacatgtttttgtgagagtgggagtggagtccaccctggaaaggagccagatcaccagggatcacatgggccaattactctatcagctggtacagtcagaaaaactcagcaaacaggactttttcaaaggtttttcagaaactttggaattggcagatgacatggccattgatattccccatatttggttgtaccttgctgaactggtgacccccatgttaaaagaaggtggaatctccatgagagaacttaccatagaatttagcaaacctttacttcctgttggaagagctggggtcttgctatctgaaatattgcacctactatgcaaacaaatgagccataagaaagtgggagccttatggagggaggctgacctcagctggaaggactttttaccagaaggagaagatgtacataattttcttttggagcagaagttggacttcatagagtctgacagtccctgttcctctgaagcactttcaaagaaagaactgtctgccgaagagctgtataagcgactcgagaaactcattattgaggacaaagcgaatgatgaacagatctttgactgggtagaggctaatctagacgaaatccagatgagttcacctacattccttagagctttaatgactgctgtttgtaaagcagctattatagccgactcttctaccttcagagtggacactgctgttatcaagcagagagtgccgatcttactcaagtacctagactcagatacagagaaggaactgcaagcactttatgcactacaagcatcgatagtaaaacttgatcaacctgccaatttgctgcggatgttttttgattgtctatatgacgaggaggtgatctccgaggatgccttctacaaatgggagagcagcaaggaccctgcagagcagaatgggaagggcgtggctctgaaatctgtcacggcattcttcacgtggctgcgggaagcagaagaggagtctgaggataactaa

SEQ ID NO: 131282 - DNA, 1756 bp, Homo sapiens
  Payload ID: 5624
  Gene Symbol: EIF4A1
  Gene Name: eukaryotic translation initiation factor 4A1
  Uniprot ID: P60842
  ENST ID: ENST00000293831
  CDS Start-End: 17-1237
ctagtttctaaggatcatgtctgcgagccaggattcccgatccagagacaatggccccgatgggatggagcccgaaggcgtcatcgagagtaactggaatgagattgttgacagctttgatgacatgaacctctcggagtcccttctccgtggcatctacgcgtatggttttgagaagccctctgccatccagcagcgagccattctaccttgtatcaagggttatgatgtgattgctcaagcccaatctgggactgggaaaacggccacatttgccatatcgattctgcagcagattgaattagatctaaaagccacccaggccttggtcctagcacccactcgagaattggctcagcagatacagaaggtggtcatggcactaggagactacatgggcgcctcctgtcacgcctgtatcgggggcaccaacgtgcgtgctgaggtgcagaaactgcagatggaagctccccacatcatcgtgggtacccctggccgtgtgtttgatatgcttaaccggagatacctgtcccccaaatacatcaagatgtttgtactggatgaagctgacgaaatgttaagccgtggattcaaggaccagatctatgacatattccaaaagctcaacagcaacacccaggtagttttgctgtcagccacaatgccttctgatgtgcttgaggtgaccaagaagttcatgagggaccccattcggattcttgtcaagaaggaagagttgaccctggagggtatccgccagttctacatcaacgtggaacgagaggagtggaagctggacacactatgtgacttgtatgaaaccctgaccatcacccaggcagtcatcttcatcaacacccggaggaaggtggactggctcaccgagaagatgcatgctcgagatttcactgtatccgccatgcatggagatatggaccaaaaggaacgagacgtgattatgagggagtttcgttctggctctagcagagttttgattaccactgacctgctggccagaggcattgatgtgcagcaggtttctttagtcatcaactatgaccttcccaccaacagggaaaactatatccacagaatcggtcgaggtggacggtttggccgtaaaggtgtggctattaacatggtgacagaagaagacaagaggactcttcgagacattgagaccttctacaacacctccattgaggaaatgcccctcaatgttgctgacctcatctgaggggctgtcctgccacccagccccagccagggctcaatctctgggggctgaggagcagcaggaggggggagggaagggagccaagggatggacatcttgtcattttttttctttgaataaatgtcactttttgaggcaaaagaaggaaccgtgaacattttagacacccttttctttggggtaggctcttgccccaggcgccggctcttctcccaaaaaaaaaaaaaaaacactaatccatttccctaacctagtaacctccagatcccagaggctctcctcacctcagctgagctcctttgaaagtgattcaagggactatgtcactcagcctcatttgctggaccaaatctggagggagaacccctaaaacccctaagtgaggttgcccagggggttgtccccaggtggggggaagcaggggagagaaaatggtagccatttttacattgttttgtatagtatttattgattcaggaaacaaacacaaaattctgaataaaatgacttggaaactgc

SEQ ID NO: 131283 - DNA, 568 bp, Homo sapiens
  Payload ID: 5624
  Gene Symbol: EIF4A1
  Gene Name: eukaryotic translation initiation factor 4A1
  ENST ID: ENST00000579139
  CDS Start-End: 16-273
tagtttctaaggatcatgtctgcgagccaggattcccggactgagcctaaccccgaggagcggccgcgtgaggcaccaggagcccacccggcgccgggcgggcgggtccattttgccgcacaagccgggctattggcaaactgcggatgggcaggtccaccttccttcgggggtgagcggcctgagatccagagacaatggccccgatgggatggagcccgaaggcgtcatcgagtaactggaatgagattgttgacagctttgatgacatgaacctctcggagtcccttctccgtggcatctacgcgtatggttttgagaagccctctgccatccagcagcgagccattctaccttgtatcaagggttatgatgtgattgctcaagcccaatctgggactgggaaaacggccacatttgccatatcgattctgcagcagattgaattagatctaaaagccacccaggccttggtcctagcacccactcgagaattggctcagcaggtaagagtggcttctattccctccttcagggctgatttagggatgatgagtataatccaagg

SEQ ID NO: 131284 - DNA, 577 bp, Homo sapiens
  Payload ID: 5624
  Gene Symbol: EIF4A1
  Gene Name: eukaryotic translation initiation factor 4A1
  ENST ID: ENST00000585024
  CDS Start-End: 15-577
agtttctaaggatcatgtctgcgagccaggattcccgagacaatggccccgatgggatggagcccgaaggcgtcatcgagagtaactggaatgagattgttgacagctttgatgacatgaacctctcggagtcccttctccgtggcatctacgcgtatggttttgagaagccctctgccatccagcagcgagccattctaccttgtatcaagggttatgatgtgattgctcaagcccaatctgggactgggaaaacggccacatttgccatatcgattctgcagcagattgaattagatctaaaagccacccaggccttggtcctagcacccactcgagaattggctcagcagatacagaaggtggtcatggcactaggagactacatgggcgcctcctgtcacgcctgtatcgggggcaccaacgtgcgtgctgaggtgcagaaactgcagatggaagctccccacatcatcgtgggtacccctggccgtgtgtttgatatgcttaaccggagatacctgtcccccaaatacatcaagatgtttgtactggatgaagctgacgaaatgttaagccg

SEQ ID NO: 131285 - DNA, 696 bp, Homo sapiens
  Payload ID: 5624
  Gene Symbol: EIF4A1
  Gene Name: eukaryotic translation initiation factor 4A1
  ENST ID: ENST00000577929
  CDS Start-End: 442-696
aggggatgtcctaccctccgatctgggaggtgaagggcgggacttccagcgcgctggtgctgcggtgggaggtgcacgcgcttgggctttaagcggctgggtcgggcccacgtggacccggcggcaagcaccacctctgggcaccgtgagcgcggcggcacgcctgccggcctgtcttcagaaagggtcacccccttatgtcgggggtggcctggcctgagccgctgcctgcatggggcaaatgcctcagttttatagaaactcctcctttgggtattttttgggagctggtgggagttggatctgggacagcagattgatggcatcatgcaggccactcctgacagagcccggctgtcaggatttctgagtgcttcggtcgggcaggggacaaaacttatgctttaaaccaacagatccagagacaatggccccgatgggatggagcccgaaggcgtcatcgagagtaactggaatgagattgttgacagctttgatgacatgaacctctcggagtcccttctccgtggcatctacgcgtatggttttgagaagccctctgccatccagcagcgagccattctaccttgtatcaagggttatgatgtgattgctcaagcccaatctgggactgggaaaacggccacatttgccatatcgattctgcagcagattgaattagatctaaaagccacc

SEQ ID NO: 131286 - DNA, 710 bp, Homo sapiens
  Payload ID: 5624
  Gene Symbol: EIF4A1
  Gene Name: eukaryotic translation initiation factor 4A1
  ENST ID: ENST00000580888
  CDS Start-End: 61-213
ggaactaacgtcatgccgagttgctgagcgccggcaggcggggccggggcggccaaaccaatgcgatggccggggcggagtcgggcgctctataagttgtcgataggcgggcactccgccctagtttctaaggatcatgtctgcgagccaggattcccgatccagagacaatggccccgatgggatggagcccgaaggcgtcatcgagagtaactggaatgagattgttgacagctttgatgacatgaacctctcggagtcccttctccgtggcatctacgcgtatggttttgagaagccctctgccatccagcagcgagccattctaccttgtatcaagggttatgatgtgattgctcaagcccaatctgggactgggaaaacggccacatttgccatatcgattctgcagcagattgaattagatctaaaagccacccaggccttggtcctagcacccactcgagaattggctcagcagatacagaaggtggtcatggcactaggagactacatgggcgcctcctgtcacgcctgtatcgggggcaccaacgtgcgtgctgaggtgcagaaactgcagatggaagctccccacatcatcgtgggtacccctggccgtgtgtttgatatgcttaaccggagatacctgtcccccaaatacatcaagatgtttgtactggatgaagctgacgaaatgttaagccgtggat

SEQ ID NO: 131287 - DNA, 951 bp, Homo sapiens
  Payload ID: 5624
  Gene Symbol: EIF4A1
  Gene Name: eukaryotic translation initiation factor 4A1
  ENST ID: ENST00000583389
  CDS Start-End: 1-691
ggtggtcatggcactaggagactacatgggcgcctcctgtcacgcctgtatcgggggcaccaacgtgcgtgctgaggtgcagaaactgcagatggaagctccccacatcatcgtgggtacccctggccgtgtgtttgatatgcttaaccggagatacctgtcccccaaatacatcaagatgtttgtactggatgaagctgacgaaatgttaagccgtggattcaaggaccagatctatgacatattccaaaagctcaacagcaacacccaggtagttttgctgtcagccacaatgccttctgatgtgcttgaggtgaccaagaagttcatgagggaccccattcggattcttgtcaagaaggaagagttgaccctggagggtatccgccagttctacatcaacgtggaacgagaggagtggaagctggacacactatgtgacttgtatgaaaccctgaccatcacccaggcagtcatcttcatcaacacccggaggaaggtggactggctcaccgagaagatgcatgctcgagatttcactgtatccgccatgcatggagatatggaccaaaaggaacgagacgtgattatgagggagtttcgttctggctctagcagagttttgattaccactgacctgctgggaaaactatatccacagaatcggtcgaggtggacggtttggccgtaaaggtgtggctattaacatggtgacagaagaagacaagaggactcttcgagacattgagaccttctacaacacctccattgaggaaatgcccctcaatgttgctgacctcatctgaggggctgtcctgccacccagccccagccagggctcaatctctgggggctgaggagcagcaggaggggggagggaagggagccaagggatggacatcttgtcattttttttctttgaataaatgtcactttttgaggcaaaagaag

SEQ ID NO: 131288 - DNA, 447 bp, Homo sapiens
  Payload ID: 5624
  Gene Symbol: EIF4A1
  Gene Name: eukaryotic translation initiation factor 4A1
  ENST ID: ENST00000581770
  CDS Start-End: 193-447
agatccagtcacttcgtcgcggctaaaacacgggtcggggagaagaaaccggccgttcagtgtgctggttttcttgacggccaggactgagcctaaccccgaggagcggccgcgtgaggcaccaggagcccacccggcgccgggcgggcgggtccattttgccgcacaagccgggctattggcaaactgcggatgggcaggtccaccttccttcggggatccagagacaatggccccgatgggatggagcccgaaggcgtcatcgagagtaactggaatgagattgttgacagctttgatgacatgaacctctcggagtcccttctccgtggcatctacgcgtatggttttgagaagccctctgccatccagcagcgagccattctaccttgtatcaagggttatgatgtgattgctcaagcccaatctgggactgggaaaacggcc

SEQ ID NO: 131289 - DNA, 1645 bp, Homo sapiens
  Payload ID: 5624
  Gene Symbol: EIF4A1
  Gene Name: eukaryotic translation initiation factor 4A1
  ENST ID: ENST00000582746
  CDS Start-End: 1-1026
atgtctgcgagccaggattcccgatccagagacaatggccccgatgggatggagcccgaaggcgtcatcgagagtaactggaatgagattgttgacagctttgatgacatgaacctctcggagtcccttctccgtggcatctacgcgtatggttttgagaagccctctgccatccagcagcgagccattctaccttgtatcaagggttatgatgtgattgctcaagcccaatctgggactgggaaaacggccacatttgccatatcgattctgcagcagattgaattagatctaaaagccacccaggccttggtcctagcacccactcgagaattggctcagcagatacagaaggtggtcatggcactaggagactacatgggcgcctcctgtcacgcctgtatcgggggcaccaacgtgcgtgctgaggtgcagaaactgcagatggaagctccccacatcatcgtgggtacccctggccgtgtgtttgatatgcttaaccggagatacctgtcccccaaatacatcaagatgtttgtactggatgaagctgacgaaatgttaagccgtggattcaaggaccagatctatgacatattccaaaagctcaacagcaacacccaggtagttttgctgtcagccacaatgccttctgatgtgcttgaggtgaccaagaagttcatgagggaccccattcggattcttgtcaagaaggaagagttgaccctggagggtatccgccagttctacatcaacgtggaacgagaggagtggaagctggacacactatgtgacttgtatgaaaccctgaccatcacccaggcagtcatcttcatcaacacccggaggaaggtggactggctcaccgagaagatgcatgctcgagatttcactgtatccgccatgcatggagatatggaccaaaaggaacgagacgtgattatgagggagtttcgttctggctctagcagagttttgattaccactgacctgctgaatcggtcgaggtggacggtttggccgtaaaggtgtggctattaacatggtgacagaagaagacaagaggactcttcgagacattgagaccttctacaacacctccattgaggaaatgcccctcaatgttgctgacctcatctgaggggctgtcctgccacccagccccagccagggctcaatctctgggggctgaggagcagcaggaggggggagggaagggagccaagggatggacatcttgtcattttttttctttgaataaatgtcactttttgaggcaaaagaaggaaccgtgaacattttagacacccttttctttggggtaggctcttgccccaggcgccggctcttctcccaaaaaaaaaaaaaaaacactaatccatttccctaacctagtaacctccagatcccagaggctctcctcacctcagctgagctcctttgaaagtgattcaagggactatgtcactcagcctcatttgctggaccaaatctggagggagaacccctaaaacccctaagtgaggttgcccagggggttgtccccaggtggggggaagcaggggagagaaaatggtagccatttttacattgttttgtatagtatttattgattcaggaaacaaacacaaaattctgaataaaa

SEQ ID NO: 131290 - DNA, 1109 bp, Homo sapiens
  Payload ID: 5624
  Gene Symbol: EIF4A1
  Gene Name: eukaryotic translation initiation factor 4A1
  ENST ID: ENST00000584860
  CDS Start-End: 339-1109
tgtgccgggggagggacggcgcgcggggttccggagcattctgacggtaccactcgcgagaggcgggggtgcctggtccttagatccagtcacttcgtcgcggctaaaacacgggtcggggagaagaaaccggccgttcagtgtgctggttttcttgacggccaggactgagcctaaccccgaggagcggccgcgtgaggcaccaggagcccacccggcgccgggcgggcgggtccattttgccgcacaagccgggctattggcaaactgcggatgggcaggtccaccttccttcgggggtgagcggcctgagatccagagacaatggccccgatgggatggagcccgaaggcgtcatcgagagtaactggaatgagattgttgacagctttgatgacatgaacctctcggagtcccttctccgtggcatctacgcgtatggttttgagaagccctctgccatccagcagcgagccattctaccttgtatcaagggttatgatgtgattgctcaagcccaatctgggactgggaaaacggccacatttgccatatcgattctgcagcagattgaattagatctaaaagccacccaggccttggtcctagcacccactcgagaattggctcagcagatacagaaggtggtcatggcactaggagactacatgggcgcctcctgtcacgcctgtatcgggggcaccaacgtgcgtgctgaggtgcagaaactgcagatggaagctccccacatcatcgtgggtacccctggccgtgtgtttgatatgcttaaccggagatacctgtcccccaaatacatcaagatgtttgtactggatgaagctgacgaaatgttaagccgtggattcaaggaccagatctatgacatattccaaaagctcaacagcaacacccaggtagttttgctgtcagccacaatgccttctgatgtgcttgaggtgaccaagaagttcatgagggaccccattcggattcttgtcaagaaggaagagttgaccctggagggtatccgccagttctacatcaacgtggaacgagaggagtggaagctggacacactatgtgacttgtatgaaaccctgaccatcacc

SEQ ID NO: 131291 - DNA, 547 bp, Homo sapiens
  Payload ID: 5624
  Gene Symbol: EIF4A1
  Gene Name: eukaryotic translation initiation factor 4A1
  ENST ID: ENST00000578754
  CDS Start-End: 197-547
ctagtttctaaggatcatgtctgcgagccaggattcccggttatgatgtgattgctcaagcccaatctgggactgggaaaacggccacatttgccatatcgattctgcagcagattgaattagatctaaaagccacccaggccttggtcctagcacccactcgagaattggctcagcagcccccaaatacatcaagatgtttgtactggatgaagctgacgaaatgttaagccgtggattcaaggaccagatctatgacatattccaaaagctcaacagcaacacccaggtagttttgctgtcagccacaatgccttctgatgtgcttgaggtgaccaagaagttcatgagggaccccattcggattcttgtcaagaaggaagagttgaccctggagggtatccgccagttctacatcaacgtggaacgagaggagtggaagctggacacactatgtgacttgtatgaaaccctgaccatcacccaggcagtcatcttcatcaacacccggaggaaggtggactggctcaccgagaagatgcatgct

SEQ ID NO: 131292 - DNA, 552 bp, Homo sapiens
  Payload ID: 5624
  Gene Symbol: EIF4A1
  Gene Name: eukaryotic translation initiation factor 4A1
  ENST ID: ENST00000582169
  CDS Start-End: 149-552
ctagtttctaaggatcatgtctgcgagccaggattcccgatccagagacaatggccccgatgggatggagcccgaaggcgtcatcgagctttaatttctttgcatcccctagagtaactggaatgagattgttgacagctttgatgacatgaacctctcggagtcccttctccgtggcatctacgcgtatggttttgagaagccctctgccatccagcagcgagccattctaccttgtatcaagggttatgatgtgattgctcaagcccaatctgggactgggaaaacggccacatttgccatatcgattctgcagcagattgaattagatctaaaagccacccaggccttggtcctagcacccactcgagaattggctcagcagatacagaaggtggtcatggcactaggagactacatgggcgcctcctgtcacgcctgtatcgggggcaccaacgtgcgtgctgaggtgcagaaactgcagatggaagctccccacatcatcgtgggtacccctggccgtgtgtttgatatgcttaaccggagatacct

SEQ ID NO: 131293 - DNA, 818 bp, Homo sapiens
  Payload ID: 5624
  Gene Symbol: EIF4A1
  Gene Name: eukaryotic translation initiation factor 4A1
  ENST ID: ENST00000584784
  CDS Start-End: 5-818
gatcatgtctgcgagccaggattcccgatccagagacaatggccccgatgggatggagcccgaaggcgtcatcgagagtaactggaatgagattgttgacagctttgatgacatgaacctctcggagtcccttctccgtggcatctacgcgtatggttttgagaagccctctgccatccagcagcgagccattctaccttgtatcaagggttatgatgtgattgctcaagcccaatctgggactgggaaaacggccacatttgccatatcgattctgcagcagattgaattagatctaaaagccacccaggccttggtcctagcacccactcgagaattggctcagcagatacagaaggtggtcatggcactaggagactacatgggcgcctcctgtcacgcctgtatcgggggcaccaacgtgcgtgctgaggtgcagaaactgcagatggaagctccccacatcatcgtgggtacccctggccgtgtgtttgatatgcttaaccggagatacctgtcccccaaatacatcaagatgtttgtactggatgaagctgacgaaatgttaagccgtggattcaaggaccagatctatgacatattccaaaagctcaacagcaacacccaggaagagttgaccctggagggtatccgccagttctacatcaacgtggaacgagaggagtggaagctggacacactatgtgacttgtatgaaaccctgaccatcacccaggcagtcatcttcatcaacacccggaggaaggtggactggctcaccgagaagatgcatgctcgagatttcactgtatccgcca

SEQ ID NO: 131294 - DNA, 576 bp, Homo sapiens
  Payload ID: 5624
  Gene Symbol: EIF4A1
  Gene Name: eukaryotic translation initiation factor 4A1
  ENST ID: ENST00000582050
  CDS Start-End: 1-207
atcaacacccggaggaaggtggactggctcaccgagaagatgcatgctcgagatttcactgtatccgccatgcatggagatatggaccaaaaggaacgagacgtgattatgagggagtttcgttctggctctagcagagttttgattaccactgacctgctgagtgtcctccgtgcacatgctgaagagttgtctttcttgacgtaggccagaggcattgatgtgcagcaggtttctttagtcatcaactatgaccttcccaccaacagggaaaactatatccacagaatcggtcgaggtggacggtttggccgtaaaggtgtggctattaacatggtgacagaagaagacaagaggactcttcgagacattgagaccttctacaacacctccattgaggaaatgcccctcaatgttgctgacctcatctgaggggctgtcctgccacccagccccagccagggctcaatctctgggggctgaggagcagcaggaggggggagggaagggagccaagggatggacatcttgtcattttttttctttgaataaatgtcactttttgaggcaaaagaa

SEQ ID NO: 131295 - DNA, 1319 bp, Homo sapiens
  Payload ID: 5624
  Gene Symbol: EIF4A1
  Gene Name: eukaryotic translation initiation factor 4A1
  Uniprot ID: P60842
  ENST ID: ENST00000577269
  CDS Start-End: 6-1049
ggatcatgtctgcgagccaggattcccgatccagagacaatggccccgatgggatggagcccgaaggcgtcatcgagagtaactggaatgagattgttgacagctttgatgacatgaacctctcggagtcccttctccgtggcatctacgcgtatggttttgagaagccctctgccatccagcagcgagccattctaccttgtatcaagggttatgatgtgattgctcaagcccaatctgggactgggaaaacggccacatttgccatatcgattctgcagcagattgaattagatctaaaagccacccaggccttggtcctagcacccactcgagaattggctcagcagatacagaaggtggtcatggcactaggagactacatgggcgcctcctgtcacgcctgtatcgggggcaccaacgtgcgtgctgaggtgcagaaactgcagatggaagctccccacatcatcgtgggtacccctggccgtgtgtttgatatgcttaaccggagatacctgtcccccaaatacatcaagatgtttgtactggatgaagctgacgaaatgttaagccgtggattcaaggaccagatctatgacatattccaaaagctcaacagcaacacccaggtagttttgctgtcagccacaatgccttctgatgtgcttgaggtgaccaagaagttcatgagggaccccattcggattcttgtcaagaaggaagagttgaccctggagggtatccgccagttctacatcaacgtggaacgagaggagtggaagctggacacactatgtgacttgtatgaaaccctgaccatcacccaggcagtcatcttcatcaacacccggaggaaggtggactggctcaccgagaagatgcatgctcgagatttcactgtatccgccatgcatggagatatggaccaaaaggaacgagacgtgattatgagggagtttcgttctggctctagcagagttttgattaccactgacctgctgggaaaactatatccacagaatcggtcgaggtggacggtttggccgtaaaggtgtggctattaacatggtgacagaagaagacaagaggactcttcgagacattgagaccttctacaacacctccattgaggaaatgcccctcaatgttgctgacctcatctgaggggctgtcctgccacccagccccagccagggctcaatctctgggggctgaggagcagcaggaggggggagggaagggagccaagggatggacatcttgtcattttttttctttgaataaatgtcactttttgaggcaaaagaaggaaccgtgaa

SEQ ID NO: 131296 - DNA, 563 bp, Homo sapiens
  Payload ID: 5624
  Gene Symbol: EIF4A1
  Gene Name: eukaryotic translation initiation factor 4A1
  ENST ID: ENST00000583802
  CDS Start-End: 74-563
agtttctaaggatcatgtctgcgagccaggattcccgagtaactggaatgagattgttgacagctttgatgacatgaacctctcggagtcccttctccgtggcatctacgcgtatggttttgagaagccctctgccatccagcagcgagccattctaccttgtatcaagggttatgatgtgattgctcaagcccaatctgggactgggaaaacggccacatttgccatatcgattctgcagcagattgaattagatctaaaagccacccaggccttggtcctagcacccactcgagaattggctcagcagatacagaaggtggtcatggcactaggagactacatgggcgcctcctgtcacgcctgtatcgggggcaccaacgtgcgtgctgaggtgcagaaactgcagatggaagctccccacatcatcgtgggtacccctggccgtgtgtttgatatgcttaaccggagatacctgtcccccaaatacatcaagatgtttgtactggatgaagctgacgaaatgttaagccgtggattcaaggaccagatctatgacatat

SEQ ID NO: 131297 - DNA, 1444 bp, Homo sapiens
  Payload ID: 5624
  Gene Symbol: EIF4A1
  Gene Name: eukaryotic translation initiation factor 4A1
  ENST ID: ENST00000581544
  CDS Start-End: 15-302
agtttctaaggatcatgtctgcgagccaggattcccgatccagagacaatggccccgatgggatggagcccgaaggcgtcatcgagagtaactggaatgagattgttgacagctttgatgacatgaacctctcggagtcccttctccgtggcatctacgcgtatggttttgagaagccctctgccatccagcagcgagccattctaccttgtatcaaggatacagaaggtggtcatggcactaggagactacatgggcgcctcctgtcacgcctgtatcgggggcaccaacgtgcgtgctgaggtgcagaaactgcagatggaagctccccacatcatcgtgggtacccctggccgtgtgtttgatatgcttaaccggagatacctgtcccccaaatacatcaagatgtttgtactggatgaagctgacgaaatgttaagccgtggattcaaggaccagatctatgacatattccaaaagctcaacagcaacacccaggtagttttgctgtcagccacaatgccttctgatgtgcttgaggtgaccaagaagttcatgagggaccccattcggattcttgtcaagaaggaagagttgaccctggagggtatccgccagttctacatcaacgtggaacgagaggagtggaagctggacacactatgtgacttgtatgaaaccctgaccatcacccaggcagtcatcttcatcaacacccggaggaaggtggactggctcaccgagaagatgcatgctcgagatttcactgtatccgccatggtgtgtttgcccgctgccagcctgttgtgggtctgcccgtcagaagtgtcctacttgaagccagggttcctggaacccaggtgcctacctggtctgctgcatatttgttttctcttccagcatggagatatggaccaaaaggaacgagacgtgattatgagggagtttcgttctggctctagcagagttttgattaccactgacctgctggtgagtagagggaactgatagcaaaggcagaagggaggatccaaggtgattccctctccaaggggacatcagtgcctctcaggaaagtagcagcttggaatagaatctggcatgcctaaggcctttggggaactgggatgcttatttcctctgccttccttggctgcccacatggatgcctaagtgtcttccctccgggatagagtgtcctccgtgcacatgctgaagagttgtctttcttgacgtaggccagaggcattgatgtgcagcaggtttctttagtcatcaactatgaccttcccaccaacagggaaaactatatccacagaatcggtcgaggtggacggtttggccgtaaaggtgtggctattaacatggtgacagaagaagacaagaggactcttcgagacattgagaccttctacaacacctccattgaggaaatgcccctcaa

SEQ ID NO: 131298 - DNA, 642 bp, Homo sapiens
  Payload ID: 5624
  Gene Symbol: EIF4A1
  Gene Name: eukaryotic translation initiation factor 4A1
  ENST ID: ENST00000581384
  CDS Start-End: 1-642
cggcttgggctcattgtgcgcgaggccgccaccgcccgcggcctcccacatccggatccagagacaatggccccgatgggatggagcccgaaggcgtcatcgagagtaactggaatgagattgttgacagctttgatgacatgaacctctcggagtcccttctccgtggcatctacgcgtatggttttgagaagccctctgccatccagcagcgagccattctaccttgtatcaagggttatgatgtgattgctcaagcccaatctgggactgggaaaacggccacatttgccatatcgattctgcagcagattgaattagatctaaaagccacccaggccttggtcctagcacccactcgagaattggctcagcagatacagaaggtggtcatggcactaggagactacatgggcgcctcctgtcacgcctgtatcgggggcaccaacgtgcgtgctgaggtgcagaaactgcagatggaagctccccacatcatcgtgggtacccctggccgtgtgtttgatatgcttaaccggagatacctgtcccccaaatacatcaagatgtttgtactggatgaagctgacgaaatgttaagccgtggattcaaggaccagatctatgacatattccaaaagctca

SEQ ID NO: 131299 - DNA, 573 bp, Homo sapiens
  Payload ID: 5624
  Gene Symbol: EIF4A1
  Gene Name: eukaryotic translation initiation factor 4A1
  ENST ID: ENST00000578476
  CDS Start-End: 17-241
ctagtttctaaggatcatgtctgcgagccaggattcccggactgagcctaaccccgaggagcggccgcgtgaggcaccaggagcccacccggcgccgggcgggcgggtccattttgccgcacaagccgggctattggcaaactgcggatgggcaggtccaccttccttcgggggtgagcggcctgagatccagagacaatggccccgatgggatggagcccgaaggcgtcatcgagagtaactggaatgagattgttgacagctttgatgacatgaacctctcggagtcccttctccgtggcatctacgcgtatggttttgagaagccctctgccatccagcagcgagccattctaccttgtatcaagggttatgatgtgattgctcaagcccaatctgggactgggaaaacggccacatttgccatatcgattctgcagcagattgaattagatctaaaagccacccaggccttggtcctagcacccactcgagaattggctcagcagatacagaaggtggtcatggcactaggagactacatgggcgcctcctgtcacgcctgtatcgggg

SEQ ID NO: 131300 - DNA, 909 bp, Homo sapiens
  Payload ID: 5624
  Gene Symbol: EIF4A1
  Gene Name: eukaryotic translation initiation factor 4A1
  ENST ID: ENST00000580461
  CDS Start-End: 17-241
ctagtttctaaggatcatgtctgcgagccaggattcccggactgagcctaaccccgaggagcggccgcgtgaggcaccaggagcccacccggcgccgggcgggcgggtccattttgccgcacaagccgggctattggcaaactgcggatgggcaggtccaccttccttcgggggtgagcggcctgagatccagagacaatggccccgatgggatggagcccgaaggcgtcatcgagagtaactggaatgagattgttgacagctttgatgacatgaacctctcggagtcccttctccgtggcatctacgcgtatggttttgagaagccctctgccatccagcagcgagccattctaccttgtatcaagggttatgatgtgattgctcaagcccaatctgggactgggaaaacggccacatttgccatatcgattctgcagcagattgaattagatctaaaagccacccaggccttggtcctagcacccactcgagaattggctcagcaggtaagagtggcttctattccctccttcagggctgatttagggatgatgagtataatccaaggaccagagaagtcttctctgatcaccaccttgggaggaagacatgggtgccctaacactctcgagacctgctgggttaattaaaagctatttcttacccaaacgtaaccattgcttcctccacccatttcctgagtcaaatgggaaagctgttgggtgaagcctggctggctgggcaagtttgactgtgttctgaataagcaccttcactatgggctaagagatcccttggtgtgggggtgatcttacagtagtcagagcagatggacagtccttttcacccttgcttaatagccagagctgtttcatgcctggggcacacacaattctaatgctggac

SEQ ID NO: 131301 - DNA, 916 bp, Homo sapiens
  Payload ID: 5624
  Gene Symbol: EIF4A1
  Gene Name: eukaryotic translation initiation factor 4A1
  ENST ID: ENST00000578495
  CDS Start-End: 17-916
ctagtttctaaggatcatgtctgcgagccaggattcccgatccagagacaatggccccgatgggatggagcccgaaggcgtcatcgagagtaactggaatgagattgttgacagctttgatgacatgaacctctcggagtcccttctccgtggcatctacgcgtatggttttgagaagccctctgccatccagcagcgagccattctaccttgtatcaagggttatgatgtgattgctcaagcccaatctgggactgggaaaacggccacatttgccatatcgattctgcagcagattgaattagatctaaaagccacccaggccttggtcctagcacccactcgagaattggctcagcagaaggtggtcatggcactaggagactacatgggcgcctcctgtcacgcctgtatcgggggcaccaacgtgcgtgctgaggtgcagaaactgcagatggaagctccccacatcatcgtgggtacccctggccgtgtgtttgatatgcttaaccggagatacctgtcccccaaatacatcaagatgtttgtactggatgaagctgacgaaatgttaagccgtggattcaaggaccagatctatgacatattccaaaagctcaacagcaacacccaggtagttttgctgtcagccacaatgccttctgatgtgcttgaggtgaccaagaagttcatgagggaccccattcggattcttgtcaagaaggaagagttgaccctggagggtatccgccagttctacatcaacgtggaacgagaggagtggaagctggacacactatgtgacttgtatgaaaccctgaccatcacccaggcagtcatcttcatcaacacccggaggaaggtggactggctcaccgagaagatgcatgctcgagatttcactgtatccgccatg

SEQ ID NO: 131302 - DNA, 1919 bp, Homo sapiens
  Payload ID: 5625
  Gene Symbol: EIF4A2
  Gene Name: eukaryotic translation initiation factor 4A2
  Uniprot ID: Q14240
  ENST ID: ENST00000323963
  CDS Start-End: 65-1288
tataaaaaacgggtggttgggcgccgctgtcttttcagtcgggcgctgagtggtttttcggatcatgtctggtggctccgcggattataacagagaacatggcggcccagagggaatggaccccgatggtgtcatcgagagcaactggaatgagattgttgataactttgatgatatgaatttaaaggagtctctccttcgtggcatctatgcttacggttttgagaagccttccgctattcagcagagagctattattccctgtattaaagggtatgatgtgattgctcaagctcagtcaggtactggcaagacagccacatttgctatttccatcctgcaacagttggagattgagttcaaggagacccaagcactagtattggcccccaccagagaactggctcaacagatccaaaaggtaattctggcacttggagactatatgggagccacttgtcatgcctgcattggtggaacaaatgttcgaaatgaaatgcaaaaactgcaggctgaagcaccacatattgttgttggtacacccgggagagtgtttgatatgttaaacagaagatacctttctccaaaatggatcaaaatgtttgttttggatgaagcagatgaaatgttgagccgtggttttaaggatcaaatctatgagattttccaaaaactaaacacaagtattcaggttgtgttgctttctgccacaatgccaactgatgtgttggaagtgaccaaaaaattcatgagagatccaattcgaattctggtgaaaaaggaagaattgacccttgaaggaatcaaacagttttatattaatgttgagagagaggaatggaagttggatacactttgtgacttgtacgagacactgaccattacacaggctgttatttttctcaatacgaggcgcaaggtggactggctgactgagaagatgcatgccagagacttcacagtttctgctctgcatggtgacatggaccagaaggagagagatgttatcatgagggaattccggtcagggtcaagtcgtgttctgatcactactgacttgttggctcgcgggattgatgtgcaacaagtgtctttggttataaattatgatctacctaccaatcgtgaaaactatattcacagaattggcagagggggtcgatttgggaggaaaggtgtggctataaactttgttactgaagaagacaagaggattcttcgtgacattgagactttctacaatactacagtggaggagatgcccatgaatgtggctgaccttatttaattcctgggatgagagttttggatgcagtgctcgctgttgctgaataggcgatcacaacgtgcattgtgcttctttctttgggaatatttgaatcttgtctcaatgctcataacggatcagaaatacagattttgatagcaaagcgacgttagtcgtgagctcttgtgaggaaagtcattggctttatcctctttagagttagactgttggggtgggtataaaagatggggtctgtaaaatctttctttcttagaaatttatttcctagttctgtagaaatggttgtattagatgttctctatcatttaataatatacttgtggactaaaagatataagtgctgtataaaatcagccaattatgttaaactagcatatctgcctttattgtgtttgtcattagcctgagtagaaaggcctttaaaatttttttagaaagcatttgaatgcattttgtttggtattgtatttattcaataaagtatttaattagtgctaagtgtgaactggaccctgttgctaagccccagcaagcaatcctaggtagggtttaatccccagtaaaattgccatattgcacatgtcttaatgaagtttgaatgttaaataaattgtatattcactttaaaggt

SEQ ID NO: 131303 - DNA, 1005 bp, Homo sapiens
  Payload ID: 5625
  Gene Symbol: EIF4A2
  Gene Name: eukaryotic translation initiation factor 4A2
  ENST ID: ENST00000429589
  CDS Start-End: 35-325
cttttcagtcgggcgctgagtggtttttcggatcatgtctggtggctccgcggattataacagagaacatggcggcccagagggaatggaccccgatggtgtcatcgagagcaactggaatgagattgttgataactttgatgatatgaatttaaaggagtctctccttcgtggcatctatgcttacggttttgagaagccttccgctattcagcagagagctattattccctgtattaaagatccaaaaggtaattctggcacttggagactatatgggagccacttgtcatgcctgcattggtggaacaaatgttcgaaatgaaatgcaaaaactgcaggctgaagcaccacatattgttgttggtacacccgggagagtgtttgatatgttaaacagaagatacctttctccaaaatggatcaaaatgtttgttttggatgaagcagatgaaatgttgagccgtggttttaaggatcaaatctatgagattttccaaaaactaaacacaagtattcaggttgtgttgctttctgccacaatgccaactgatgtgttggaagtgaccaaaaaattcatgagagatccaattcgaattctggtgaaaaaggaagaattgacccttgaaggaatcaaacagttttatattaatgttgagagagaggaatggaagttggatacactttgtgacttgtacgagacactgaccattacacaggctgttatttttctcaatacgaggcgcaaggtggactggctgactgagaagatgcatgccagagacttcacagtttctgctctggtttattaatttgcagcatggtgacatggaccagaaggagagagatgttatcatgagggaattccggtcagggtcaagtcgtgttctgatcactactgacttgttggctcgcgggattgatgtgcaacaagtgtctttggttataaattatgatctacctaccaatcgtgaaaactatattcacagaattggcagagggggt

SEQ ID NO: 131304 - DNA, 1751 bp, Homo sapiens
  Payload ID: 5625
  Gene Symbol: EIF4A2
  Gene Name: eukaryotic translation initiation factor 4A2
  ENST ID: ENST00000426808
  CDS Start-End: 40-330
gctgtcttttcagtcgggcgctgagtggtttttcggatcatgtctggtggctccgcggattataacagagaacatggcggcccagagggaatggaccccgatggtgtcatcgagagcaactggaatgagattgttgataactttgatgatatgaatttaaaggagtctctccttcgtggcatctatgcttacggttttgagaagccttccgctattcagcagagagctattattccctgtattaaagatccaaaaggtaattctggcacttggagactatatgggagccacttgtcatgcctgcattggtggaacaaatgttcgaaatgaaatgcaaaaactgcaggctgaagcaccacatattgttgttggtacacccgggagagtgtttgatatgttaaacagaagatacctttctccaaaatggatcaaaatgtttgttttggatgaagcagatgaaatgttgagccgtggttttaaggatcaaatctatgagattttccaaaaactaaacacaagtattcaggttgtgttgctttctgccacaatgccaactgatgtgttggaagtgaccaaaaaattcatgagagatccaattcgaattctggtgaaaaaggaagaattgacccttgaaggaatcaaacagttttatattaatgttgagagagaggaatggaagttggatacactttgtgacttgtacgagacactgaccattacacaggctgttatttttctcaatacgaggcgcaaggtggactggctgactgagaagatgcatgccagagacttcacagtttctgctctgcatggtgacatggaccagaaggagagagatgttatcatgagggaattccggtcagggtcaagtcgtgttctgatcactactgacttgttggctcgcgggattgatgtgcaacaagtgtctttggttataaattatgatctacctaccaatcgtgaaaactatattcacagaattggcagagggggtcgatttgggaggaaaggtgtggctataaactttgttactgaagaagacaagaggattcttcgtgacattgagactttctacaatactacagtggaggagatgcccatgaatgtggctgaccttatttaattcctgggatgagagttttggatgcagtgctcgctgttgctgaataggcgatcacaacgtgcattgtgcttctttctttgggaatatttgaatcttgtctcaatgctcataacggatcagaaatacagattttgatagcaaagcgacgttagtcgtgagctcttgtgaggaaagtcattggctttatcctctttagagttagactgttggggtgggtataaaagatggggtctgtaaaatctttctttcttagaaatttatttcctagttctgtagaaatggttgtattagatgttctctatcatttaataatatacttgtggactaaaagatataagtgctgtataaaatcagccaattatgttaaactagcatatctgcctttattgtgtttgtcattagcctgagtagaaaggcctttaaaatttttttagaaagcatttgaatgcattttgtttggtattgtatttattcaataaagtatttaattagtgctaagtgtgaactggaccctgttgctaagccccagcaagcaatcctaggtagggtttaatccccagtaaaattgccatattgcacatgtcttaatgaagtttgaatgttaaataaattgtatattcactttaaa

SEQ ID NO: 131305 - DNA, 1889 bp, Homo sapiens
  Payload ID: 5625
  Gene Symbol: EIF4A2
  Gene Name: eukaryotic translation initiation factor 4A2
  Uniprot ID: Q14240
  ENST ID: ENST00000440191
  CDS Start-End: 35-1261
cttttcagtcgggcgctgagtggtttttcggatcatgtctggtggctccgcggattataacagcagagaacatggcggcccagagggaatggaccccgatggtgtcatcgagagcaactggaatgagattgttgataactttgatgatatgaatttaaaggagtctctccttcgtggcatctatgcttacggttttgagaagccttccgctattcagcagagagctattattccctgtattaaagggtatgatgtgattgctcaagctcagtcaggtactggcaagacagccacatttgctatttccatcctgcaacagttggagattgagttcaaggagacccaagcactagtattggcccccaccagagaactggctcaacagatccaaaaggtaattctggcacttggagactatatgggagccacttgtcatgcctgcattggtggaacaaatgttcgaaatgaaatgcaaaaactgcaggctgaagcaccacatattgttgttggtacacccgggagagtgtttgatatgttaaacagaagatacctttctccaaaatggatcaaaatgtttgttttggatgaagcagatgaaatgttgagccgtggttttaaggatcaaatctatgagattttccaaaaactaaacacaagtattcaggttgtgttgctttctgccacaatgccaactgatgtgttggaagtgaccaaaaaattcatgagagatccaattcgaattctggtgaaaaaggaagaattgacccttgaaggaatcaaacagttttatattaatgttgagagagaggaatggaagttggatacactttgtgacttgtacgagacactgaccattacacaggctgttatttttctcaatacgaggcgcaaggtggactggctgactgagaagatgcatgccagagacttcacagtttctgctctgcatggtgacatggaccagaaggagagagatgttatcatgagggaattccggtcagggtcaagtcgtgttctgatcactactgacttgttggctcgcgggattgatgtgcaacaagtgtctttggttataaattatgatctacctaccaatcgtgaaaactatattcacagaattggcagagggggtcgatttgggaggaaaggtgtggctataaactttgttactgaagaagacaagaggattcttcgtgacattgagactttctacaatactacagtggaggagatgcccatgaatgtggctgaccttatttaattcctgggatgagagttttggatgcagtgctcgctgttgctgaataggcgatcacaacgtgcattgtgcttctttctttgggaatatttgaatcttgtctcaatgctcataacggatcagaaatacagattttgatagcaaagcgacgttagtcgtgagctcttgtgaggaaagtcattggctttatcctctttagagttagactgttggggtgggtataaaagatggggtctgtaaaatctttctttcttagaaatttatttcctagttctgtagaaatggttgtattagatgttctctatcatttaataatatacttgtggactaaaagatataagtgctgtataaaatcagccaattatgttaaactagcatatctgcctttattgtgtttgtcattagcctgagtagaaaggcctttaaaatttttttagaaagcatttgaatgcattttgtttggtattgtatttattcaataaagtatttaattagtgctaagtgtgaactggaccctgttgctaagccccagcaagcaatcctaggtagggtttaatccccagtaaaattgccatattgcacatgtcttaatgaagtttgaatgttaaataaattgtatattcactttaaa

SEQ ID NO: 131306 - DNA, 1729 bp, Homo sapiens
  Payload ID: 5625
  Gene Symbol: EIF4A2
  Gene Name: eukaryotic translation initiation factor 4A2
  ENST ID: ENST00000443963
  CDS Start-End: 15-308
tggtttttcggatcatgtctggtggctccgcggattataacagcagagaacatggcggcccagagggaatggaccccgatggtgtcatcgagagcaactggaatgagattgttgataactttgatgatatgaatttaaaggagtctctccttcgtggcatctatgcttacggttttgagaagccttccgctattcagcagagagctattattccctgtattaaagatccaaaaggtaattctggcacttggagactatatgggagccacttgtcatgcctgcattggtggaacaaatgttcgaaatgaaatgcaaaaactgcaggctgaagcaccacatattgttgttggtacacccgggagagtgtttgatatgttaaacagaagatacctttctccaaaatggatcaaaatgtttgttttggatgaagcagatgaaatgttgagccgtggttttaaggatcaaatctatgagattttccaaaaactaaacacaagtattcaggttgtgttgctttctgccacaatgccaactgatgtgttggaagtgaccaaaaaattcatgagagatccaattcgaattctggtgaaaaaggaagaattgacccttgaaggaatcaaacagttttatattaatgttgagagagaggaatggaagttggatacactttgtgacttgtacgagacactgaccattacacaggctgttatttttctcaatacgaggcgcaaggtggactggctgactgagaagatgcatgccagagacttcacagtttctgctctgcatggtgacatggaccagaaggagagagatgttatcatgagggaattccggtcagggtcaagtcgtgttctgatcactactgacttgttggctcgcgggattgatgtgcaacaagtgtctttggttataaattatgatctacctaccaatcgtgaaaactatattcacagaattggcagagggggtcgatttgggaggaaaggtgtggctataaactttgttactgaagaagacaagaggattcttcgtgacattgagactttctacaatactacagtggaggagatgcccatgaatgtggctgaccttatttaattcctgggatgagagttttggatgcagtgctcgctgttgctgaataggcgatcacaacgtgcattgtgcttctttctttgggaatatttgaatcttgtctcaatgctcataacggatcagaaatacagattttgatagcaaagcgacgttagtcgtgagctcttgtgaggaaagtcattggctttatcctctttagagttagactgttggggtgggtataaaagatggggtctgtaaaatctttctttcttagaaatttatttcctagttctgtagaaatggttgtattagatgttctctatcatttaataatatacttgtggactaaaagatataagtgctgtataaaatcagccaattatgttaaactagcatatctgcctttattgtgtttgtcattagcctgagtagaaaggcctttaaaatttttttagaaagcatttgaatgcattttgtttggtattgtatttattcaataaagtatttaattagtgctaagtgtgaactggaccctgttgctaagccccagcaagcaatcctaggtagggtttaatccccagtaaaattgccatattgcacatgtcttaatgaagtttgaatgttaaataaattgtatattcactttaaa

SEQ ID NO: 131307 - DNA, 480 bp, Homo sapiens
  Payload ID: 5625
  Gene Symbol: EIF4A2
  Gene Name: eukaryotic translation initiation factor 4A2
  ENST ID: ENST00000441007
  CDS Start-End: 310-480
gaacagcatctccggtttccgcctccggctccggcgcggctcccccggcccgcctctgcgtcagggacgcggaaaccccgtaggagcagggcgggcggggaaagcgaggtttaactaactccgcagctatattcttccgccgcgaggattttatccgaggtaacgaccccaggatcacaattttgtagctgaccgaagcacggcgagaaaattcctccgcaagaaacgggttccggccacgagcctataaaaaacgggtggttgggcgccgctgtcttttcagtcgggcgctgagtggtttttcggatcatgtctggtggctccgcggattataacagagaacatggcggcccagagggaatggaccccgatggtgtcatcgagagcaactggaatgagattgttgataactttgatgatatgaatttaaaggagtctctccttcgtggcatctatgcttacggttttgagaagccttcc

SEQ ID NO: 131308 - DNA, 1977 bp, Homo sapiens
  Payload ID: 5625
  Gene Symbol: EIF4A2
  Gene Name: eukaryotic translation initiation factor 4A2
  ENST ID: ENST00000425053
  CDS Start-End: 35-1123
cttttcagtcgggcgctgagtggtttttcggatcatgtctggtggctccgcggattataacagagaacatggcggcccagagggaatggaccccgatggtgtcatcgagagcaactggaatgagattgttgataactttgatgatatgaatttaaaggagtctctccttcgtggcatctatgcttacggttttgagaagccttccgctattcagcagagagctattattccctgtattaaagggtatgatgtgattgctcaagctcagtcaggtactggcaagacagccacatttgctatttccatcctgcaacagttggagattgagttcaaggagacccaagcactagtattggcccccaccagagaactggctcaacagatccaaaaggtaattctggcacttggagactatatgggagccacttgtcatgcctgcattggtggaacaaatgttcgaaatgaaatgcaaaaactgcaggctgaagcaccacatattgttgttggtacacccgggagagtgtttgatatgttaaacagaagatacctttctccaaaatggatcaaaatgtttgttttggatgaagcagatgaaatgttgagccgtggttttaaggatcaaatctatgagattttccaaaaactaaacacaagtattcaggttgtgttgctttctgccacaatgccaactgatgtgttggaagtgaccaaaaaattcatgagagatccaattcgaattctggtgaaaaaggaagaattgacccttgaaggaatcaaacagttttatattaatgttgagagagaggaatggaagttggatacactttgtgacttgtacgagacactgaccattacacaggctgttatttttctcaatacgaggcgcaaggtggactggctgactgagaagatgcatgccagagacttcacagtttctgctctgcatggtgacatggaccagaaggagagagatgttatcatgagggaattccggtcagggtcaagtcgtgttctgatcactactgacttgttggctcgcgggattgatgtgcaacaagtgtctttggttataaattatgatctacctaccaatcgtgaaaactatattcacaggagtcgatagcagcagttggtgacgagatggcactcagaaacggcgttgacgtaatttaggacgtggaatcataagcgaaacagcacactgtttgaataaagagcgaaattggcagagggggtcgatttgggaggaaaggtgtggctataaactttgttactgaagaagacaagaggattcttcgtgacattgagactttctacaatactacagtggaggagatgcccatgaatgtggctgaccttatttaattcctgggatgagagttttggatgcagtgctcgctgttgctgaataggcgatcacaacgtgcattgtgcttctttctttgggaatatttgaatcttgtctcaatgctcataacggatcagaaatacagattttgatagcaaagcgacgttagtcgtgagctcttgtgaggaaagtcattggctttatcctctttagagttagactgttggggtgggtataaaagatggggtctgtaaaatctttctttcttagaaatttatttcctagttctgtagaaatggttgtattagatgttctctatcatttaataatatacttgtggactaaaagatataagtgctgtataaaatcagccaattatgttaaactagcatatctgcctttattgtgtttgtcattagcctgagtagaaaggcctttaaaatttttttagaaagcatttgaatgcattttgtttggtattgtatttattcaataaagtatttaattagtgctaagtgtgaactggaccctgttgctaagccccagcaagcaatcctaggtagggtttaatccccagtaaaattgccatattgcacatgtcttaatgaagtttgaatgttaaataaatt

SEQ ID NO: 131309 - DNA, 600 bp, Homo sapiens
  Payload ID: 5625
  Gene Symbol: EIF4A2
  Gene Name: eukaryotic translation initiation factor 4A2
  ENST ID: ENST00000445596
  CDS Start-End: 307-600
aaagcgaggtttaactaactccgcagctatattcttccgccgcgaggtaaagagtcccaacccaaccccgggccctaggatttccagcgaccctgtaatatcgagaaattaccacatttgggtttttctaccaacttgcttaggattttatccgaggtaacgaccccaggatcacaattttgtagctgaccgaagcacggcgagaaaattcctccgcaagaaacgggttccggccacgagcctataaaaaacgggtggttgggcgccgctgtcttttcagtcgggcgctgagtggtttttcggatcatgtctggtggctccgcggattataacagagaacatggcggcccagagggaatggaccccgatggtgtcatcgagagcaactggaatgagattgttgataactttgatgatatgaatttaaaggagtctctccttcgtggcatctatgcttacggttttgagaagccttccgctattcagcagagagctattattccctgtattaaagggtatgatgtgattgctcaagctcagtcaggtactggcaagacagccacatttgctatttccatcctgcaacagttggagattgag

SEQ ID NO: 131310 - DNA, 579 bp, Homo sapiens
  Payload ID: 5625
  Gene Symbol: EIF4A2
  Gene Name: eukaryotic translation initiation factor 4A2
  ENST ID: ENST00000498746
  CDS Start-End: 252-579
agttgaaacgggatcgccatgcgctcgggcctggggggctgcctttccgggcatccgcaggccccaacctttagggaaggcgcacagtgtggatattcgccctgaggctgctgctttagcttgtgcaggggaggctaacgtgctgagacgggttgcaaagggctatgcgcttaaggtgcagttgaggtggcctggaaggggtgtctgactgcagtattcttgtcagcagagaacatggcggcccagagggaatggaccccgatggtgtcatcgagagcaactggaatgagattgttgataactttgatgatatgaatttaaaggagtctctccttcgtggcatctatgcttacggttttgagaagccttccgctattcagcagagagctattattccctgtattaaagggtatgatgtgattgctcaagctcagtcaggtactggcaagacagccacatttgctatttccatcctgcaacagttggagattgagttcaaggagacccaagcactagtattggcccccaccagagaactggctcaacagatccaaaaggtaattctggcacttggagact

SEQ ID NO: 131311 - DNA, 1734 bp, Homo sapiens
  Payload ID: 5626
  Gene Symbol: EIF4A3
  Gene Name: eukaryotic translation initiation factor 4A3
  Uniprot ID: P38919
  ENST ID: ENST00000269349
  CDS Start-End: 223-1458
acgcacgcacgtctctcgctttcgcatacttaaggcgtctgttctcggcagcggcacagcgaggtcggcagcggcacagcgaggtcggcagcggcacagcgaggtcggcagcggcacagcgaggtcggcagcggcagcgaggtcggcagcggcacagcgaggtcggcagcggcagcgaggtcggcagcggcgcgcgctgtgctcttccgcggactctgaatcatggcgaccacggccacgatggcgacctcgggctcggcgcgaaagcggctgctcaaagaggaagacatgactaaagtggaattcgagaccagcgaggaggtggatgtgacccccacgttcgacaccatgggcctgcgggaggacctgctgcggggcatctacgcttacggttttgaaaaaccatcagcaatccagcaacgagcaatcaagcagatcatcaaagggagagatgtcatcgcacagtctcagtccggcacaggaaaaacagccaccttcagtatctcagtcctccagtgtttggatattcaggttcgtgaaactcaagctttgatcttggctcccacaagagagttggctgtgcagatccagaaggggctgcttgctctcggtgactacatgaatgtccagtgccatgcctgcattggaggcaccaatgttggcgaggacatcaggaagctggattacggacagcatgttgtcgcgggcactccagggcgtgtttttgatatgattcgtcgcagaagcctaaggacacgtgctatcaaaatgttggttttggatgaagctgatgaaatgttgaataaaggtttcaaagagcagatttacgatgtatacaggtacctgcctccagccacacaggtggttctcatcagtgccacgctgccacacgagattctggagatgaccaacaagttcatgaccgacccaatccgcatcttggtgaaacgtgatgaattgactctggaaggcatcaagcaatttttcgtggcagtggagagggaagagtggaaatttgacactctgtgtgacctctacgacacactgaccatcactcaggcggtcatcttctgcaacaccaaaagaaaggtggactggctgacggagaaaatgagggaagccaacttcactgtatcctcaatgcatggagacatgccccagaaagagcgggagtccatcatgaaggagttccggtcgggcgccagccgagtgcttatttctacagatgtctgggccagggggttggatgtccctcaggtgtccctcatcattaactatgatctccctaataacagagaattgtacatacacagaattgggagatcaggtcgatacggccggaagggtgtggccattaactttgtaaagaatgacgacatccgcatcctcagagatatcgagcagtactattccactcagattgatgagatgccgatgaacgttgctgatcttatctgaagcagcagatcagtgggatgagggagactgttcacctgctgtgtactcctgtttggaagtatttagatccagattctacttaatggggtttatatggactttcttctcataaatggcctgccgtctcccttcctttgaagaggatatggggattctgctctcttttcttatttacatgtaaataatacattgttctaagtctttttcattaaaaatttaaaacttttcccataaactctatacttctaaggtgccaccaccttctctagtaactta

SEQ ID NO: 131312 - DNA, 553 bp, Homo sapiens
  Payload ID: 5626
  Gene Symbol: EIF4A3
  Gene Name: eukaryotic translation initiation factor 4A3
  ENST ID: ENST00000576547
  CDS Start-End: 179-553
tcggcagcggcacagcgaggtcggcagcggcacagcgaggtcggcagcggcacagcgaggtcggcagcggcacagcgaggtcggcagcggcagcgaggtcggcagcggcacagcgaggtcggcagcggcagcgaggtcggcagcggcgcgcgctgtgctcttccgcggactctgaatcatggcgaccacggccacgatggcgacctcgggctcggcgcgaaagcggctgctcaaagaggaagacatgactaaagtggaattcgagaccagcgaggaggtggatgtgacccccacgttcgacaccatgggcctgcgggaggacctgctgcggggcatctacgcttacggttttgaaaaaccatcagcaatccagcaacgagcaatcaagcagatcatcaaagggagagatgtcatcgcacagtctcagtccggcacaggaaaaacagccaccttcagtatctcagtcctccagtgtttggatattcaggggctgcttgctctcggtgactacatgaatgtccagtgccatgcctgcattggaggcaccaatgtt

SEQ ID NO: 131313 - DNA, 4148 bp, Homo sapiens
  Payload ID: 5627
  Gene Symbol: EIF4B
  Gene Name: eukaryotic translation initiation factor 4B
  Uniprot ID: P23588
  ENST ID: ENST00000262056
  CDS Start-End: 327-2162
tcttccggcaggaagtctgtgcgtcaggaggccggccaggactcagctccagccccgcgctcgcgtgtagccctacgtaaagcgtgaggggtttcgcgacaacccaggccccgcccctttggccacatgtcgcgcatgtcttcccgtcggacggcgtgccacctcgccgcgcagctttacgaacctagagcagcgccgccccgcctcctgtctccgtcctcacctccccgccccctcccagcttcgcgtctcctagctcgacgcgcccgctataatcacgtgattgcctcatccgggtcttttgcgttctctttccctctcccaacatggcggcctcagcaaaaaagaagaataagaaggggaagactatctccctaacagactttctggctgaggatgggggtactggtggaggaagcacctatgtttccaaaccagtcagctgggctgatgaaacggatgacctggaaggagatgtttcgaccacttggcacagtaacgatgacgatgtgtatagggcgcctccaattgaccgttccatccttcccactgctccacgggctgctcgggaacccaatatcgaccggagccgtcttcccaaatcgccaccctacactgcttttctaggaaacctaccctatgatgttacagaagagtcaattaaggaattctttcgaggattaaatatcagtgcagtgcgtttaccacgtgaacccagcaatccagagaggttgaaaggttttggttatgctgaatttgaggacctggattccctgctcagtgccctgagtctcaatgaagagtctctaggtaacaggagaattcgagtggacgttgctgatcaagcacaggataaagacagggatgatcgttcttttggccgtgatagaaatcgggattctgacaaaacagatacagactggagggctcgtcctgctacagacagctttgatgactacccacctagaagaggtgatgatagctttggagacaagtatcgagatcgttatgattcagaccggtatcgggatgggtatcgggatgggtatcgggatggcccacgccgggatatggatcgatatggtggccgggatcgctatgatgaccgaggcagcagagactatgatagaggctatgattcccggataggcagtggcagaagagcatttggcagtgggtatcgcagggatgatgactacagaggaggcggggaccgctatgaagaccgatatgacagacgggatgatcggtcgtggagctccagagatgattactctcgggatgattataggcgtgatgatagaggtcccccccaaagacccaaactgaatctaaagcctcggagtactcctaaggaagatgattcctctgctagtacctcccagtccactcgagctgcttctatctttggaggggcaaagcctgttgacacagctgctagagaaagagaagtagaagaacggctacagaaggaacaagagaagttgcagcgtcagctggatgagccaaaactagaacgacggcctcgggagagacacccaagctggcgaagtgaagaaactcaggaacgggaacggtcgaggacaggaagtgagtcatcacaaactgggacctccaccacatctagcagaaatgcacgaaggagagagagtgagaagtctctagaaaatgaaacactcaataaggaggaagattgccactctccaacttctaaacctcccaaacctgatcagcccctaaaggtaatgccagcccctccaccaaaggagaatgcttgggtgaagcgaagttctaaccctcctgctcgatctcagagctcagacacagagcagcagtcccctacaagtggtgggggaaaagtagctccagctcaaccatctgaggaaggaccaggaaggaaagatgaaaataaagtagatgggatgaatgccccaaaaggccaaactgggaactctagccgtggtccaggcgacggagggaacagagaccactggaaggagtcagataggaaagatggcaaaaaggatcaagactccagatctgcacctgagccaaagaaacctgaggaaaatccagcttccaagttcagttctgcaagcaagtatgctgctctctctgttgatggtgaagatgaaaatgagggagaagattatgccgaatagacctctacatcctgtgcttttctcctagtttctctccaccctggaacattcgagagcaaatcaaaacctctatccagacaagacaaaataaaactcaccatctcctgaagacctttcttacctttttttaaaaacaaaaaatgaaattattttgcatgctgctgcagcctttaaagtattgaagtaactggagaattgccaatacagccagagagaaagggactacagctttttagaggaaaagttgtggtgcgttatgtcaccatgcagttgccagtgtgattagtgcctaggggtctccatttagcagaaatggtaatgacagtgatataatgcctggaacctggttgggcagtaggggagggaggtagaaggaaaagtgtgagatttctaccttttagtttttatcctattgtggcatatatgaattctcaaacattatctgaataaattttccactcttggaaaggtagatttagcctcaagttgttctagtctccaggaggctgccagcccctcctcttatttaattctgagttttgggggccagcctagagggaattccttttttttttttaaccccccaggggggtagttgggagtgagactataggccataaagaatgggactgcattggaccaaaataaatgggaaaatcgtggtttgaaaagaagcttttgggaagtgatgagtcattttgcaccaggtaataggggaaaattgtgtgacctccagcaaacacatgaatggttatttcctggagccggaagcacttgggggtcgtggtaattcccagtgttttctgtgtcctagttttaccctttctaaacactgtcctttttgaaagttttgaatatatccacattctattgaaaccttgaaactaaaaatttagactcttatcatcatcttaagttcttcatgctactcttaacctcccaaaaagcagtatctaagtcacatacatgatgtcttgggcattttctcagccatggagaactctgaaaggaagaatcgctgcttttctcaagcaaatcggtttcttgatgtcttttggttctccttgcctgctcctgatgcttggaccccttttattgatcagagtgctctagaataatggatggtcttggatgatggataaatagggacagggacagttaaattgggagcctttcttacaaccttgatgggatttttccccccaagtttccttctccactgaaatgccacactaatgcttgttggattcatgaggtggccagaccaatgtgttgttttgttgttgtttttttaagcttcccttgagagaataaatggtaatggagagaactatttaacaaggtcctggtttctcttgcaacacagtagctaaacttgcctgcttttatatgcatttttgtagggatcagcttggtagacagtattagcggagaaacaccttgatcttggtttgcaagcccttctcccatcagtcctagattaggccctgttcagccatgcaggggtgttggtttatgcgtgctgcagcagtgggcataatgaatataatttacccagtggacaaaggtgtgtaccaagtgaatttaaataattggtgtggattggccagtagctaagaagtgggcttttaaagagtattgaagattgaaagggtttttctttcttttttaaaaaagaaaaacaaactattgattgtagataatgaaaagctagggtttgccctcttcatgtctactctccttccaaatagttatatccaaaactgtttttccctctcccctaccttgtcccccctattaaaatagaaacagggattgattaatgtcccgctcctgaatacatgtaaaatttgtacaaaaatatcttctatgaaaatgatttgtaatctgtagacttattacctgggagatgtcttgatgtaaaatcccatcctttgggttgtgggttttttgttttctccaaataaatctgatctttaaagttca

SEQ ID NO: 131314 - DNA, 1936 bp, Homo sapiens
  Payload ID: 5627
  Gene Symbol: EIF4B
  Gene Name: eukaryotic translation initiation factor 4B
  ENST ID: ENST00000420463
  CDS Start-End: 29-1879
cttttgcgttctctttccctctcccaacatggcggcctcagcaaaaaagaagaataagaaggggaagactatctccctaacagactttctggctgaggatgggggtactggtggaggaagcacctatgtttccaaaccagtcagctgggctgatgaaacggatgacctggaaggagatgtttcgaccacttggcacagtaacgatgacgatgtgtatagggcgcctccaattgaccgttccatccttcccactgctccacgggctgctcgggaacccaatatcgaccggagccgtcttcccaaatcgccaccctacactgcttttctaggaaacctaccctatgatgttacagaagagtcaattaaggaattctttcgaggattaaatatcagtgcagtgcgtttaccacgtgaacccagcaatccagagaggttgaaaggttttggttatgctgaatttgaggacctggattccctgctcagtgccctgagtctcaatgaagagtctctaggtaacaggagaattcgagtggacgttgctgatcaagcacaggataaagacagggatgatcgttcttttggccgtgatagaaatcgggattctgacaaaacagatacagactggagggctcgtcctgctacagacagctttgatgactacccacctagaagaggtgatgatagctttggagacaagtatcgagatcgttatgattcagaccggtatcgggatgggtatcgggatgggtatcgggatggcccacgccgggatatggatcgatatggtggccgggatcgctatgatgaccgaggcagcagagactatgatagaggctatgattcccggataggcagtggcagaagagcatttggcagtgggtatcgcagggatgatgactacagaggaggcggggaccgctatgaagaccgatatgacagacgggatgatcggtcgtggagctccagagatgattactctcgggatgattataggcgtgatgatagaggtcccccccaaagacccaaactgaatctaaagcctcggagtactcctaaggaagatgattcctctgctagtacctcccagtccactcgagctgcttctatctttggaggggcaaagcctgttgacacagctgctagagaaagagaagtagaagaacggctacagaaggaacaagagaagttgcagcgtcagctggatgagccaaaactagaacgacggcctcgggagagacacccaagctggcgaagtgaagaaactcaggaacgggaacggtcgaggacaggaagtgagtcatcacaaactgggacctccaccacatctagcagaagtaagtcagaccaggatgcacgaaggagagagagtgagaagtctctagaaaatgaaacactcaataaggaggaagattgccactctccaacttctaaacctcccaaacctgatcagcccctaaaggtaatgccagcccctccaccaaaggagaatgcttgggtgaagcgaagttctaaccctcctgctcgatctcagagctcagacacagagcagcagtcccctacaagtggtgggggaaaagtagctccagctcaaccatctgaggaaggaccaggaaggaaagatgaaaataaagtagatgggatgaatgccccaaaaggccaaactgggaactctagccgtggtccaggcgacggagggaacagagaccactggaaggagtcagataggaaagatggcaaaaaggatcaagactccagatctgcacctgagccaaagaaacctgaggaaaatccagcttccaagttcagttctgcaagcaagtatgctgctctctctgttgatggtgaagatgaaaatgagggagaagattatgccgaatagacctctacatcctgtgcttttctcctagtttctctccaccctggaacattcgagagc

SEQ ID NO: 131315 - DNA, 1985 bp, Homo sapiens
  Payload ID: 5627
  Gene Symbol: EIF4B
  Gene Name: eukaryotic translation initiation factor 4B
  Uniprot ID: P23588
  ENST ID: ENST00000416762
  CDS Start-End: 28-1746
ttttgcgttctctttccctctcccaacatggcggcctcagcaaaaaagaagaataagaaggggaagactatctccctaacagactttctggctgaggatgggggtactggtggaggaagcacctatgtttccaaaccagtcagctgggctgatgaaacggatgacctggaaggagatgtttcgaccacttggcacagtaacgatgacgatgtgtatagggcgcctccaattgaccgttccatccttcccactgctccacgggctgctcgggaacccaatatcgaccggagccgtcttcccaaatcgccaccctacactgcttttctaggaaacctaccctatgatgttacagaagagtcaattaaggaattctttcgaggattaaattctctaggtaacaggagaattcgagtggacgttgctgatcaagcacaggataaagacagggatgatcgttcttttggccgtgatagaaatcgggattctgacaaaacagatacagactggagggctcgtcctgctacagacagctttgatgactacccacctagaagaggtgatgatagctttggagacaagtatcgagatcgttatgattcagaccggtatcgggatgggtatcgggatgggtatcgggatggcccacgccgggatatggatcgatatggtggccgggatcgctatgatgaccgaggcagcagagactatgatagaggctatgattcccggataggcagtggcagaagagcatttggcagtgggtatcgcagggatgatgactacagaggaggcggggaccgctatgaagaccgatatgacagacgggatgatcggtcgtggagctccagagatgattactctcgggatgattataggcgtgatgatagaggtcccccccaaagacccaaactgaatctaaagcctcggagtactcctaaggaagatgattcctctgctagtacctcccagtccactcgagctgcttctatctttggaggggcaaagcctgttgacacagctgctagagaaagagaagtagaagaacggctacagaaggaacaagagaagttgcagcgtcagctggatgagccaaaactagaacgacggcctcgggagagacacccaagctggcgaagtgaagaaactcaggaacgggaacggtcgaggacaggaagtgagtcatcacaaactgggacctccaccacatctagcagaaatgcacgaaggagagagagtgagaagtctctagaaaatgaaacactcaataaggaggaagattgccactctccaacttctaaacctcccaaacctgatcagcccctaaaggtaatgccagcccctccaccaaaggagaatgcttgggtgaagcgaagttctaaccctcctgctcgatctcagagctcagacacagagcagcagtcccctacaagtggtgggggaaaagtagctccagctcaaccatctgaggaaggaccaggaaggaaagatgaaaataaagtagatgggatgaatgccccaaaaggccaaactgggaactctagccgtggtccaggcgacggagggaacagagaccactggaaggagtcagataggaaagatggcaaaaaggatcaagactccagatctgcacctgagccaaagaaacctgaggaaaatccagcttccaagttcagttctgcaagcaagtatgctgctctctctgttgatggtgaagatgaaaatgagggagaagattatgccgaatagacctctacatcctgtgcttttctcctagtttctctccaccctggaacattcgagagcaaatcaaaacctctatccagacaagacaaaataaaactcaccatctcctgaagacctttcttacctttttttaaaaacaaaaaatgaaattattttgcatgctgctgcagcctttaaagtattgaagtaactggagaattgccaatacagccagagagaaagggactacagctttttagagg

SEQ ID NO: 131316 - DNA, 537 bp, Homo sapiens
  Payload ID: 5627
  Gene Symbol: EIF4B
  Gene Name: eukaryotic translation initiation factor 4B
  ENST ID: ENST00000551002
  CDS Start-End: 29-537
cttttgcgttctctttccctctcccaacatggcggcctcagtttcgaccacttggcacagtaacgatgacgatgtgtatagggcgcctccaattgaccgttccatccttcccactgctccacgggctgctcgggaacccaatatcgaccggagccgtcttcccaaatcgccaccctacactgcttttctaggaaacctaccctatgatgttacagaagagtcaattaaggaattctttcgaggattaaatatcagtgcagtgcgtttaccacgtgaacccagcaatccagagaggttgaaaggttttggttatgctgaatttgaggacctggattccctgctcagtgccctgagtctcaatgaagagtctctaggtaacaggagaattcgagtggacgttgctgatcaagcacaggataaagacagggatgatcgttcttttggccgtgatagaaatcgggattctgacaaaacagatacagactggagggctcgtcctgctacagacagctttgatgactacccacctagaagagg

SEQ ID NO: 131317 - DNA, 1476 bp, Homo sapiens
  Payload ID: 5627
  Gene Symbol: EIF4B
  Gene Name: eukaryotic translation initiation factor 4B
  ENST ID: ENST00000550704
  CDS Start-End: 26-709
ttgcgttctctttccctctcccaacatggcggcctcagcaaaaaagaagaataagaaggggaagactatctccctaacagactttctggctgaggatgggggtactggtggaggaagcacctatgtttccaaaccagtcagctgggctgatgaaacggatgacctggaaggagatgtttcgaccacttggcacagtaacgatgacgatgtgtatagggcgcctccaattgaccgttccatccttcccactgctccacgggctgctcgggaacccaatatcgaccggagccgtcttcccaaatcgccaccctacactgcttttctaggaaacctaccctatgatgttacagaagagtcaattaaggaattctttcgaggattaaatatcagtgcagtgcgtttaccacgtgaacccagcaatccagagaggttgaaaggttttggttatgctgaatttgaggacctggattccctgctcagtgccctgagtctcaatgaagagtctctaggtaacaggagaattcgagtggacgttgctgatcaagcacaggataaagacagggatgatcgttcttttggccgtgatagaaatcgggattctgacaaaacagatacagactggagggctcgtcctgctacagacagctttgatgactacccacctagaagaggtgatgatagctttggagacagaagaaatggctcttgaaagaaaaagcagacaatcagaccaagggtcctgttttgagtccaggggcatgacttttctcacctgaaaccttgaatttagagcaagcagaatggataacgaagtatcgagatcgttatgattcagaccggtatcgggatgggtatcgggatgggtatcgggatggcccacgccgggatatggatcgatatggtggccgggatcgctatgatgaccgaggcagcagagactatgatagaggctatgattcccggataggcagtggcagaagagcatttggcagtgggtatcgcagggatgatgactacagaggaggcggggaccgctatgaagaccgatatgacagacgggatgatcggtcgtggagctccagagatgattactctcgggatgattataggcgtgatgatagaggtcccccccaaagacccaaactgaatctaaagcctcggagtactcctaaggaagatgattcctctgctagtacctcccagtccactcgagctgcttctatctttggaggggcaaagcctgttgacacagctgctagagaaagagaagtagaagaacggctacagaaggaacaagagaagttgcagcgtcagctggatgagccaaaactagaacgacggcctcgggagagacacccaagctggcgaagtgaagaaactcaggaacgggaacggtcgaggacaggaagtgagtcatcacaaactgggacctccaccacatctagcagaaatgcacgaaggagagagagtgagaag

SEQ ID NO: 131318 - DNA, 885 bp, Homo sapiens
  Payload ID: 5627
  Gene Symbol: EIF4B
  Gene Name: eukaryotic translation initiation factor 4B
  ENST ID: ENST00000549077
  CDS Start-End: 54-581
aatcacgtgattgcctcatccgggtcttttgcgttctctttccctctcccaacatggcggcctcagcaaaaaagaagaataagaaggggaagactatctccctaacagactttctggctgaggatgggggtactggtggaggaagcacctatgtttccaaaccagtcagctgggctgatgaaacggatgacctggaaggagatgtttcgaccacttggcacagtaacgatgacgatgtgtatagggcgcctccaattgaccgttccatccttcccactgctccacgggctgctcgggaacccaatatcgaccggagccgtcttcccaaatcgccaccctacactgcttttctaggaaacctaccctatgatgttacagaagagtcaattaaggaattctttcgaggattaaatatcagtgcagtgcgtttaccacgtgaacccagcaatccagagaggttgaaaggttttggttatgctgaatttgaggacctggattccctgctcagtgccctgagtctcaatgaagagtgcttctgctatgcccagacgttcaaggtcactcaagggatttgtgcataatggggcaaaaggttggttaatatggtcctatgctctcagtctctaggtaacaggagaattcgagtggacgttgctgatcaagcacaggataaagacagggatgatcgttcttttggccgtgatagaaatcgggattctgacaaaacagatacagactggagggctcgtcctgctacagacagctttgatgactacccacctagaagaggtgatgatagctttggagacaagtatcgagatcgttatgattcagaccggtatcgggatgggtatcgggatgggtatcgggatggcccacgccggg

SEQ ID NO: 131319 - DNA, 871 bp, Homo sapiens
  Payload ID: 5627
  Gene Symbol: EIF4B
  Gene Name: eukaryotic translation initiation factor 4B
  ENST ID: ENST00000550390
  CDS Start-End: 1-558
atggcggcctcagcaaaaaagaagaataagaaggggaagactatctccctaacagactttctggctgaggatgggggtactggtggaggaagcacctatgtttccaaaccagtcagctgggctgatgaaacggatgacctggaaggagatgtttcgaccacttggcacagtaacgatgacgatgtgtatagggcgcctccaattgaccgttccatccttcccactgctccacgggctgctcgggaacccaatatcgaccggagccgtcttcccaaatcgccaccctacactgcttttctaggaaacctaccctatgatgttacagaagagtcaattaaggaattctttcgaggattaaatatcagtgcagtgcgtttaccacgtgaacccagcaatccagagaggttgaaaggttttggttatgctgaatttgaggacctggattccctgctcagtgccctgagtctcaatgaagagtctctaggtaacaggagaattcgagtggacgttgctgatcaagcacaggataaagggactcctggcccatacagaatttgagatagctaagcattaaaccaataggaaaaaacgggaggaaaagagccacctggggttgaattggagcatgtacttatggggcctgagacagggatgatcgttcttttggccgtgatagaaatcgggattctgacaaaacagatacagactggagggctcgtcctgctacagacagctttgatgactacccacctagaagaggtgatgatagctttggagacaagtatcgagatcgttatgattcagaccggtatcgggatgggtatcgggatgggtatcgggatggcccacgccgggatatggatcgatatgg

SEQ ID NO: 131320 - DNA, 1097 bp, Homo sapiens
  Payload ID: 5627
  Gene Symbol: EIF4B
  Gene Name: eukaryotic translation initiation factor 4B
  ENST ID: ENST00000549481
  CDS Start-End: 17-1097
ctttccctctcccaacatggcggcctcagcaaaaaagaagaataagaaggggaagactatctccctaacagactttctggctgaggatgggggtactggtggaggaagcacctatgtttccaaaccagtcagctgggctgatgaaacggatgacctggaaggagatgtttcgaccacttggcacagtaacgatgacgatgtgtatagggcgcctccaattgaccgttccatccttcccactgctccacgggctgctcgggaacccaatatcgaccggagccgtcttcccaaatcgccaccctacactgcttttctaggaaacctaccctatgatgttacagaagagtcaattaaggaattctttcgaggattaaatatcagtgcagtgcgtttaccacgtgaacccagcaatccagagaggttgaaaggttttggttatgctgaatttgaggacctggattccctgctcagtgccctgagtctcaatgaagagtctctaggtaacaggagaattcgagtggacgttgctgatcaagcacaggataaagagtatcgagatcgttatgattcagaccggtatcgggatgggtatcgggatgggtatcgggatggcccacgccgggatatggatcgatatggtggccgggatcgctatgatgaccgaggcagcagagactatgatagaggctatgattcccggataggcagtggcagaagagcatttggcagtgggtatcgcagggatgatgactacagaggaggcggggaccgctatgaagaccgatatgacagacgggatgatcggtcgtggagctccagagatgattactctcgggatgattataggcgtgatgatagaggtcccccccaaagacccaaactgaatctaaagcctcggagtactcctaaggaagatgattcctctgctagtacctcccagtccactcgagctgcttctatctttggaggggcaaagcctgttgacacagctgctagagaaagagaagtagaagaacggctacagaaggaacaagagaagttgcagcgtcagctggatgagccaaaactagaacgacggcctcgggagagacacccaa

SEQ ID NO: 131321 - DNA, 841 bp, Homo sapiens
  Payload ID: 5627
  Gene Symbol: EIF4B
  Gene Name: eukaryotic translation initiation factor 4B
  ENST ID: ENST00000552490
  CDS Start-End: 16-841
tttccctctcccaacatggcggcctcagcaaaaaagaagaataagaaggggaagactatctccctaacagactttctggctgaggatgggggtactggtggaggaagcacctatgtttccaaaccagtcagctgggctgatgaaacggatgacctggaaggagatgtttcgaccacttggcacagtaacgatgacgatgtgtatagggcgcctccaattgaccgttccatccttcccactgctccacgggctgctcgggaacccaatatcgaccggagccgtcttcccaaatcgccaccctacactgcttttctaggaaacctaccctatgatgttacagaagagtcaattaaggaattctttcgaggattaaatatcagtgcagtgcgtttaccacgtgaacccagcaatccagagaggttgaaaggttttggttatgctgaatttgaggacctggattccctgctcagtgccctgagtctcaatgaagagtctctaggtaacaggagaattcgagtggacgttgctgatcaagcacaggataaagacagggatgatcgttcttttggccgtgatagaaatcgggattctgacaaaacagatacagactggagggctcgtcctgctacagacagctttgatgactacccacctagaagaggtgatgatagctttggagacagctatgattcccggataggcagtggcagaagagcatttggcagtgggtatcgcagggatgatgactacagaggaggcggggaccgctatgaagaccgatatgacagacgggatgatcggtcgtggagctccagagatgattactctcgggatgattata

SEQ ID NO: 131322 - DNA, 1097 bp, Homo sapiens
  Payload ID: 5628
  Gene Symbol: EIF4E
  Gene Name: eukaryotic translation initiation factor 4E
  Uniprot ID: P06730
  ENST ID: ENST00000280892
  CDS Start-End: 121-834
gagtattgcctttggcccccacccccacgggtccccgcgctccgtcttccttctgactgggggactccgcgggacggcgttcccggcgcgcactgtaccccttgccgccccttccccttcatgttggacctgacctcccgcggacaagtggggacgtcccggaggatggccgaggcggcgtgtagcgcacactttctggaaaccacccctactcctaatcccccgactacagaagaggagaaaacggaatctaatcaggaggttgctaacccagaacactatattaaacatcccctacagaacagatgggcactctggttttttaaaaatgataaaagcaaaacttggcaagcaaacctgcggctgatctccaagtttgatactgttgaagacttttgggctctgtacaaccatatccagttgtctagtaatttaatgcctggctgtgactactcactttttaaggatggtattgagcctatgtgggaagatgagaaaaacaaacggggaggacgatggctaattacattgaacaaacagcagagacgaagtgacctcgatcgcttttggctagagacacttctgtgccttattggagaatcttttgatgactacagtgatgatgtatgtggcgctgttgttaatgttagagctaaaggtgataagatagcaatatggactactgaatgtgaaaacagagaagctgttacacatatagggagggtatacaaggaaaggttaggacttcctccaaagatagtgattggttatcagtcccacgcagacacagctactaagagcggctccaccactaaaaataggtttgttgtttaagaagacaccttctgagtattctcataggagactgcgtcaagcaatcgagatttgggagctgaaccaaagcctcttcaaaaagcagagtggactgcatttaaatttgatttccatcttaatgttactcagatataagagaagtctcattcgcctttgtcttgtacttctgtgttcatttttttttttttttttggctagagtttccactatcccaatcaaagaattacagtacacatccccagaatccataaatgtgttcctgg

SEQ ID NO: 131323 - DNA, 11523 bp, Homo sapiens
  Payload ID: 5628
  Gene Symbol: EIF4E
  Gene Name: eukaryotic translation initiation factor 4E
  Uniprot ID: P06730
  ENST ID: ENST00000450253
  CDS Start-End: 1526-2179
aggcacaggcagcctgcatacactccttttcctggtgtcaacattatttaaaagcatgggaaatagtaatgagacagtgtcttcttcattagaaccttaggagtctactagatttcttcatctctatttgttgttattagtagccaaactgtgcaaaaaacacggtcttgagaaatgacagcacagtatcttagagggaaaggaaatgtaggatgccagtgtggggacaaatttctgattgccagtgattgttgtgagcataacaataatttcatgaacattaaagcctctattgagggcagctgcagttgtaaaggaaaaaaaatggtcctgaacatttaaaactacactggtgtacatcataatcaaacaaagtaaacagaaaaaaatttaaactttgctaaaaaaaaaaagcagaagcacttgatctttaggaaggcacgcagttgcttattatgaatcatttctagagtccgatgcattttcaaagccggttacagtcattacgaagcacacccttgtgaggtaagtgtatcatcacctttggttcataaataaaaaagctgagacgccgagcgattaagtcactcgcctaaggagaatgagtcaacgtcaagagtcatagttgacccggcctaaagactccagaccatcagtccagggcttagtcagcggggcccggagtggcttccctggctggcatctggacttaggctatttccgtgcacgtaaaagcggaatattggaacggttgcacagaacttccaaataatttttaccgccacgcaagatttagccctgaggtcttaatctcaggatttgggacagtaaaagctgtcgtccctccccctcgtccagccggtggcaagcgggtactgcgggcggttccgtccgtcccctttcgcagaaatggcaacgaatgaccaccagcattagctgagccaggggacgtgggagggttgattgcctaaacgactctgcatcgccgcctctttttgaaactaagagaaaatggtgggagatcaaaagaaaactaaataaacacacaggcaacttgtcctgggacctcaactaagcaaatgaagccttattgtgtgtgctgagcctgcagttcccaaccttccggggaagatgggaggacagggcgacaaagggcacagtaggcttgcctggcagtaagtgtgaccgcagctatccaggcggaagagcagaggactgaaaccaccctccagcaagcgagtgtccgccgcgttgagaaccgcgcaccctacccatcggccacgtgaccagtcctttttaaaaaaaatttctttaccttaaaaaaaaaaaaaaaaaaaaggtgggggagagactccacttcccagaagcctctcgttactcacgcagccgcagtcttgcgcaggtgccgccagggccaaacggacatatccgtcacgtggccagaagctggccaatccggtttgaatctcatttttttcctcttacccccccttctggagcggttgtgcgatcagatcgatctaagatggcgactgtcgaaccggaaaccacccctactcctaatcccccgactacagaagaggagaaaacggaatctaatcaggaggttgctaacccagaacactatattaaacatcccctacagaacagatgggcactctggttttttaaaaatgataaaagcaaaacttggcaagcaaacctgcggctgatctccaagtttgatactgttgaagacttttgggctctgtacaaccatatccagttgtctagtaatttaatgcctggctgtgactactcactttttaaggatggtattgagcctatgtgggaagatgagaaaaacaaacggggaggacgatggctaattacattgaacaaacagcagagacgaagtgacctcgatcgcttttggctagagacacttctgtgccttattggagaatcttttgatgactacagtgatgatgtatgtggcgctgttgttaatgttagagctaaaggtgataagatagcaatatggactactgaatgtgaaaacagagaagctgttacacatatagggagggtatacaaggaaaggttaggacttcctccaaagatagtgattggttatcagtcccacgcagacacagctactaagagcggctccaccactaaaaataggtttgttgtttaagaagacaccttctgagtattctcataggagactgcgtcaagcaatcgagatttgggagctgaaccaaagcctcttcaaaaagcagagtggactgcatttaaatttgatttccatcttaatgttactcagatataagagaagtctcattcgcctttgtcttgtacttctgtgttcatttttttttttttttttggctagagtttccactatcccaatcaaagaattacagtacacatccccagaatccataaatgtgttcctggcccactctgtaatagttcagtagaattaccattaattacatacagattttacctatccacaatagtcagaaaacaacttggcatttctatactttacaggaaaaaaaattctgttgttccattttatgcagaagcatattttgctggtttgaaagattatgatgcatacagttttctagcaattttctttgtttctttttacagcattgtctttgctgtactcttgctgatggctgctagattttaatttatttgtttccctacttgataatattagtgattctgatttcagtttttcatttgttttgcttttgtttttttcctcatgtaacattggtgaaggatccaggaatatgacacaaaggtggaataaacattaattttgtgcattctttggtaattttttttgttttttgtaactacaaagctttgctacaaatttatgcatttcattcaaatcagtgatctatgtttgtgtgatttcctaaacataattgtggattataaaaaatgtaacatcataattacattcctaactagaattagtatgtctgtttttgtatctttatgctgtattttaacactttgtattacttaggttattttgctttggttaaaaatggctcaagtagaaaagcagtcccattcatattaagacagtgtacaaaactgtaaataaaatgtgtacagtgaattgtcttttagacaactagatttgtccttttatttctccatctttatagaaggaatttgtacttcttattgcaaggcagtctctatattatgtcttcttttgtggtgtcttccatgtgaacagcataagtttggagcactagtttgattattatgtttattacaatttttaataaattgaataggtagtatcatatatatggaattaaattgatgtggctatctttgtttttttataaagtaaggcacagtcattcagtcttaggtaaataatgtactctcttaatatgttaatactcatgagaattgggatctgatgcatcaccatttgattggtagcaacagtggttgtaaaacttggttgctgaattgagttgtttctatgttaagtgtcaaaatgatagtgtagggaaagtacaggtggtggggacatatgcattaagaatcttgttagtgttgcaatctaaatagaatggaataaacaggtgttaagacatatttatagtggtaaattgttgtagtatggtattctgtaaacttgaaaacttgatctactctttgtaggtatcatttgaaagcaaacttgaaaatgttttgtacatagtacatacttgtatagtcctgtgagatgaagtatggctatcagaccaaaggataagccaaactgtaggtagcagaatggaaattattattttgagaggaaaatttgtctttgaatggtgattatgacttaatcattttaaaactgataaacttgacaaaaaccctgtatgaaataaacatgaaattaatagcactgatttcattgtaaaattttaaagcagtttaaagggtaccacaggttatcacagtactctcaatgccacaaacacctcttgttcagtattctagaaatactgaatcagaattctgtgtttattataatctcagcatactgtacataatatctgctagttaaacttgggtaattggttaaggtgacttactgtctatgtcaatatgtatagttttgagtacttcaagagtttacttaaaagtgatgatgttactggtatgttggcagtgggtgggactgaagtagtgtatctattataaattgatctattttcttaattctaagatgaagtccaattttaagcatcagcttttaggtgcaaaggaggaattaacacattaaatgtatacagttctaaatttttgaaataactgatgtgtagcatttgattattggtattaccattttagaatcatgatgttattttaaacctttttcctggggacaagaaaggataataaattacgctgaatcacttttggcagttgccacttaaatagtacagtgacttgcaacttttataactttatcagcatcttctctaaatacaaaattaggctatatgttattttccaacttactgttttctctctgtttagcaggatattataaatagattaaatagatatattttctttttttttttttttttttgagacggagtctcgctttgtctcccaggctggagtgcagtggcgtgatctcccagtagctgggactacaagcacctgccaccatgcccggctaattttttttgtatttttagtagagacggggtttcactgtgttagccaagatggtctcaatctcctgactttgtgatctgcctgcttctgcctcccaaagtgctgggattacaggtgtgagccaccgtacccagcccaaatagatgtattttcataatagagaattgaaataggctttaatgggtgaatagcagtttattgtaggcatgtgacatttcatttaatgaatttaaagtttattatcccaattctacagaaggatttaatgcatactatgcaattaaataattataacactacatagtaataatttatgtgccaggcagtagttcagtcactttacatgcttattaacctgcagaataatcttttgagatgtaggtgctgttactgagaatttaacttttgcttgtaaattgcaaagggtggatttgaattctggaaatttggttccagagacaataattacataacactttctccatagggtacagcctgtctaataggctatagtaaatcacctcagcttgttataggtcgggcatgcaaacatttctccattttactccctttggtaatgaatctagtaatagatggaaattttccctagattcactgtgttagtcagttggggaagtttggaggcaaagatacaggagtttatggggaggtagtgtacataaatataatcatatgctatataaggaagttttggtcagcagcagaccatatataggatggtgggccagtaacattgtaacactgtatttttactgtatcttttccatgttttgttatgtttagatacacaaataacattatggagtattcagtatggtaacatgccatacaggtttgtagcctaggagcagtaatagactgttccctgaaacctatatttgtggtaggtttataccattcaggtttgtgtaagtacacaacgaaatcatctaatggcccatttctcaaaacatattcccatcattaatcaatgcatggtcatgttttcgtatacattttaagcttctgtattctaatctaatataaatggcaaaatattcaaactgataggcattgagattcttaaatgctaaagttgcattcaaaaggataattttaggcgttgtgacaaagcagtgttatattttaaagttagtgacaaggctatgcaccttttatctctaattgtttcttacagaatgtttttattattgagtagtaaaacaataaatgtcagatcctttatacaaattcaagattgacattgataaacaaaacttcagcatatcactcaaggtcagcgtagaaattgtgtgtctggaaacttctatagtaattttatattactgtgacattagtatgtgatcacttttctagtaatgttttaaaaaaatatatcttacaggccaggcatagtgctttatgcctgtaatcccagcactttgggaggccaaggtggcaggattgcatgagtccaggagttcaacaccagtctgggcaataaagtgagaccccatcgctacaaacaaattaaaaaatatttatgtatgtgtgtaatatatataatatataacaaaacacatatgtatgtgtatatatagtatgtctggcagagtacaatttaggggttaagactggtccctcacatatggtgtgagaaacactgttcacaggttgctttccccattagcccagggcaactcatttgcccatcatttcctagaacaaccgggtctgttacgtctacagttttcatcttcatgcagttatggatttggtgtcaaaaactttggtcctgttctctaccatcttaaaataaactcttgtgtcctgctttactatgaattgcaaagtaggcattaggtagccttcctactaccatagtttagagttcaatattcttatgaccattctactggtagaagcaaaaaatgaacttgtaggcatgtgatcacatgtgcctatggtgctgtcttttccagtacaggggaactaattttcatattttaatcttgcagctttttgtttacttcatgcattgtgatttctcatagttttgcacagaactcacttccctaccttttctgaaacaaaagtatgtatacacacatacatatgtattgagcacctctatttactgtgttccacgtgctgggcatatagcaagaacagaatggtctggggccctgctctaaagaagatttaaaagcaaacatatattaaaaatgcgtgagtctggccaggagcagtggctcatgcctgcaaccccagcactttgggaggctgaagcgggtgaatcacctgagatcaggagttgagaccagcctggccaacatggtgaaaccccgtctctactaaaaatacaaaaattagcctggcatggtggcatgcgcctgtaattccagctactttggagactgagacaggagaatcacttgagcccaggaagtggaggttgcagtgagctgagatcgcgccactgcactccagcctgggtgacagagcaagactccatctcaaaaaaaaaaaaaaaacgtgtctgttcataaggttctacaaatagctgttgttacagaaaataggactagggttttattactggggattatgcagtcgaggtaaatataaaatgaggttgtttcttcttttttttatttgagacagagtcttgtttgccaggctggagtgcagtggcgtgctcttagctccgcctcccgggatcaaacgattctcttgcctcagcctctcgagtagctgggactacaggcgcgtgccaccacacccagctgatttttgtatttttagtagagatgggatttcaccatgatggccaggatggtctcgatcttttgacctcatgatccacccacctcggcctcccaaagtgctgggattacaggcgtgagccactgcacccggccctggttctaaatactcttccagctctaaaacattgattctaaacagatcacattccaggaggactctagcaaaccagcatatgcaaattatagcttttgcaagaccgtttctacttttatattactgaactctatatgattgtccaagtaaagttttgtgtctctttgattatttgattgtactttaaaattttttcaccattcatttaacattttttaccatactgtagtatttttaatgcaattgtgtttgcattggtgtggctttagaggcttctccaaccaccttcccaaaatactgatctgtgatttttttctttaatgtttggccaaacataatacatgcttattttatttttcatccctacagaaaggtagaagatgagaattctgtctcctactgttgtttttcaaggtgccactcaaatttcttgtacgtgtctagaaacttgtgcatacaatagaagtacactgtggctgggcatggtggctcatgcctgtaatcccagcactttgtgaagctgaggtgggtggatcacctgaggtcagggagtttgagaccagcctggccaacatgatgaaaccccgtctttactaaaattagaaaaaattagccaggcgtggtggtgtgcgcctgtaatcccagctactcgggaggctgaggcatgagaatcacttgaactcgggtggcagaggctgcagtgagctgagatcatgccactgcattccagcctgcgcagctgagccagactccatctccaaaaaaaaaaaaaaaaaaaaaaaaagatgtccaatatatgtaacttttttctttggacacaaaaattccattagctttgttttctcatttttacttgtcatgatgtatgtcgaacacattatttttagtgtctggtgttccattatacagatgtctctcttgttggttgaatttttgcattcacagaccctcaagttggattcatatctttttacactaagcataaagaagacggattggggtcgggtatggtggctcacgcctgtaatcccagcacttcgggaggctgaggtgggcggatcacgaggtcaggagttcgagaccagcctggccaacatactgaaaccccgtctctaaaaatatgaaaaaaaaattagccaggcgtggtggtgcgcagctgtagccccagctacttgggaggctgaggcaggagaatcacttgaacccaggaggtggaggttgcagtgagcatattgcaccattgcattccagcctgcacgacagaggaagacgccatttcaaaaaaaaaaaaaaaaagacggattgattttcttcagcagtatcaagtggcacttaccatccacccctttaacacccaaaccattctaatccatgtatacagaccatcatctgtttcgttattgtgttctataatgcagctttgcgagttatgcagttttggtcctcatgatatttttctgattggtttttaatgtattttgttctaacgagccaacattgttatacatgtaatttgtttatttgctagattgtactctttcccaaagatgggctatgaactagcatctactttcattttacctatttacctgtaaacattgaaaaaactgaatcaaatgcagtgatatcggacctagttttattgttatgccttataatgaatttaacttcacagttttctaaatgagagcatttcccaaagacatctttatggtcataaccagtttcccttggcatttgatttatttttatttttatttatttatctttttgagaaggagtttcgctcttgttgcccaggctagagtgcaatggcgtgatctcgggtcactgcaacctctgcctcccgggttcaagcgattctcctgcctcagcctccaagtagctgggattacaggcatgcaccaccacgcccgactaatttgtatttttagagacggggtttctccgtgttggtcaggctggtctcaaacttccaacctcaggtgatccgcccgccgtggcctcccaaagtgttgggattacaggcgtgagccacagtgtctggcctgatttgtttttaagagcattatttttctgctttattttgtgacttcaacatttgacacaattttgggtgaatggtttgtgcatggtgcctgacatcgtgttttgatgtgtagtatatgccataggacatgtgagacaagatatgtcccaacttgaccttgttttgtattgtttatgtcaaggtgttgagtgtattagatatactgttggggctctgtgttctagctctgccttttagataataaccatggttaaatattgcaatgtcctgcatgtctccacacatgggttttgtaactgagtcagaatgataagtgattagtaagcacattttttctcctttcaggaaaccactattttccttttctacatgctgttttgtaagtagtacttttatgaaggttgtcttcaaatgttcgcatcttccatttctactgcccttgggttatccatcctgtcattttgtgccaatcacttttttttttaacttttaagttcagggatgaaagtgtagatttgttacataggtaaacttgtgtcatggggttgttgtacagattatttcatcacccaggtgttaagcctagtatgcactagttgtttttcctgatcctctccctgctcccaccctccaccctctgataggccccagtgtgtgttgttcccctctgtgtgtccatgtgttctcatcatttagctcccacttacaagtgagaatgtggtgtttggttttctgttcctgcattagtttgctaaggataatggcctcgagctccatccaagtccctgtaaaggacatgatcttgtacttttttatggctgcatagtattctgtggtgtatatgtaccacattttctttatccagtctatcattaggcatttaggttgattccatgtttttgctattgtgaatagtgctgcaatgaacatacatgtgcatgtctttttataatagaatgatttatattctgttgtgtatatacccagtaatgggattgctgagttgaatgctatttctgcctttaggtctttgatgaattgccacactgtcttccacaatggttgaactaatttacactcccaccaacggtgaataagtgttcacttttctccacaaccttgtcagcatctattattttttgactttttagtaatagccattctgactgctcacatctattttgtaaataaagttttattgaaacatggccttacccatttgtttacatatattcatggctgtttttgtgccacaatgtcagagttgtcttaaagtagacagagactatctggctgtaaagcctgagatatatactaactggttctttatgtaaaaagtttgctgaccacctactctaaacgttttgcagtgatggtagtgttggcaaaaaaccaaatagcttaccctctttaaatttcccttttacttcttacaaactcctaacaccatttacgactttgtcatcaatatggtcaactaagcttggtttgcatggctctacttcctttcaccttccacttaggcagtgtctccaagtccactgcagtttctatttgtctcctgactgttactgtatcagttcttacctaaataacataacaactgatctccctactttttgcctatgccctcaaatgtgctcattgttgatctatctccctgttaggtgttctttttctcctctttagaaagcagccaaggaaaccagggttctctcaaagtggaaaatactggaacttatgtactgttatcataatgatagttggtgttttgaattataagaatgattccaggtggtttctaaatcatccaataaagctgtattcactctgta

SEQ ID NO: 131324 - DNA, 686 bp, Homo sapiens
  Payload ID: 5628
  Gene Symbol: EIF4E
  Gene Name: eukaryotic translation initiation factor 4E
  ENST ID: ENST00000511644
  CDS Start-End: 1-466
cgaaccggaaaccacccctactcctaatcccccgactacagaagaggagaaaacggaatctaatcaggaggttgctaacccagaacactatattaaacatcccctacagaacagatgggcactctggttttttaaaaatgataaaagcaaaacttggcaagcaaacctgcggctgatctccaagtttgatactgttgaagacttttgggctctgtacaaccatatccagttgtctagtaatttaatgcctggctgtgactactcactttttaaggatggtattgagcctatgtgggaagatgagaaaaacaaacggggaggacgatggctaattacattgaacaaacagcagagacgaagtgacctcgatcgcttttggctagagacagagggtatacaaggaaaggttaggacttcctccaaagatagtgattggttatcagtcccacgcagacacagctactaagagcggctccaccactaaaaataggtttgttgtttaagaagacaccttctgagtattctcataggagactgcgtcaagcaatcgagatttgggagctgaaccaaagcctcttcaaaaagcagagtggactgcatttaaatttgatttccatcttaatgttactcagatataagagaagtctcattcgcctttgtcttgtacttctgtgttcatttttttt

SEQ ID NO: 131325 - DNA, 1132 bp, Homo sapiens
  Payload ID: 5628
  Gene Symbol: EIF4E
  Gene Name: eukaryotic translation initiation factor 4E
  ENST ID: ENST00000504432
  CDS Start-End: 212-949
agatcgatctaagatggcgactgtcgaaccgggtgctgtgaggaaatgcatggtttgttgaaaagaactgaggactgacagccgcctcctccatgattaccctggctctctgtcccacccttctcatggcgcttgggggaccatggctgatcctgtcctgagacaaattaagactcctgtggtgaagcagttggtcgagaaaaagtgatgcatgaaaaagaagcaaaacaagaaggaaagaaaaaaaatgagagctgaagatggtgaaaatgatgccattaaaaagcaggcagaaagtctgcgagaatcccaggaaaccacccctactcctaatcccccgactacagaagaggagaaaacggaatctaatcaggaggttgctaacccagaacactatattaaacatcccctacagaacagatgggcactctggttttttaaaaatgataaaagcaaaacttggcaagcaaacctgcggctgatctccaagtttgatactgttgaagacttttgggctctgtacaaccatatccagttgtctagtaatttaatgcctggctgtgactactcactttttaaggatggtattgagcctatgtgggaagatgagaaaaacaaacggggaggacgatggctaattacattgaacaaacagcagagacgaagtgacctcgatcgcttttggctagagacacttctgtgccttattggagaatcttttgatgactacagtgatgatgtatgtggcgctgttgttaatgttagagctaaaggtgataagatagcaatatggactactgaatgtgaaaacagagaagctgttacacatatagggagggtatacaaggaaaggttaggacttcctccaaagatagtgattggttatcagtcccacgcagacacagctactaagagcggctccaccactaaaaataggtttgttgtttaagaagacaccttctgagtattctcataggagactgcgtcaagcaatcgagatttgggagctgaaccaaagcctcttcaaaaagcagagtggactgcatttaaatttgatttccatcttaatgttactcagatataagagaagtctcattcgcctttgtcttgtacttctgtgttcatttttttt

SEQ ID NO: 131326 - DNA, 898 bp, Homo sapiens
  Payload ID: 5628
  Gene Symbol: EIF4E
  Gene Name: eukaryotic translation initiation factor 4E
  Uniprot ID: P06730
  ENST ID: ENST00000505992
  CDS Start-End: 22-768
gtgcgatcagatcgatctaagatggcgactgtcgaaccggaaaccacccctactcctaatcccccgactacagaagaggagaaaacggaatctaatcaggaggttgctaacccagaacactatattaaacatcccctacagaacagatgggcactctggttttttaaaaatgataaaagcaaaacttggcaagcaaacctgcggctgatctccaagtttgatactgttgaagacttttgggctctgtacaaccatatccagttgtctagtaatttaatgcctggctgtgactactcactttttaaggatggtattgagcctatgtgggaagatgagaaaaacaaacggggaggacgatggctaattacattgaacaaacagcagagacgaagtgacctcgatcgcttttggctagagacaagatgggatcttgctatgttgcccaggttggtctcaaacttctggcctcaagtgatcctcccacttcagcctcccaaagtgctggaattacagcttctgtgccttattggagaatcttttgatgactacagtgatgatgtatgtggcgctgttgttaatgttagagctaaaggtgataagatagcaatatggactactgaatgtgaaaacagagaagctgttacacatatagggagggtatacaaggaaaggttaggacttcctccaaagatagtgattggttatcagtcccacgcagacacagctactaagagcggctccaccactaaaaataggtttgttgtttaagaagacaccttctgagtattctcataggagactgcgtcaagcaatcgagatttgggagctgaaccaaagcctcttcaaaaagcagagtggactgcatttaaatttgatttccatcttaatgttactcaga

SEQ ID NO: 131327 - DNA, 738 bp, Homo sapiens
  Payload ID: 5628
  Gene Symbol: EIF4E
  Gene Name: eukaryotic translation initiation factor 4E
  ENST ID: ENST00000515638
  CDS Start-End: 14-142
agatcgatctaagatggcgactgtcgaaccggaaaccacccctactcctaatcccccgactacagaagaggagaaaacggaatctaatcaggaggttgctaacccagaacactatattaaacatcccctacagaacagatgagaaaaacaaacggggaggacgatggctaattacattgaacaaacagcagagacgaagtgacctcgatcgcttttggctagagacacttctgtgccttattggagaatcttttgatgactacagtgatgatgtatgtggcgctgttgttaatgttagagctaaaggtgataagatagcaatatggactactgaatgtgaaaacagagaagctgttacacatatagggagggtatacaaggaaaggttaggacttcctccaaagatagtgattggttatcagtcccacgcagacacagctactaagagcggctccaccactaaaaataggtttgttgtttaagaagacaccttctgagtattctcataggagactgcgtcaagcaatcgagatttgggagctgaaccaaagcctcttcaaaaagcagagtggactgcatttaaatttgatttccatcttaatgttactcagatataagagaagtctcattcgcctttgtcttgtacttctgtgttcatttttttttttttttttggctagagtttccactatcccaatcaaagaattacagtacacatccccagaatccataaatgtg

SEQ ID NO: 131328 - DNA, 1020 bp, Homo sapiens
  Payload ID: 5629
  Gene Symbol: EIF4EBP1
  Gene Name: eukaryotic translation initiation factor 4E binding protein 1
  Uniprot ID: Q13541
  ENST ID: ENST00000338825
  CDS Start-End: 234-590
gtgcggaagagcccgtgagcagacgggagtgggtcggggggcggcgggggatcccacgtggaagcagcgtcctggagctgggtggggctgcggcgcggactacaaatcccaggggcgtggggcgggagaggcggaaggggcgtcctggggcggggcggcacggggcgaggcggagcgaggctggaggcgcgggagggcagcgagaggttcgcgggtgcagcgcacaggagaccatgtccgggggcagcagctgcagccagaccccaagccgggccatccccgccactcgccgggtggtgctcggcgacggcgtgcagctcccgcccggggactacagcacgacccccggcggcacgctcttcagcaccaccccgggaggtaccaggatcatctatgaccggaaattcctgatggagtgtcggaactcacctgtgaccaaaacacccccaagggatctgcccaccattccgggggtcaccagcccttccagtgatgagccccccatggaagccagccagagccacctgcgcaatagcccagaagataagcgggcgggcggtgaagagtcacagtttgagatggacatttaaagcaccagccatcgtgtggagcactaccaaggggcccctcagggccttcctgggaggagtcccaccagccaggccttatgaaagtgatcatactgggcaggcgttggcgtggggtcggacaccccagccctttctccctcactcagggcacctgccccctcctcttcgtgaacaccagcagatacctccttgtgcctccactgatgcaggagctgccaccccaaggggagtgacccctgccagcacaccctgcagccaagggccaggaagtggacaagaacgaacccttccttccgaatgatcagcagttccagcccctcgctgctgggggcgcaaccaccccttccttaggttgatgtgcttgggaaagctccctccccctccttccccaagagaggaaataaaagccaccttcgccctagggccaaga

SEQ ID NO: 131329 - DNA, 7257 bp, Homo sapiens
  Payload ID: 5630
  Gene Symbol: EIF4EBP2
  Gene Name: eukaryotic translation initiation factor 4E binding protein 2
  Uniprot ID: Q13542
  ENST ID: ENST00000373218
  CDS Start-End: 24-386
gccgagagcccgcgcccacagccatgtcctcgtcagccggcagcggccaccagcccagccagagccgcgccatccccacccgcaccgtggccatcagcgacgccgcgcagctacctcatgactattgcaccacgcccggggggacgctcttctccaccacaccgggaggaactcgaatcatttatgacagaaagtttctgttggatcgtcgcaattctcccatggctcagaccccaccctgccacctgcccaatatcccaggagtcactagccctggcaccttaattgaagactccaaagtagaagtaaacaatttgaacaacttgaacaatcacgacaggaaacatgcagttggggatgatgctcagttcgagatggacatctgactctcctgcaaggattagaagaaaagcagcaacactgatacttgtgtgcacctgatttggccaataggatcaacagtgaaaagacagaagaggcaataccagcagtccccattacagtctccacctccccgtcttcctctgggtgccaaatgatgggaagatgagcttcatctgaccatttcttctccctgtctcctgttccccttcccagttaaacaggttagattgaaggcccttgctgtatttctgtagagctaagcagcccttagaggaaaacagttcaactctgactttcctagttgtttttttattgagagccaccctcataccctgtaattttgtcccaaatcaaatatcaacctaccaacaactgcctggctgggaagtctggggaagggatacagagcttggtgggcctaacaccattcatattccttaccctctgtctctcctccctgtatcccacctatggttcagtgttgcaagagtctgggcttggggtctttaaaaccagcagggggaaatgataaaaagagagctgctttcccttttaccttgaggtattcgtccctcgggacagagcacagcttgtgcaactctggtagcgttaccctgtgacactgttttgaggtccacttcctttctttcctctgggaggaatgtcttctgtctttggtattatagttcatcttcccattcttttacttagtgcatttgtgcagatatttttaactctgtacatcagaagagagcccttggtaaccagttttgctcttcttctgccactcctccctgcttgcatctcgttgctggcagagtcctcttgtacttcaagaaagcaaagtgattttgtctgctcctagagcaggtccataccaagtaatagaggcactttagcttccacttggtgggtaaggcctgatcatagtattctgtcagataatgcctaagaatgaccgctgaagaacgttgacccatttgagtacccggtctcagtcgtcatttttaagtccagtgagcattgtggtagttgttcttagattgcagtttcttatgttttgagtttgaagttgattttcagaatgttcttagaaaagaactgcatttttttcctttgtggatctgctttgtttggctgctgggatagataagcatgggcttaaaaaatgtgttcctcccagttttcttgcctttcctgttgtactctgaatttctctccctacctccctcactttcttcctctctccttcctttccttcctttttctctaccaggccatttttcaaatttacatcaaagatacctgaagtgttggtatctgagaatatctgtcactcctcttatctgagaagtgaccttttatttttaagatgactacagacctatttttagatatgttttcagtacaattttgaacagcaactttttaattaaacatcttccagtgttaggaagttgagaaacgttcataggcaagtctgctgttctatgtcaccatcttttgtctcccctagtcccccaggagctctttcctttcccctctagttttgggtgtgcatgtttggagtttgtagtgggtggtttgtaaaactggaccattctgccttgctatgggttgttcaagaaagcctcattcttttctgtgaccctttcgcttttgcattcaccctccttcccacctacctgtcctggggctgttgagcagcataataatcccgggagaatgattcccctcatagaaagacaaaagcatccatcccctcatagttaagtagccactggtgtcctgggaatttctggttggatttggtgccctgaacttttttattaagaaatcagatcccagggtgagagtaacaggccatttggccaagaaagaaacctgtttgtttttcttttgaactatgaaaagaccctgtttgtgaatatattttagaaagagaggaaggatgtctgcagaactttgttctgttttctgccacaaaaatgtgaatagttcagagtgaaaaccttttgtgatggttgatgtctcaggaataagctggatctccaatgttttggggatgctttgagtctcaaaaaaaattgataatcagaaaagtaatttttgtttgtttgtttaatgtatccctgttctgtttttaattaaactccaagtctcattttacatattcttggaaaaacctaagttgctctgtaatttacataagaagcatgctcaggacctctttgtaccccggggagcctgattctttgggaatgaagcttttcattcttcatacactggccttggcatcctgtggaatttgacccaactagcagctagtcagtctgtcagtgagcagaagagtgaactcttcttgatctttattgctatgtgtgaaaacttggcttcctcactgaacggtgaggaatggatttaaagcatgagctttagtagtatcaagatgccattttcctttttcttgctgtcttggggagcttctgcatgtgaccccctaatcagaaggcatgtttttagtatttcttgggagtgtcagctgtataatgcagcagctgttcaatcccttacccttctctgcaaggacttccttacagcttggtgcagttctttcccagaggccaccactactagacagtctttcttttatcttatggagataaattggcatttaaaaaataatttcacaaggcatgagataaactttcaatagatgatacctttgtgtcatgcctcatggaattatttttagaacaagccagagtccattgagtggtttacctctgcatgtttggagggaacctcacagatgaaacccttaatgaataatgtgtccggggttttttagagagaaggagcactcttaagttaccactttgagacagctcttaacatcttagtgaccatttgtagttttctttttatgaggaacccatgcttctatacttgggcggacaatcgagcttaatgagaagtgacttcccttcaaattccaacagcagacatgcattgtcatgattctgtcttctttttagtgtggtttattgagttcagcagttctcatattctgtttaaataggtacagcattttcaagggcacagatacagagaagctggctttctaggtattgggcttccaagccaagagttttgtccttccacctgtattagttatctattgctgtgtaaaaaattaccctaaatttagtatgttaaaatagtaaacattatctgtcagtttctgtgggttaagaatttgggagtagtttaacatgatggttctggcccatggtatcatgaagttacagtcaagattgaacaggggctgcagtcagctggagctggagaaaccacttccaagttctctctttgtggccgttggcaggatgcctcagtttcttcccatgtgggtctctgcgtagggcagcatgagtgtcctcacaccatgacacctggcttctccctgagcagctgattccagagatcatggggcagggccaggagaaagctgcagtgccttttaagacatagtcttggaaaggacacaccgtcacttcttatcctagttgttagaagcaagccactaagttcagcctgcactcaaggagagaggaattacacatacctctaccccaatggagcagtagcaaagaatttatggacatatcttaaaagcaccacaccccaactggggatgaaagtaggtcaacagggaggtaggtttaatctagataagctgaaagatagattgctatcaaaaacagttctccaagatgtgcatagccaaactgggatagaaggcaaactccccaaagctacctgctggttttgagaggggtggtaagacatggcaattcccaggagtagtagaaaataatatgcctgactaccaacagctcaagtatgcttatttgcacatcctagacttggtgtctgtaagactcagttaccacttttattttcctgtagctaggagttagcaaaaggaactggggccttccagccgagccactaaacctgtcttatttggaatggggattgtccagcaaagggagcaaacatgaattagatgttaagctattgagctgaagaaaagaaagcagttcacatttaggtgaaatagatgatgttatcaggaagccaggttcccaccagagtcggtgcttggtacctggtctctccagtctcaacagactcaggtcaggtctctcacccaggaagcaaccactcaataaaatagagaacatctgagaattacaaatgtctatgcttgattgctcctctaaatccagtgcataggttaaccctgcatgcccatttcttcctgggcttcttgatggcaatgtgttcttaaataactggtcttgtgttcatgctaaagacaaacttacatgaagtttttcagtttaagacattctagtgaatggctgctatgtgtttctggcactcattcctaaccaagtctttagagatttcagatgaccttaaagatgcaatatctttttctttctttctttctttctttttttctgagacaagagttgcgccctgtcgcccaggctggggtgctggagtgcagtggtgcgatctcagctcactgcagcctctgcttcccaggttcaagtgtttctcctgcctcagccttccgagtagctgggattacaggcatgtaccactatgcctggctaatttttatttctatatttttagtagagatggggtttcatcatgtttgccaggctggtctcgaactcctggcctcaagtgatccgcccacctcagcctcccaaagtgctgggattacaggcgcgagccaccgcgcctggccaaagatgcaaattcttgtttggatttatgctctgcctcttcccagcattttcttatctgtagccctgcttgcttgagagtatacttggataagaagtattgctgttgagggagctataagaaaaggattcttcttccagaagtaaagaactcatctttagagtacctttaaatgaattttgtttttctttcttattttgaggtggattggtcttctctttttttgggtttccagctcactgggactctcagaccttacctttccagctcaaacaccattagttaaattccttcattctcattagaatgcagcctgctgagtatgtgggtttcactgccggagtccatcatttagccagtatacatagaggaactgcttcgaatcaaggcaactggtgaagggcttagcatgttggcagcaatatcccagagattgaatctgtttgcattttcctcatctaggataacagctgcttgaagccagggctcttagccctttgcattccccttgagcgaggaagccacactgcctttctgtgtctggttcagagctcttccttcttggcatgttttctggactacatgcacatgggcagctatagattaatctgcaaaacctagtcacttacctacccataatatctgggaaggtgtggtatttgttttaaagaaacattgtttctttgggagggcagtttctgtctggactttgaggtggacttagttatccctacagttctttaactctcagcttttaataaaagatgaaatcagatattgatgcagttgggtcacaattctttagaatgcttctaccccagggccgcttcctgttcctagtcatggttttccagtttagtagtggagtttcttgaggctaacttacagaaatttctaactgaaaactttaagagttattgatacttgttttttcagtcagtcacttacatcacctagcctactctctggaatttaaatttatttctctaggctggtcctggaagttgataaccttttggcaaagcttagatttaggagaaggcttgagtccctgttcagcgggtctgtggattctctttgcttatggctctctgcctgcagccctggcagaccatactgtatgtcatggatacccagtggaaatattactgagatgaaacacatttccaagggtatttaaactctcactctgccacctttctaagggtgggaggctggcagagatgctgcaatgcttgataatcatttggccacactgaaatttccaaagggagctcttgccggtgcttaaaaccaaaactcctggacacttagaaaattccatgaatctagcacaaaatatccattcttgcccaagtgtatcccctttctctccagcttaatcttttttttttttttttttttaaagcccaggccaagggtacttttaactggaaactggggaggagggaagaacactagcagggagctaagaggcaggttgctgggtaagccatcctgctcctacctggtgcctgtatctacattgctgagtgctgtgcgccagtgcctttccttcatctgcagatggagcccatctctttccacctgggtgaggagaccctctgctactccaggggtaaaccttaaagaaggtgtcttgaagagcccagaggacactcacgtgctaaggtgtccattttatgcatctttaaaatattttatttaaaaaaaaaaatagccctgccctgtcttagtgccactaacggcccagttccatccattctgaatggaaaagcggagactgccagcactttccttggtcttccctttgtctcccatgatgtgttgttccctcatccctcccatccatttcactgtgtgtggatggatagcagagggtaccacgcagtccttgaggcagtcctgtgtgattccatgatcagttgtttttgtattttaactattcttccaaaccagcagatgtttggaaattaaggaaaaaattaaattctcatcaatggttgctgttatagttaaatcagtaaagatcttgagtatcaa

SEQ ID NO: 131330 - DNA, 691 bp, Homo sapiens
  Payload ID: 5631
  Gene Symbol: EIF4EBP3
  Gene Name: eukaryotic translation initiation factor 4E binding protein 3
  Uniprot ID: O60516
  ENST ID: ENST00000310331
  CDS Start-End: 73-375
ccgcctcagactcagagctgcgctcctcgacctcaacgccaggcggttactttgctgctcctcccgctcgctatgtcaacgtccactagctgcccgattcccgggggccgggaccagctgcccgactgctacagcaccacgccggggggcacgctatacgccactacccccggaggcaccaggatcatctacgaccgaaagttcctgctggagtgcaagaactcacccattgcccggacacccccctgctgcctccctcagattcccggggtcacaactcctccaacagcccctctctccaagctggaggagctgaaggagcaggagacagaggaagagatacccgatgacgcacaatttgaaatggacatctaatccagtgcagatgacctggcatgtggagttacagagggatccctcatgccactgctgccaccacctcttcctggggcatccaaaggccagctggcctcatctaatctggaagggagtgacttgttagttccaggcctcctttagttctgaggcagctagaccagggataggagtgggcaacttgccaagcccttaactctacttcctcttcagtctgtggtactcctcctaaccctaaaccctctatgctcaggggctggaactggggaatggagtaagtcaccttctgactgcttagtaaacattcaaagaaatg

SEQ ID NO: 131331 - DNA, 1974 bp, Homo sapiens
  Payload ID: 5632
  Gene Symbol: EIF4E1B
  Gene Name: eukaryotic translation initiation factor 4E family member 1B
  Uniprot ID: A6NMX2
  ENST ID: ENST00000318682
  CDS Start-End: 585-1313
gttgggagttgagggagggggacaacgcggcgtgtgaagagtggggaagaaatcacgcgactggatttggagttctgctgggctcgaatctcagctgtgctttttattaaccgtgggaccttgagctactcggctctcctttctgaatgacagtttcctcctctgtaaaacaggaatggttaattcaacgaatgtttactgagcgcttagtccagtggtgcaggtttaaggctggaggcagcggaaaaggaaaacaaggttcctggtctcgggaagcttaccatgggggtgtctgtacgcgtgtgtgttcgtgcgctcagtggtggaagacaggacagaaaataaacggatcaacatccaaagcaacaaggtcattacagcttatggggaaactgactcgatgaagctcaggcctggccgcggtcagggtagaatcaggactagaacccaggctgtgtggctgcagccctgaccctcaccatccaggtcaggcagagaacactcaggtcttggcccccatggtgtggggcttggtcacagctgcttccccagccccaggcctgcacgaagaaggcactcactaaatgcttgctgttgaggtgagtgaagctgagggtggaatccgagagtgggaggaggaggagaaggaggaggaggcagcagagaggacgcccacaggagaaaagtctccaaactctcccaggactttgctgtctctgagagggaaggcccggacggggggccccatggaagtcaagctggagctgcaccccttgcagaacaggtgggctctgtggttcttcaagaatgaccgcagccgggcctggcaggacaacctgcacctggtcaccaaggtggacactgtggaggacttctgggcgctatacagtcacatccagctggccagcaagctctcctctggctgtgactacgccctcttcaaggatggcatccagcccatgtgggaggacagcaggaataaacggggtggccgctggctggtcagcctggccaagcagcagcgccacattgagctggaccggctgtggctggagacgctgctgtgtctgatcggggagagctttgaggaacacagcagagaggtatgtggggccgtcgtcaacatccgcaccaagggggacaagatcgctgtgtggacgagggaggcggaaaaccaggcgggcgtgctgcacgttgggcgtgtatacaaagagcgcctgggcctctccccaaagaccatcattgggtaccaggcccatgcagacacagccaccaagagcaactccctagccaagaacaagtttgtggtgtgaggggggccttggcacccctcctatgtaatgggacagccgccactgagcctcattactttgggggatggggcgggactggggatcagacagcctagttcttacctgtcctcaagtgaacaggaatgcaaacactctttaacatgagttggggcctgagccttaggggctagatgggggtagtggtggcagtctgaggacctagcttgtcctggggccacaggacagcagcagggtggaaaaaactcctgagggtggggtgagtcatggcggggaaggagggctctatggtaggcggagaaacccatagtccagcgtttactgtttccacccaggaaggaggtgaggtggcctgagagacagactcttccatgggtggtgggctcaagggcacagacattctggagggtgaacgccatcatttgtacagagggatacgtgggttgctgaggactgagagagccttgcaaggccgctccccttctccccagctgtgaccagggctgtctgggccttgcctgcctcagggccagactgaagtggaggtggagggatgctgggctaggcctcaccaaggttctggtagaagtggtggaagtggataaacttgataataaaagcttaagcatctttctgttcctgttttaaataaatacttctgaac

SEQ ID NO: 131332 - DNA, 581 bp, Homo sapiens
  Payload ID: 5632
  Gene Symbol: EIF4E1B
  Gene Name: eukaryotic translation initiation factor 4E family member 1B
  ENST ID: ENST00000510660
  CDS Start-End: 312-581
aagcttaccatgggggtgtctgtacgcgtgtgtgttcgtgcgctcagtggtggaagacaggacagaaaataaacggatcaacatccaaagcaacaaggtcattacagcttatggggaaactgactcgatgaagctcaggcctggccgcggtcagggtagaatcaggactagaacccaggctgtgtggctgcagccctgaccctcaccatccaggtcaggcagagaacactcaggtcttggcccccatggtgtggggcttggtcacagctgcttccccagccccaggcctgcacgaagaaggcactcactaaatgcttgctgttgaggtgagtgaagctgagggtggaatccgagagtgggaggaggaggagaaggaggaggaggcagcagagaggacgcccacaggagaaaagtctccaaactctcccaggactttgctgtctctgagagggaaggcccggacggggggccccatggaagtcaagctggagctgcaccccttgcagaacaggtgggctctgtggttcttcaagaatgaccgcagccgggcctggcaggacaacctgcacctggtcaccaag

SEQ ID NO: 131333 - DNA, 514 bp, Homo sapiens
  Payload ID: 5632
  Gene Symbol: EIF4E1B
  Gene Name: eukaryotic translation initiation factor 4E family member 1B
  ENST ID: ENST00000505497
  CDS Start-End: 1-514
agctgcaccccttgcagaacaggtgggctctgtggttcttcaagaatgaccgcagccgggcctggcaggacaacctgcacctggtcaccaaggtggacactgtggaggacttctgggcgctatacagtcacatccagctggccagcaagctctcctctggctgtgactacgccctcttcaaggatggcatccagcccatgtgggaggacagcaggaataaacggggtggccgctggctggtcagcctggccaagcagcagcgccacattgagctggaccggctgtggctggagacgcagagaggtatgtggggccgtcgtcaacatccgcaccaagggggacaagatcgctgtgtggacgagggaggcggaaaaccaggcgggcgtgctgcacgttgggcgtgtatacaaagagcgcctgggcctctccccaaagaccatcattgggtaccaggcccatgcagacacagccaccaagagcaactccctagccaagaacaagtttgtggtgtgag

SEQ ID NO: 131334 - DNA, 1676 bp, Homo sapiens
  Payload ID: 5632
  Gene Symbol: EIF4E1B
  Gene Name: eukaryotic translation initiation factor 4E family member 1B
  Uniprot ID: A6NMX2
  ENST ID: ENST00000504597
  CDS Start-End: 321-1049
aaggctgtgggttgagcaaatactcagcctccagatggtcacgagccccccaagtgtgggggaggagcagggccttttatacgtctgggaccctaaaagtgcccaagatggggaaactgactcgatgaagctcaggcctggccgcggtcagggtagaatcaggactagaacccaggctgtgtggctgcagccctgaccctcaccatccaggtcaggcagagaacactcaggtggggcaggaggtcttggcccccatggtgtggggcttggtcacagctgcttccccagccccaggcctgcacgaagaaggcactcactaaatgcttgctgttgaggtgagtgaagctgagggtggaatccgagagtgggaggaggaggagaaggaggaggaggcagcagagaggacgcccacaggagaaaagtctccaaactctcccaggactttgctgtctctgagagggaaggcccggacggggggccccatggaagtcaagctggagctgcaccccttgcagaacaggtgggctctgtggttcttcaagaatgaccgcagccgggcctggcaggacaacctgcacctggtcaccaaggtggacactgtggaggacttctgggcgctatacagtcacatccagctggccagcaagctctcctctggctgtgactacgccctcttcaaggatggcatccagcccatgtgggaggacagcaggaataaacggggtggccgctggctggtcagcctggccaagcagcagcgccacattgagctggaccggctgtggctggagacgctgctgtgtctgatcggggagagctttgaggaacacagcagagaggtatgtggggccgtcgtcaacatccgcaccaagggggacaagatcgctgtgtggacgagggaggcggaaaaccaggcgggcgtgctgcacgttgggcgtgtatacaaagagcgcctgggcctctccccaaagaccatcattgggtaccaggcccatgcagacacagccaccaagagcaactccctagccaagaacaagtttgtggtgtgaggggggccttggcacccctcctatgtaatgggacagccgccactgagcctcattactttgggggatggggcgggactggggatcagacagcctagttcttacctgtcctcaagtgaacaggaatgcaaacactctttaacatgagttggggcctgagccttaggggctagatgggggtagtggtggcagtctgaggacctagcttgtcctggggccacaggacagcagcagggtggaaaaaactcctgagggtggggtgagtcatggcggggaaggagggctctatggtaggcggagaaacccatagtccagcgtttactgtttccacccaggaaggaggtgaggtggcctgagagacagactcttccatgggtggtgggctcaagggcacagacattctggagggtgaacgccatcatttgtacagagggatacgtgggttgctgaggactgagagagccttgcaaggccgctccccttctccccagctgtgaccagggctgtctgggccttgcctgcctcagggccagactgaagtggaggtggagggatgctgggctaggcctcaccaaggttctggtagaagtggtggaagtggataaacttgataataaaagcttaagcatc

SEQ ID NO: 131335 - DNA, 1604 bp, Homo sapiens
  Payload ID: 5633
  Gene Symbol: EIF4E2
  Gene Name: eukaryotic translation initiation factor 4E family member 2
  Uniprot ID: O60573
  ENST ID: ENST00000258416
  CDS Start-End: 674-1411
tgacaatagcaacatcaaagatcactgatcatagatcaccataacagacacagaaatcatgaaaaagttttaaatattttgagaattaccaaaatgtaacacagagacaccaagtgagcacatgctgttggaaaaatggcgctgatacaattgctggactcagggctgccacaaaccctccatttgttttcagaatgccctatctgcgaagcgtaataaaacgaggtatgccatagtacagtggcgccgcgaccgacaaaggaaagcctccgggaggtcaaaagagataccagagagtgcgtcccgcactggaggaagaggaaggtttttaccaagcagcgagtccagagcccgcgccgtcaacgacgcggtgctgccttttttccgagccgctgcgggagggggccaggacacgctcccttaggagagcgggcgggtcacaaggacctggacagaggcagaactgaggccagcagccagctccgccgctgagtccagccctctgcgcagccgccctgagctggcgtcccgagatagccgcttccaaaccgggcctgcgcgccgacgttccgctgcgccccgcgcaaaaccggaagtacccgggcccaaggctgagggacccggtggagcggaagtcactccctgaggcagtggcgacagcggcggcgagaggatgaacaacaagttcgacgctttgaaagatgatgacagtggggaccatgatcagaatgaagaaaacagcacacagaaagatggtgagaaggaaaaaacggaacgagacaagaatcagagcagtagcaagagaaaggctgttgtccctggaccggcagagcatcccctgcagtacaactacactttttggtactccaggagaacccccggccgtcccacgagctcacagagctatgaacagaatatcaaacagattggcacctttgcctctgtggagcagttctggaggttttatagccacatggtacgtcctggggacctgacaggccacagtgacttccatctcttcaaagaaggaattaaacccatgtgggaggatgatgcaaataaaaatggtggcaagtggattattcggctgcggaagggcttggcctcccgttgctgggagaatctcattttggccatgctgggggaacagttcatggttggggaggagatctgtggggctgtggtgtctgtccgctttcaggaagacattatttcaatatggaataagactgccagtgaccaagcaaccacagcccgaatccgggacacacttcggcgagtgcttaacctacctcccaacaccattatggaatacaaaactcacaccgacagcatcaaaatgccaggcaggctgggcccccaaaggctcctttttcaaaacctctggaagccgcggttgaatgtgccatgaccctctccctctctggatggcaccatcattgaagctggcgtcatcggagtctcttgttctgttggcgtgctacctggaagatccttctgtcctggacaagaggaattggaagagcattttatgttttaagaacaggctgacacgcagcagctacaacaacagctgagatcacttaataaatggtgctaaacta

SEQ ID NO: 131336 - DNA, 797 bp, Homo sapiens
  Payload ID: 5633
  Gene Symbol: EIF4E2
  Gene Name: eukaryotic translation initiation factor 4E family member 2
  ENST ID: ENST00000409322
  CDS Start-End: 34-636
ccctgaggcagtggcgacagcggcggcgagaggatgaacaacaagttcgacgctttgaaagatgatgacagtggggaccatgatcagaatgaagaaaacagcacacagaaagatggtgagaaggaaaaaacggaacgagacaagaatcagagcagtagcaagagaaaggtggagcagttctggaggttttatagccacatggtacgtcctggggacctgacaggccacagtgacttccatctcttcaaagaaggaattaaacccatgtgggaggatgatgcaaataaaaatggtggcaagtggattattcggctgcggaagggcttggcctcccgttgctgggagaatctcattttggccatgctgggggaacagttcatggttggggaggagatctgtggggctgtggtgtctgtccgctttcaggaagacattatttcaatatggaataagactgccagtgaccaagcaaccacagcccgaatccgggacacacttcggcgagtgcttaacctacctcccaacaccattatggaatacaaaactcacaccgacagcatcaaaatgccaggcaggctgggcccccaaaggctcctttttcaaaacctctggaagccgcggttgaatgtgccatgaccctctccctctctggatggcaccatcattgaagctggcgtcatcggagtctcttgttctgttggcgtgctacctggaagatccttctgtcctggacaagaggaattggaagagcattttatgttttaagaacaggctgacacgcagcagctacaacaaca

SEQ ID NO: 131337 - DNA, 1014 bp, Homo sapiens
  Payload ID: 5633
  Gene Symbol: EIF4E2
  Gene Name: eukaryotic translation initiation factor 4E family member 2
  ENST ID: ENST00000409495
  CDS Start-End: 37-738
actccctgaggcagtggcgacagcggcggcgagaggatgaacaacaagttcgacgctttgaaagatgatgacagtggggaccatgatcagaatgaagaaaacagcacacagaaagatggtgagaaggaaaaaacggaacgagacaagaatcagagcagtagcaagagaaaggctgttgtccctggaccggcagagcatcccctgcagtacaactacactttttggtactccaggagaacccccggccgtcccacgagctcacagagctatgaacagaatatcaaacagattggcacctttgcctctgtggagcagttctggaggttttatagccacatggtacgtcctggggacctgacaggccacagtgacttccatctcttcaaagaaggaattaaacccatgtgggaggatgatgcaaataaaaatggtggcaagtggattattcggctgcggaagggcttggcctcccgttgctgggagaatctcattttggccatgctgggggaacagttcatggttggggaggagatctgtggggctgtggtgtctgtccgctttcaggaagacattatttcaatatggaataagactgccagtgaccaagcaaccacagcccgaatccgggacacacttcggcgagtgcttaacctacctcccaacaccattatggaatacaaaactcacaccgacagcatcaagtacgtgttggggggttatgggaggacgtgtccctaagcttagtataagtagatctgtagttgggcccagaggaatatggccggacaggagacttacttgtggagaagggacagaccaggccttccctctagggcttctggctacttgctgcagttctttgtcagcgaggctccctgccacctatactaccaggtgctttgtagcagagagagcccatctgcagaaacccagttgtactacctgggcttgcttaatttctacaggctgtcttgtctttcatatgctaaccactatcttaaaatgaaagacaag

SEQ ID NO: 131338 - DNA, 604 bp, Homo sapiens
  Payload ID: 5633
  Gene Symbol: EIF4E2
  Gene Name: eukaryotic translation initiation factor 4E family member 2
  ENST ID: ENST00000409394
  CDS Start-End: 22-591
ggcgacagcggcggcgagaggatgaacaacaagttcgacgctttgaaagatgatgacagtggggaccatgatcagaatgaagaaaacagcacacagaaagatggtgagaaggaaaaaacggaacgagacaagaatcagagcagtagcaagagaaaggtggagcagttctggaggttttatagccacatggtacgtcctggggacctgacaggccacagtgacttccatctcttcaaagaaggaattaaacccatgtgggaggatgatgcaaataaaaatggtggcaagtggattattcggctgcggaagggcttggcctcccgttgctgggagaatctcattttggccatgctgggggaacagttcatggttggggaggagatctgtggggctgtggtgtctgtccgctttcaggaagacattatttcaatatggaataagactgccagtgaccaagcaaccacagcccgaatccgggacacacttcggcgagtgcttaacctacctcccaacaccattatggaatacaaaactcacaccgacagcatcaaggacaattcaagctttcgaaatacaaaaatcacattgtgagagtacacaagct

SEQ ID NO: 131339 - DNA, 3448 bp, Homo sapiens
  Payload ID: 5633
  Gene Symbol: EIF4E2
  Gene Name: eukaryotic translation initiation factor 4E family member 2
  Uniprot ID: O60573
  ENST ID: ENST00000409098
  CDS Start-End: 43-747
gaagtcactccctgaggcagtggcgacagcggcggcgagaggatgaacaacaagttcgacgctttgaaagatgatgacagtggggaccatgatcagaatgaagaaaacagcacacagaaagatggtgagaaggaaaaaacggaacgagacaagaatcagagcagtagcaagagaaaggctgttgtccctggaccggcagagcatcccctgcagtacaactacactttttggtactccaggagaacccccggccgtcccacgagctcacagagctatgaacagaatatcaaacagattggcacctttgcctctgtggagcagttctggaggttttatagccacatggtacgtcctggggacctgacaggccacagtgacttccatctcttcaaagaaggaattaaacccatgtgggaggatgatgcaaataaaaatggtggcaagtggattattcggctgcggaagggcttggcctcccgttgctgggagaatctcattttggccatgctgggggaacagttcatggttggggaggagatctgtggggctgtggtgtctgtccgctttcaggaagacattatttcaatatggaataagactgccagtgaccaagcaaccacagcccgaatccgggacacacttcggcgagtgcttaacctacctcccaacaccattatggaatacaaaactcacaccgacagcatcaaggacaattcaagctttcgaaatacaaaaatcacattgtgagagtacacaagctggcaataatccttttctgtatgtgtgtgtttgtccgaaatggatgggaggcctccagccagtccttccattgctcactgaagggacgtccctgagccgtgcgctctccttttgcactcattcctggaggacggattccgctagacaccctccagcatcgctgactttataaagcggaaaaacggaaaacgtgactttgtaatagacaaacattgttttttaatggggttccatgggggggcgttcagcctttctgtttgctgtgtgctgtccagatgcctcttgggcgtcctgttgttctcttcccgtgttgtacgaagggtaccgtggccacgtgtacatgccagagctgttgatgagagttaccagtattatgaatgtctgtgcatccaggaaaagtgttctgttggagagtcccaaaatagctgtaaatgctctcttctagctctgccattaaattattgggacattttgtttctttctctcccctcctccaagcccaccactttctgaagctgtgttactgatgtgatgactgtccaggattttgtatcatcccctgccttatgccctccggtctcctctcctgtgggactctctccttcttaggcacagctgcacttagaattgtaatccagtggctctcactggtttcactgaggcagcttagagggaatgccttagtaaactgaactggagcagaatctagtttgattaggagctagattataatctaggttccaagtacagaatttggagctaaggactgtgactgaaatcattttcccatatgagcagaccctgtgtgtcaggcctgtttcccatatgagcagagcctgtgtgcaagtctgtttctggcatgtccctcattgaggaagggaagcaaaagctggttattgccaggcctattaacacttaatatgcaaattctatcatcctgaaactggggcatctgaggaaaaggtgaccttgctggatggctttatttgcatggctctgcctgtctgcagtggttgagtcctcatcacctggtatgtgtatgagcaaatgtgtgctgattgtgatgcccaggcagaaacctcttgaagactgctgcaggcatgctttaaaaatgaccagtcactcatcagagaagctgggtgatctgactccagaaggactgaagtcagagaagtcacaagagcacctaggattcaaataaatagcgtcagagtcctatagcaacctccaagtagcaccgtcttacttggctcttgtgagcaaagactgcagtaccttaaattaaggcctctctttaaaacatatgtggaagactaggggatccttggccacctggtctcagagaaatcatatgagagtaacaggcatttccttattgtatttgtactacactcttcctacttttccattcctgaacaccctctaattaccactgttttggggatgctttttttctgaaagaacggggagtacaggggccaaaagggaggtgcttctattacagggcaagttagatcagataagaagatctagcagtgatttaaactccaggaatatgaagagtgcattctggtgtccagacagttgtgaagggctcggcaaatataagagcaccattggctacatggagagcaaaggctgtctttgaagaccccagggaggtcttcacttttgcctaaattcagatttgccgtgaaaattccaaagagagcagatatttggatttgccctcctttgggcatctacctgactgttgtgtgtgtgggaaagtcagtgtgtatgtgtagagtgtgcttaggagtgagtgagtggtcaggcctcctggctaggtgtgttgtccatagttttgttgttgttgttgttgttgttcagagttttgaatcttacgttttctagagctgctcatgttttcccttcctttttgtcgttgtagtatttgacagttgtcttttccatcaaaaacatactggccctaggctggttagagcaaggggttatgcctgttaggcagcatcttacgcccagtgttctcccagatattctgcctaacaggtttaagtaggagattaaatagtcagtttatctaaaccctctatttttccaaactagcttgagaggtcttttcatctatttttactccatgggcctctgatatgctgagatgtggcacggttatgattatggtatcaccgttacagaggcaaagggataaaggtctaccagggccaacgtaaccagaatgtgaggagagtgaagagtcggtctccgctttgcacagtaccagaatgtgaggttgccactggagagtggagagtcggtctccactttgcacagttggagctgttctcctctaactcctttgctgggttttctgtttgaaattggcccctactcctctccagccctttactgggttttctgtttgaaattggcccctactcctctccagtgtctgctttttgaatccttctgttcgtgtgtgtgtgtgtgtgtgtgtgtgttccctatgatactggcagtggcaataattttccacccagagagaagcttgtggtccacaatgctcgaagaatgaatttccaagtatttgccagtggaaacggagcagaggctatgacaagagtgatttagtgttgcactttcagagcaattatctactgcagtaataaattgaaaatatcagcaagaa

SEQ ID NO: 131340 - DNA, 1372 bp, Homo sapiens
  Payload ID: 5633
  Gene Symbol: EIF4E2
  Gene Name: eukaryotic translation initiation factor 4E family member 2
  ENST ID: ENST00000409167
  CDS Start-End: 37-603
actccctgaggcagtggcgacagcggcggcgagaggatgaacaacaagttcgacgctttgaaagatgatgacagtggggaccatgatcagaatgaagaaaacagcacacagaaagatggtgagaaggaaaaaacggaacgagacaagaatcagagcagtagcaagagaaaggtggagcagttctggaggttttatagccacatggtacgtcctggggacctgacaggccacagtgacttccatctcttcaaagaaggaattaaacccatgtgggaggatgatgcaaataaaaatggtggcaagtggattattcggctgcggaagggcttggcctcccgttgctgggagaatctcattttggccatgctgggggaacagttcatggttggggaggagatctgtggggctgtggtgtctgtccgctttcaggaagacattatttcaatatggaataagactgccagtgaccaagcaaccacagcccgaatccgggacacacttcggcgagtgcttaacctacctcccaacaccattatggaatacaaaactcacaccgacagcatcaagtacgtgttggggggttatgggaggacgtgtccctaagcttagtataagtagatctgtagttgggcccagaggaatatggccggacaggagacttacttgtggagaagggacagaccaggccttccctctagggcttctggctacttgctgcagttctttgtcagcgaggctccctgccacctatactaccaggtgctttgtagcagagagagcccatctgcagaaacccagttgtactacctgggcttgcttaatttctacaggctgtcttgtctttcatatgctaaccactatcttaaaatgaaagacaagtgcttttctttttcttgctgttttttaagataatttcaccctgcccaccctcaccccacttctgcatgtctttttaacttgttagcttcagtctattttctttgtcctgggatactgactacttatcaggaatgactccatttccttgtgtatagagctgactcttagaagaagggggatagtgtgtgtgtgagagagcagaatcaaagggaagcatgaaggccacagggaaaataagcttggcaatctccctaggactcagggaaatagagctctctgtccacagtgagaatcactgttaggcttgctcctcagtgattgagtgtcagaagtaagctcaggctattgtgaaaaagtgtggggagtggctgtcagattgtctcaaagctggagggagagctagccagctaagagttaggactcttaggtttagttctctcatatggccccataccaatatgtgcctttgacaagtgtctttgcaactttgctt

SEQ ID NO: 131341 - DNA, 3525 bp, Homo sapiens
  Payload ID: 5633
  Gene Symbol: EIF4E2
  Gene Name: eukaryotic translation initiation factor 4E family member 2
  ENST ID: ENST00000409514
  CDS Start-End: 43-753
gaagtcactccctgaggcagtggcgacagcggcggcgagaggatgaacaacaagttcgacgctttgaaagatgatgacagtggggaccatgatcagaatgaagaaaacagcacacagaaagatggtgagaaggaaaaaacggaacgagacaagaatcagagcagtagcaagagaaaggctgttgtccctggaccggcagagcatcccctgcagtacaactacactttttggtactccaggagaacccccggccgtcccacgagctcacagagctatgaacagaatatcaaacagattggcacctttgcctctgtggagcagttctggaggttttatagccacatggtacgtcctggggacctgacaggccacagtgacttccatctcttcaaagaaggaattaaacccatgtgggaggatgatgcaaataaaaatggtggcaagtggattattcggctgcggaagggcttggcctcccgttgctgggagaatctcattttggccatgctgggggaacagttcatggttggggaggagatctgtggggctgtggtgtctgtccgctttcaggaagacattatttcaatatggaataagactgccagtgaccaagcaaccacagcccgaatccgggacacacttcggcgagtgcttaacctacctcccaacaccattatggaatacaaaactcacaccgacagcatcaaggcctgggaggagtttcatggcctggtgaacagcagcggccgctgatcggacgctccccctctgtctctcacactcaggggacaattcaagctttcgaaatacaaaaatcacattgtgagagtacacaagctggcaataatccttttctgtatgtgtgtgtttgtccgaaatggatgggaggcctccagccagtccttccattgctcactgaagggacgtccctgagccgtgcgctctccttttgcactcattcctggaggacggattccgctagacaccctccagcatcgctgactttataaagcggaaaaacggaaaacgtgactttgtaatagacaaacattgttttttaatggggttccatgggggggcgttcagcctttctgtttgctgtgtgctgtccagatgcctcttgggcgtcctgttgttctcttcccgtgttgtacgaagggtaccgtggccacgtgtacatgccagagctgttgatgagagttaccagtattatgaatgtctgtgcatccaggaaaagtgttctgttggagagtcccaaaatagctgtaaatgctctcttctagctctgccattaaattattgggacattttgtttctttctctcccctcctccaagcccaccactttctgaagctgtgttactgatgtgatgactgtccaggattttgtatcatcccctgccttatgccctccggtctcctctcctgtgggactctctccttcttaggcacagctgcacttagaattgtaatccagtggctctcactggtttcactgaggcagcttagagggaatgccttagtaaactgaactggagcagaatctagtttgattaggagctagattataatctaggttccaagtacagaatttggagctaaggactgtgactgaaatcattttcccatatgagcagaccctgtgtgtcaggcctgtttcccatatgagcagagcctgtgtgcaagtctgtttctggcatgtccctcattgaggaagggaagcaaaagctggttattgccaggcctattaacacttaatatgcaaattctatcatcctgaaactggggcatctgaggaaaaggtgaccttgctggatggctttatttgcatggctctgcctgtctgcagtggttgagtcctcatcacctggtatgtgtatgagcaaatgtgtgctgattgtgatgcccaggcagaaacctcttgaagactgctgcaggcatgctttaaaaatgaccagtcactcatcagagaagctgggtgatctgactccagaaggactgaagtcagagaagtcacaagagcacctaggattcaaataaatagcgtcagagtcctatagcaacctccaagtagcaccgtcttacttggctcttgtgagcaaagactgcagtaccttaaattaaggcctctctttaaaacatatgtggaagactaggggatccttggccacctggtctcagagaaatcatatgagagtaacaggcatttccttattgtatttgtactacactcttcctacttttccattcctgaacaccctctaattaccactgttttggggatgctttttttctgaaagaacggggagtacaggggccaaaagggaggtgcttctattacagggcaagttagatcagataagaagatctagcagtgatttaaactccaggaatatgaagagtgcattctggtgtccagacagttgtgaagggctcggcaaatataagagcaccattggctacatggagagcaaaggctgtctttgaagaccccagggaggtcttcacttttgcctaaattcagatttgccgtgaaaattccaaagagagcagatatttggatttgccctcctttgggcatctacctgactgttgtgtgtgtgggaaagtcagtgtgtatgtgtagagtgtgcttaggagtgagtgagtggtcaggcctcctggctaggtgtgttgtccatagttttgttgttgttgttgttgttgttcagagttttgaatcttacgttttctagagctgctcatgttttcccttcctttttgtcgttgtagtatttgacagttgtcttttccatcaaaaacatactggccctaggctggttagagcaaggggttatgcctgttaggcagcatcttacgcccagtgttctcccagatattctgcctaacaggtttaagtaggagattaaatagtcagtttatctaaaccctctatttttccaaactagcttgagaggtcttttcatctatttttactccatgggcctctgatatgctgagatgtggcacggttatgattatggtatcaccgttacagaggcaaagggataaaggtctaccagggccaacgtaaccagaatgtgaggagagtgaagagtcggtctccgctttgcacagtaccagaatgtgaggttgccactggagagtggagagtcggtctccactttgcacagttggagctgttctcctctaactcctttgctgggttttctgtttgaaattggcccctactcctctccagccctttactgggttttctgtttgaaattggcccctactcctctccagtgtctgctttttgaatccttctgttcgtgtgtgtgtgtgtgtgtgtgtgtgttccctatgatactggcagtggcaataattttccacccagagagaagcttgtggtccacaatgctcgaagaatgaatttccaagtatttgccagtggaaacggagcagaggctatgacaagagtgatttagtgttgcactttcagagcaattatctactgcagtaataaattgaaaatatcagcaag

SEQ ID NO: 131342 - DNA, 571 bp, Homo sapiens
  Payload ID: 5633
  Gene Symbol: EIF4E2
  Gene Name: eukaryotic translation initiation factor 4E family member 2
  ENST ID: ENST00000444113
  CDS Start-End: 1-366
agggtaggctgctctgctcctcggaaaggaaagtccagtgggacctcgctgctctgctcccagggcctgggaggagtttcatggcctggtgaacagcagcggccgctgatcggacgctccccctctgtctctcacactcaggggacaattcaagctttcgaaatacaaaaatcacattgtgagagtacacaagctggcaataatccttttctgtatgtgtgtgtttgtccgaaatggatgggaggcctccagccagtccttccattgctcactgaagggacgtccctgagccgtgcgctctccttttgcactcattcctggaggacggattccgctagacaccctccagcatcgctgactttataaagcggaaaaacggaaaacgtgactttgtaatagacaaacattgttttttaatggggttccatgggggggcgttcagcctttctgtttgctgtgtgctgtccagatgcctcttgggcgtcctgttgttctcttcccgtgttgtacgaagggtaccgtggccacgtgtacatgccagagctgttgatgagagttaccagtattatga

SEQ ID NO: 131343 - DNA, 1048 bp, Homo sapiens
  Payload ID: 5633
  Gene Symbol: EIF4E2
  Gene Name: eukaryotic translation initiation factor 4E family member 2
  ENST ID: ENST00000454501
  CDS Start-End: 408-1048
gctggggctggggcggcgcaaaccctgcggcaccggcttccctgctgggatccggctgcggccggacctggcctggactggcggggaggagggggctggggagcaatggataccggagtcccggagaccccagggccgtccgaaccgagggcgaagagctgggcccgggggaggggtggctgtgccgcccggtagggggagattttcggacgccccgccctggtggatgcggattgcctgcgacgtggaggggtggggacctcggcggtttgggtgtttccgcagtctggcagcgctgcctctgaatccagctttccccacacactccctctcccctctgagcctcagttttctcatctgcagagtggggacggtaacaccctttgtcgtagagtttggaggatgcaatgagtttgaaagatgatgacagtggggaccatgatcagaatgaagaaaacagcacacagaaagatggtgagaaggaaaaaacggaacgagacaagaatcagagcagtagcaagagaaaggctgttgtccctggaccggcagagcatcccctgcagtacaactacactttttggtactccaggagaacccccggccgtcccacgagctcacagagctatgaacagaatatcaaacagattggcacctttgcctctgtggagcagttctggaggttttatagccacatggtacgtcctggggacctgacaggccacagtgacttccatctcttcaaagaaggaattaaacccatgtgggaggatgatgcaaataaaaatggtggcaagtggattattcggctgcggaagggcttggcctcccgttgctgggagaatctcattttggccatgctgggggaacagttcatggttggggaggagatctgtggggctgtggtgtctgtccgctttcaggaagacattatttcaatatggaataagactgccagtgaccaagcaaccacagcccgaatccgggacacacttcggcgagtgcttaacctacctcccaacaccattatggaatacaaaactcacaccga

SEQ ID NO: 131344 - DNA, 2764 bp, Homo sapiens
  Payload ID: 5634
  Gene Symbol: EIF4E3
  Gene Name: eukaryotic translation initiation factor 4E family member 3
  Uniprot ID: Q8N5X7
  ENST ID: ENST00000295612
  CDS Start-End: 453-809
gcgcgcagcgcggccgccgccgccagccccgccgaggcatcccgcaccgcctgggcccggctgggctgggggcgcctccgcagcagccgcggggtcgggaggcggccgggagggaggcagggcccaggacgcaaggtggcgacaagtcgcgtttggccccaggggctgtggggtcaccttctcttcctctcttctgccaccccaagtcgtctgtgttgcgtgtcatgcagtgggacagcacgttggtccggacctcaagctacccacgttctagtcccgcctctgtcatttcctagagctgtggcctcggatccctccctggtgccacagcagctgagtgcgcatcaaatctgaagaaaatctacacagtacagacagtacagatattttggagtgtatacaataatatccctcctgtgactagcctgcctttgagatgtagttatcatttaatgagaggagagaggcgaccactttgggaagaggagagtaatgcaaagggtggcgtatggaagatgaaagtccccaaggacagcacgtccacagtttggaaagagttgctgttagcaaccatcggggaacagttcacagactgtgccgcagcagatgatgaagtaataggagttagtgtcagtgttcgggaccgagaagacgtcgtccaagtctggaatgtaaatgcctctttagtgggtgaagcgactgttttagaaaagatctatgaacttctgccccacataacttttaaagcagtattttataaaccccatgaagagcatcatgcttttgaaggtggacgtggaaaacactaattgcactctgtaaagaattctttgtcctttgctgattggttttggaaacggtcttaacaggagggagagtgaagagaagacttgccgaagccgatgctggtcaatttagagtgggtttctgtccttgcagatgggcaattaggactcaaagtggcaggtggggtggggggagattgtgtgggtttctaccgtcacattacttgctttttaaaaaaaacacacacaaaaaactttttttttggctttctaaattctctgttcttttcactctgatttttttttttttttgccgtttaaaattccttattcagcctaattattgttttctacactcccctttcattgaggcacaagaaatgggtttccctttaagtagctctgctgtacctagttaatgagaatatgcataatcgtgacaatactgcttttgaataccacactgtacaaggaggaacactagcttggagaaatctgtcttctgattatttgttgtgacacattcctatgtactgtgagctgggcattgtttttttctgtcccagggaaaagaaaaaccatacttaatgtgattttgcactgacagcacacaaatctttaattttcctttttaaaacatttttttttagtgataaaaggaaaataatagttggattgcataacatgaaaactataatcacaattcagtatcaggatataaatcaagctctaagtctttggaccctctgtggaaacatttctaacccgaattttaatttggccttttcaaccaaaggcttagagtggtagcaagggatttcttccaataggaaacctgatgtttctgatttaaagagaaggtgatattttaattgtttgaattaagctccttgcaaagttcgggtgtgtttacccacttagggctttctttcccagtcaacgctaacacattttgttaaatgatccctttccctgctcacattgtgtgtcatttctcatcatcagtagtcctccagcctgggcagctgtccccaccctttttcatgtaggtgcaggaagttaaatctcatttccaggatgcatgtgaacatttacaaagttgaactttgagtgcattctgctcatatgaattattgggattgttgatatatattgtattatgctaccaaagaaatattggttttattagaaggaaatggtcatcctctggaccatggagactagctcagaatacgctgatttccctctcctgactttgccaagcctttggctgcttttgcctgataaagggcagggccatctgaagacacttcccccagtcggctttggagtcacgggagctagtgcctgctcacacatttttcaaaagggcagtgcactcagaacttcactgtacctgggatttttaattcctcttgcagtgttgaccagcagagagacttgaggctactttaagcctccactatgtgtttgtagataaaattctccattcaaacattttaaaggactttgaacattatctgcttatggaagttgtgcccttcacttggttagtaaccacctcagccataatacttaccatcataggtttcttaaaatgctttttttttttccctaaacttgagtttccttagtgatttcaaaatgaagtataagaatatcagatccagttagcaaaagcctaggacttgtttctccaaacattgtactaacattcaacttgttttaaaattatgactcaagaattttaaaaaattattctggacatgaattaaaacttttttataatataagtatttttctgattgaaaaaaggatataattgacttcactctaattgtcatgtatatttccataagtaaatggattttgaagtatttttattttttgaactttatttaaagcatttgtgatgacatgttcaacttttgcatgtatgtagcctttgaagtaaaaataaataggaatgttaggctcac

SEQ ID NO: 131345 - DNA, 6083 bp, Homo sapiens
  Payload ID: 5634
  Gene Symbol: EIF4E3
  Gene Name: eukaryotic translation initiation factor 4E family member 3
  Uniprot ID: Q8N5X7
  ENST ID: ENST00000389826
  CDS Start-End: 336-692
gctgatgggattaccagctcctgctaattgcatatgagtgctcaggggctgtggggtcaccttctcttcctctcttctgccaccccaagtcgtctgtgttgcgtgtcatgcagtgggacagcacgttggtccggacctcaagctacccacgttctagtcccgcctctgtcatttcctagagctgtggcctcggatccctccctggtgccacagcagctgagtgcgcatcaaatctgaagaaaatctacacagtacagacagtacagatattttggagtgtatacaataatatccctcctgtgactagcctgcctttgagatgtagttatcatttaatgagaggagagaggcgaccactttgggaagaggagagtaatgcaaagggtggcgtatggaagatgaaagtccccaaggacagcacgtccacagtttggaaagagttgctgttagcaaccatcggggaacagttcacagactgtgccgcagcagatgatgaagtaataggagttagtgtcagtgttcgggaccgagaagacgtcgtccaagtctggaatgtaaatgcctctttagtgggtgaagcgactgttttagaaaagatctatgaacttctgccccacataacttttaaagcagtattttataaaccccatgaagagcatcatgcttttgaaggtggacgtggaaaacactaattgcactctgtaaagaattctttgtcctttgctgattggttttggaaacggtcttaacaggagggagagtgaagagaagacttgccgaagccgatgctggtcaatttagagtgggtttctgtccttgcagatgggcaattaggactcaaagtggcaggtggggtggggggagattgtgtgggtttctaccgtcacattacttgctttttaaaaaaaacacacacaaaaaactttttttttggctttctaaattctctgttcttttcactctgatttttttttttttttgccgtttaaaattccttattcagcctaattattgttttctacactcccctttcattgaggcacaagaaatgggtttccctttaagtagctctgctgtacctagttaatgagaatatgcataatcgtgacaatactgcttttgaataccacactgtacaaggaggaacactagcttggagaaatctgtcttctgattatttgttgtgacacattcctatgtactgtgagctgggcattgtttttttctgtcccagggaaaagaaaaaccatacttaatgtgattttgcactgacagcacacaaatctttaattttcctttttaaaacatttttttttagtgataaaaggaaaataatagttggattgcataacatgaaaactataatcacaattcagtatcaggatataaatcaagctctaagtctttggaccctctgtggaaacatttctaacccgaattttaatttggccttttcaaccaaaggcttagagtggtagcaagggatttcttccaataggaaacctgatgtttctgatttaaagagaaggtgatattttaattgtttgaattaagctccttgcaaagttcgggtgtgtttacccacttagggctttctttcccagtcaacgctaacacattttgttaaatgatccctttccctgctcacattgtgtgtcatttctcatcatcagtagtcctccagcctgggcagctgtccccaccctttttcatgtaggtgcaggaagttaaatctcatttccaggatgcatgtgaacatttacaaagttgaactttgagtgcattctgctcatatgaattattgggattgttgatatatattgtattatgctaccaaagaaatattggttttattagaaggaaatggtcatcctctggaccatggagactagctcagaatacgctgatttccctctcctgactttgccaagcctttggctgcttttgcctgataaagggcagggccatctgaagacacttcccccagtcggctttggagtcacgggagctagtgcctgctcacacatttttcaaaagggcagtgcactcagaacttcactgtacctgggatttttaattcctcttgcagtgttgaccagcagagagacttgaggctactttaagcctccactatgtgtttgtagataaaattctccattcaaacattttaaaggactttgaacattatctgcttatggaagttgtgcccttcacttggttagtaaccacctcagccataatacttaccatcataggtttcttaaaatgctttttttttttccctaaacttgagtttccttagtgatttcaaaatgaagtataagaatatcagatccagttagcaaaagcctaggacttgtttctccaaacattgtactaacattcaacttgttttaaaattatgactcaagaattttaaaaaattattctggacatgaattaaaacttttttataatataagtatttttctgattgaaaaaaggatataattgacttcactctaattgtcatgtatatttccataagtaaatggattttgaagtatttttattttttgaactttatttaaagcatttgtgatgacatgttcaacttttgcatgtatgtagcctttgaagtaaaaataaataggaatgttaggctcacgttaatatttctagtttctgtttatgatcatggaacatgactagcacacaaagtagatttttgccccagtgaacttctgcaactgtttctgaccctttagaaaataccaactgtgagaaggatttaatttgcctaatgttaaaaacctatcatctaaattactttcagagaggattttgtcagattttggtttggaaattgttttaattgaatatttaatcataatagactttgtatgaactaagctgatttaatcagtttaaaaacctctcattaccttcttagattaaagaagctaatactgttttgagatagaaggaaatattttgtggggcatgtgacttttgtgttaaggcagtttacccatcttggctgatgtggggaaagtgcaaacttccagtagaatcccggtcttttcatccaagtgcttgcaggggcagccttgtagtctgcaaagaaccatgcagaaaccaaagagcttgcttttttgtctttgtaattccttagggtctgtgatatatgccaggaaatctgattgaaactaatatgctttttattctcccattattccctaaattgttatatcacaggcacttgcctacattgggaaagtaaggacaaataatacccatttaaagtaacttgcctatattttgactgtctttcgtaagcacttgctgaactgctgacttaactcagttttaagatttcctctttccccccaacttttccacatttcttaaatgagggtgtaatttactgcaaacatgtacatttaatataatattgctgttagattcgtggtacactttatgaagcaaaaacatgaaaaggaaaccacaactctaataaactttaaattaaagattaagatgactctttctcacccctcttcttgagtttagcccatgtctacaccatgcacacagtcacaagactttatagcttagaaactttaggtataattgggtcctatagacataatatacaatccaccaactgagccttggccgaacttgtcccttgttaaagacgtagggctagccagccacagagctgggtattgaagtcggcaagttgtatcccggtgcaggcgtccttaaatggagagtactcagaatctgccagccttaacctgcccactagccaccctaatcaagcattaaatatctgatccaatctggccactggtgtaactccgtaatcagacatcctgtttgtaaacagctcctccttctctccctctccctctcagagacagaagtggtgctggggtttggagtttgaaaataaccttcctatgacaggaagtgggcttttgctattagttgcccaactcttagaggatcccagcttgtgtctttagacaaaactgacagcctttggaacgatcgcatggtggcgctgccttccagccaacagttctggctcagcagcagaatttatccagctatgtttgtagaatttttttaagatcctactgcattttgctcttaagcttttataaaaatttgacgagaaaatgtaaaaatgatacttggcaataagacatttagttttcatgcacctaataaaaatgtgtcaaagctagatcgctccagatgtgcttaaaatatctcaaatcctaggctctcattggccttataagtgattgggaagaaaaagaataaaataaactcacatataggagatatggaaaatatttcatcaaatattatgcccaaagagagaaaattaggagttgattttttttagcactctgaatatggaacttccttttaaaaatgtaattctacccttcacctttcctacattgtatgtttctgtgagattttactcattacaagtgaaagtagaggactgcctgtgaattgttcacttctgaaaagaatatattgagatcagttaaaattactcaagagtttggtgactcaggattgtaaaaagcctggatctcaacagctgggaggagtcagagggtgaagtgggaaaaaatagggactgagaggcaacgaaaagtccctttgaacctgtggtcatttatagcaattagagtgggttgcccctctacttctcccaagaagaaatcccaaatagattcctttcatgtcagattatactgttctgattttattttctattatttttacatatacatccaaatctaagaatacttattcagattggcccactcaggccaaaagtcactgtcttgtgttctagaaattctttcatgttgctgacataaatccatttttaaaagaacattcagggactcttagaattttagagtggaagggacctttgagatcatctaccagtgcttctcaccccttagcatgcagcaaaatcactcagatacttacttattattcacatttcttgaccccagcactagaaatctgggaggatatctgcatttttaacaagtgccctagtgattctaatgctgatggtgctcagatcgctcttggagaacccctgattttatccaactcccacatatgacaaatgaggaaagcctcccaaccctaagctctgtcaggtgacctgattccaatgtatgataccaacaatcttatgaaggctggagaaaaccattaatactgagacttgagtagatgatgctcgtgaataagaactttatggctgggaccacagcagtcatgggagcccatccctggaagtccataatataaagcctttaatacagagtggtggtttttctcttttctaaataccatttcagtctgttaagagaaaagaaattagtgttcagaaaagtagttactccatatgtgcagtaactacttttctataatgtcttatggcatctggggttcagcatcattgaacaagattaaatgaacgttatagagctataaaattgcatgtaaaataacacaaaactgttcaaatgactatcaaagtagcctgggaatgaatttccactaaaattaattgtcactttcaaaacgtagcttagcaaagctgttactaaactggagagatcctttaatacatagaaatgtcaaaaaaatcaaataagtattccctaaacgatgtgagtgataagcaaaagtcattgcaaagtcagtatttttttgttcatcattgctactgaaattcagagttccattgtatatgtgtgtcttgagtgtaccttattagaatatccaatacaatagcttttggatattctatgcttttgtgtccttcagaaatcatgagattgaaggaatctgtgttaaatgtttttgttttggttgctgcctgaaaaaagttaccaactcatttagtgaaatgcaagatttctttatgaaaatttcaatttctaatatcgaagtcagataatttttcttgaacttttattttggaacagatgtttatttcggatctattaaagtgtcaactttgcattatagaactgaacatg

SEQ ID NO: 131346 - DNA, 9949 bp, Homo sapiens
  Payload ID: 5634
  Gene Symbol: EIF4E3
  Gene Name: eukaryotic translation initiation factor 4E family member 3
  Uniprot ID: Q8N5X7
  ENST ID: ENST00000425534
  CDS Start-End: 9-683
cggagaaaatggcgctgcccccggccgccgcgccccccgccggggcccgggagccgccggggtcccgcgccgccgccgctgccgccgcccccgagccgccgctcggcctgcagcagctgtcggcgctgcagcctgagccgggcggggtcccgctgcactcgtcctggaccttctggctcgacagatccctccctggtgccacagcagctgagtgcgcatcaaatctgaagaaaatctacacagtacagacagtacagatattttggagtgtatacaataatatccctcctgtgactagcctgcctttgagatgtagttatcatttaatgagaggagagaggcgaccactttgggaagaggagagtaatgcaaagggtggcgtatggaagatgaaagtccccaaggacagcacgtccacagtttggaaagagttgctgttagcaaccatcggggaacagttcacagactgtgccgcagcagatgatgaagtaataggagttagtgtcagtgttcgggaccgagaagacgtcgtccaagtctggaatgtaaatgcctctttagtgggtgaagcgactgttttagaaaagatctatgaacttctgccccacataacttttaaagcagtattttataaaccccatgaagagcatcatgcttttgaaggtggacgtggaaaacactaattgcactctgtaaagaattctttgtcctttgctgattggttttggaaacggtcttaacaggagggagagtgaagagaagacttgccgaagccgatgctggtcaatttagagtgggtttctgtccttgcagatgggcaattaggactcaaagtggcaggtggggtggggggagattgtgtgggtttctaccgtcacattacttgctttttaaaaaaaacacacacaaaaaactttttttttggctttctaaattctctgttcttttcactctgatttttttttttttttgccgtttaaaattccttattcagcctaattattgttttctacactcccctttcattgaggcacaagaaatgggtttccctttaagtagctctgctgtacctagttaatgagaatatgcataatcgtgacaatactgcttttgaataccacactgtacaaggaggaacactagcttggagaaatctgtcttctgattatttgttgtgacacattcctatgtactgtgagctgggcattgtttttttctgtcccagggaaaagaaaaaccatacttaatgtgattttgcactgacagcacacaaatctttaattttcctttttaaaacatttttttttagtgataaaaggaaaataatagttggattgcataacatgaaaactataatcacaattcagtatcaggatataaatcaagctctaagtctttggaccctctgtggaaacatttctaacccgaattttaatttggccttttcaaccaaaggcttagagtggtagcaagggatttcttccaataggaaacctgatgtttctgatttaaagagaaggtgatattttaattgtttgaattaagctccttgcaaagttcgggtgtgtttacccacttagggctttctttcccagtcaacgctaacacattttgttaaatgatccctttccctgctcacattgtgtgtcatttctcatcatcagtagtcctccagcctgggcagctgtccccaccctttttcatgtaggtgcaggaagttaaatctcatttccaggatgcatgtgaacatttacaaagttgaactttgagtgcattctgctcatatgaattattgggattgttgatatatattgtattatgctaccaaagaaatattggttttattagaaggaaatggtcatcctctggaccatggagactagctcagaatacgctgatttccctctcctgactttgccaagcctttggctgcttttgcctgataaagggcagggccatctgaagacacttcccccagtcggctttggagtcacgggagctagtgcctgctcacacatttttcaaaagggcagtgcactcagaacttcactgtacctgggatttttaattcctcttgcagtgttgaccagcagagagacttgaggctactttaagcctccactatgtgtttgtagataaaattctccattcaaacattttaaaggactttgaacattatctgcttatggaagttgtgcccttcacttggttagtaaccacctcagccataatacttaccatcataggtttcttaaaatgctttttttttttccctaaacttgagtttccttagtgatttcaaaatgaagtataagaatatcagatccagttagcaaaagcctaggacttgtttctccaaacattgtactaacattcaacttgttttaaaattatgactcaagaattttaaaaaattattctggacatgaattaaaacttttttataatataagtatttttctgattgaaaaaaggatataattgacttcactctaattgtcatgtatatttccataagtaaatggattttgaagtatttttattttttgaactttatttaaagcatttgtgatgacatgttcaacttttgcatgtatgtagcctttgaagtaaaaataaataggaatgttaggctcacgttaatatttctagtttctgtttatgatcatggaacatgactagcacacaaagtagatttttgccccagtgaacttctgcaactgtttctgaccctttagaaaataccaactgtgagaaggatttaatttgcctaatgttaaaaacctatcatctaaattactttcagagaggattttgtcagattttggtttggaaattgttttaattgaatatttaatcataatagactttgtatgaactaagctgatttaatcagtttaaaaacctctcattaccttcttagattaaagaagctaatactgttttgagatagaaggaaatattttgtggggcatgtgacttttgtgttaaggcagtttacccatcttggctgatgtggggaaagtgcaaacttccagtagaatcccggtcttttcatccaagtgcttgcaggggcagccttgtagtctgcaaagaaccatgcagaaaccaaagagcttgcttttttgtctttgtaattccttagggtctgtgatatatgccaggaaatctgattgaaactaatatgctttttattctcccattattccctaaattgttatatcacaggcacttgcctacattgggaaagtaaggacaaataatacccatttaaagtaacttgcctatattttgactgtctttcgtaagcacttgctgaactgctgacttaactcagttttaagatttcctctttccccccaacttttccacatttcttaaatgagggtgtaatttactgcaaacatgtacatttaatataatattgctgttagattcgtggtacactttatgaagcaaaaacatgaaaaggaaaccacaactctaataaactttaaattaaagattaagatgactctttctcacccctcttcttgagtttagcccatgtctacaccatgcacacagtcacaagactttatagcttagaaactttaggtataattgggtcctatagacataatatacaatccaccaactgagccttggccgaacttgtcccttgttaaagacgtagggctagccagccacagagctgggtattgaagtcggcaagttgtatcccggtgcaggcgtccttaaatggagagtactcagaatctgccagccttaacctgcccactagccaccctaatcaagcattaaatatctgatccaatctggccactggtgtaactccgtaatcagacatcctgtttgtaaacagctcctccttctctccctctccctctcagagacagaagtggtgctggggtttggagtttgaaaataaccttcctatgacaggaagtgggcttttgctattagttgcccaactcttagaggatcccagcttgtgtctttagacaaaactgacagcctttggaacgatcgcatggtggcgctgccttccagccaacagttctggctcagcagcagaatttatccagctatgtttgtagaatttttttaagatcctactgcattttgctcttaagcttttataaaaatttgacgagaaaatgtaaaaatgatacttggcaataagacatttagttttcatgcacctaataaaaatgtgtcaaagctagatcgctccagatgtgcttaaaatatctcaaatcctaggctctcattggccttataagtgattgggaagaaaaagaataaaataaactcacatataggagatatggaaaatatttcatcaaatattatgcccaaagagagaaaattaggagttgattttttttagcactctgaatatggaacttccttttaaaaatgtaattctacccttcacctttcctacattgtatgtttctgtgagattttactcattacaagtgaaagtagaggactgcctgtgaattgttcacttctgaaaagaatatattgagatcagttaaaattactcaagagtttggtgactcaggattgtaaaaagcctggatctcaacagctgggaggagtcagagggtgaagtgggaaaaaatagggactgagaggcaacgaaaagtccctttgaacctgtggtcatttatagcaattagagtgggttgcccctctacttctcccaagaagaaatcccaaatagattcctttcatgtcagattatactgttctgattttattttctattatttttacatatacatccaaatctaagaatacttattcagattggcccactcaggccaaaagtcactgtcttgtgttctagaaattctttcatgttgctgacataaatccatttttaaaagaacattcagggactcttagaattttagagtggaagggacctttgagatcatctaccagtgcttctcaccccttagcatgcagcaaaatcactcagatacttacttattattcacatttcttgaccccagcactagaaatctgggaggatatctgcatttttaacaagtgccctagtgattctaatgctgatggtgctcagatcgctcttggagaacccctgattttatccaactcccacatatgacaaatgaggaaagcctcccaaccctaagctctgtcaggtgacctgattccaatgtatgataccaacaatcttatgaaggctggagaaaaccattaatactgagacttgagtagatgatgctcgtgaataagaactttatggctgggaccacagcagtcatgggagcccatccctggaagtccataatataaagcctttaatacagagtggtggtttttctcttttctaaataccatttcagtctgttaagagaaaagaaattagtgttcagaaaagtagttactccatatgtgcagtaactacttttctataatgtcttatggcatctggggttcagcatcattgaacaagattaaatgaacgttatagagctataaaattgcatgtaaaataacacaaaactgttcaaatgactatcaaagtagcctgggaatgaatttccactaaaattaattgtcactttcaaaacgtagcttagcaaagctgttactaaactggagagatcctttaatacatagaaatgtcaaaaaaatcaaataagtattccctaaacgatgtgagtgataagcaaaagtcattgcaaagtcagtatttttttgttcatcattgctactgaaattcagagttccattgtatatgtgtgtcttgagtgtaccttattagaatatccaatacaatagcttttggatattctatgcttttgtgtccttcagaaatcatgagattgaaggaatctgtgttaaatgtttttgttttggttgctgcctgaaaaaagttaccaactcatttagtgaaatgcaagatttctttatgaaaatttcaatttctaatatcgaagtcagataatttttcttgaacttttattttggaacagatgtttatttcggatctattaaagtgtcaactttgcattatagaactgaacatgaagtaaattgagtgtttctgagttttctatagaaaatttatgctacctctcatcttttcacatacaaataagcaacttttaatgaaggcttagggtgaaaattttaattttagcactttacattacatgatgaatggtgaatattaaaggactttgaacattttaataaacttacagtgtttctgttttcaaatagaggtattgatgctgtggatatacattaaattctccccaaagttctcagactttaatcagataatgtggcttacaaccattgtttttgtttttaagttttaacactgtcttttcagtattcatttaaaacaagtcaccatgactttgaatatattctcatggagaatttatttcaatgattatataaaagaatttcaaaatttaaactagtgagcatactttagcttgagacagctaacattatttgtcccaaatttaaaatcttacattgaaagttattaattctttagaatagtcttacctgtgtaagttgaaccaggtttgtttgattatgttttggatctgcttgtgcccccacccccctattttataccatctgtgccctgtgcagttggggaccctttcacatctggctacaagctggtgtaatgcccttccttttgatctggcttcatctagtgatttgctcagtatttttaaggtcagactgaaaacttttctgttctagttatttttgattttatattgtgtgttgtgtttgatgttcagatacatgtgaaagttgcttctataagtcagtattttttattccagccttttgcagcaataaggtaagactagactatacttttcttacttgaaaaggtagtgatttatgtgtttagtgcaaatgtttagactgttttgcaattttctaatttgggactatattgctatgaatttgtgcttcttcatttttcagggtagtagttcacagggtttgtttaagtgttagtttgtagaactttattttgagatcttttgtaatctgttgctactaattctcattctgtattgaggttcttatagtatagaaatgtcattttcatcctccagtttaaaaatttcatgcagtttaatcaaccacatcacttaatcattattagatttccagtgtgtgtgtggtgattagaataaccttgtttattacaacacatattaaaagtttctgtccaacacctctaatatgtgtgacgctgctagcatggagtctgacgcttagtaggttatctggtattctgatggggagtaactgttgttatttttacacttccctgttgaacacatttgataatagggctcatctgggtctcttagaaaacgtatcttgcttattttaattctttttctttaccctctattaagaatggttccgttttagaataagtcaattactctcgttgctcttttgtgctgcaatttgctggtgagattcagttgtcccctgtttcggcaagtaaagtgaatttactcctcctttctggctgtctaatatattcctttaaaaacaaacaaaacgtaccaacaaactcttcttccattcatctgcagactttcctatctctccctgcagaaacaagcaattcaggatcttatgtgtgatgcctaattaattttaacacagcgaatttaatgaaatcgttgaagagcagggcataacactaggaaggctttaaaatttcataatgtttccctctcatatttgcatctgattactgccaccatgcattctgtgtgtactttatcatctagtcgttattgatgcactttttggaatgtgttctcggttgttctattagcataggttcctctgccttgtcacctaacgtacagttttcttggaagccaagaccatgcatgccttttcttcctcagtgatcctttcgctgcagtaactgctattaaagaacttttaactgcttttcgttaatgaatgcataaaaaaatctctggaatcctacaagacgatggttcttttgttacatgaagaaaagaaaaaacagtagcatttgcaagggccagcaagttaaaatatatgtcattaaaatatgtttctatttcccatcatctggctaggctgtggtgctgactagcttatttcttgccagagaaaataagtttaaatcataagcatatttaactagcaagcataaatcataaattctttataatcgtaagcatgttgaactctggtaccatttgtacagatggcagggctaaatgtgtgtgctcctctaagcattaaagatgtggacaagctcttactccccaatttcctctttaactcaggaaacttaaatcatttgttttttgcacatataggattatataaagtatggacctagagaaaggtttcagatcttaggaaacatttgagttttgtgattcatgcttactggaaaagaatgatggaagtgaaggttaaacactaaagccgtgtcccctttttaaggcgaaaataattagtgtttcatgaagatagtcaagttataaaggacaagactgtttttcagaatttttttttttttttgaaaacaaacatcttggaatccacattttaacagaggtccatcagctttcaaagagtgttccctagaagggtggttccacagaaacactttcagatatggcaaagttttcattgtaaaatacattttaagaagtatttttaaaagtgtaataaagcaataacacacagtgacatgcatcacatggccaaattttaacattttggaagccagtaagtataacttatgtactcactgattttgttttatgaaatgaaacaaaggttttataaaacctttttattgtaaaataaaggtacagaaaaccacacaaaacaaatgtgtaacttactgaattgttacaaggagaacactctataacagcaggccaagaaatagaactttgccggtcaccccaggagccctttcttgtgtccccgccctctccactaaaataaccattatcctgacctacaggagacacttgcatttctctctggttttatcacaggtgataaacatcattttacatatagaatcttctctaactatgaacgttggttcagaaaacttatttgtaagtcttttaaatgatgagtgcaaaatgacacactataagcaattgatacccccgtaagttagtaactgggcagaatttaatgtgcttttgctgtagtgtgtggctctgtccatagctataatatccacaataacaatagcatgtatggagttccatgccatctaagcatagaggttagttctccccaacactctacgaggtagatgctgtcattgttgtccccagtttgtgtatgtggaaacatatgcatgaggttcagagaggtgaaataacttgccgaaggtcacaccagtagtcagttgcagaaccaagatacatctaaggtactgtggctccagcctgttcttcagtgaggctgccttggtggaagttgaagatatgatgtgcaagaattttgagattccttatgagagtttgtttacaaagaaaaggttttacagctttaagaaaaagatggaaaaatcactggcctagttcaaacttttcattttacagatgaagaaatgacccagaaagtataaagaattcgttcaaggtcacacaagtagttggtggcaaagttgcagctatatcccaaatctcctggctgttaaaatcaatgatcttttcttcattccatatattatgtggaaaaaatgcatgttttctaacctgcttctttgcgacaactccatgtaagcagatttgtcttaaaaccagtttatagctaggacacaccatctacttgcttattttctcaaggttttaactgggaattaaaaaatttatatctg

SEQ ID NO: 131347 - DNA, 6209 bp, Homo sapiens
  Payload ID: 5634
  Gene Symbol: EIF4E3
  Gene Name: eukaryotic translation initiation factor 4E family member 3
  Uniprot ID: Q8N5X7
  ENST ID: ENST00000448225
  CDS Start-End: 460-816
ggaaggcggcgtggaagcagaagagcgcggccaggaaggcgagcagcttgcagcccagcgcgcccggcggcgcccccgccgcggccgccgcacgccgcgccgccagcatgacggccgggaggcaggcgagcgcgcgcagcccgtcggccaggcacaggtcgagcagcaggggctgtggggtcaccttctcttcctctcttctgccaccccaagtcgtctgtgttgcgtgtcatgcagtgggacagcacgttggtccggacctcaagctacccacgttctagtcccgcctctgtcatttcctagagctgtggcctcggatccctccctggtgccacagcagctgagtgcgcatcaaatctgaagaaaatctacacagtacagacagtacagatattttggagtgtatacaataatatccctcctgtgactagcctgcctttgagatgtagttatcatttaatgagaggagagaggcgaccactttgggaagaggagagtaatgcaaagggtggcgtatggaagatgaaagtccccaaggacagcacgtccacagtttggaaagagttgctgttagcaaccatcggggaacagttcacagactgtgccgcagcagatgatgaagtaataggagttagtgtcagtgttcgggaccgagaagacgtcgtccaagtctggaatgtaaatgcctctttagtgggtgaagcgactgttttagaaaagatctatgaacttctgccccacataacttttaaagcagtattttataaaccccatgaagagcatcatgcttttgaaggtggacgtggaaaacactaattgcactctgtaaagaattctttgtcctttgctgattggttttggaaacggtcttaacaggagggagagtgaagagaagacttgccgaagccgatgctggtcaatttagagtgggtttctgtccttgcagatgggcaattaggactcaaagtggcaggtggggtggggggagattgtgtgggtttctaccgtcacattacttgctttttaaaaaaaacacacacaaaaaactttttttttggctttctaaattctctgttcttttcactctgatttttttttttttttgccgtttaaaattccttattcagcctaattattgttttctacactcccctttcattgaggcacaagaaatgggtttccctttaagtagctctgctgtacctagttaatgagaatatgcataatcgtgacaatactgcttttgaataccacactgtacaaggaggaacactagcttggagaaatctgtcttctgattatttgttgtgacacattcctatgtactgtgagctgggcattgtttttttctgtcccagggaaaagaaaaaccatacttaatgtgattttgcactgacagcacacaaatctttaattttcctttttaaaacatttttttttagtgataaaaggaaaataatagttggattgcataacatgaaaactataatcacaattcagtatcaggatataaatcaagctctaagtctttggaccctctgtggaaacatttctaacccgaattttaatttggccttttcaaccaaaggcttagagtggtagcaagggatttcttccaataggaaacctgatgtttctgatttaaagagaaggtgatattttaattgtttgaattaagctccttgcaaagttcgggtgtgtttacccacttagggctttctttcccagtcaacgctaacacattttgttaaatgatccctttccctgctcacattgtgtgtcatttctcatcatcagtagtcctccagcctgggcagctgtccccaccctttttcatgtaggtgcaggaagttaaatctcatttccaggatgcatgtgaacatttacaaagttgaactttgagtgcattctgctcatatgaattattgggattgttgatatatattgtattatgctaccaaagaaatattggttttattagaaggaaatggtcatcctctggaccatggagactagctcagaatacgctgatttccctctcctgactttgccaagcctttggctgcttttgcctgataaagggcagggccatctgaagacacttcccccagtcggctttggagtcacgggagctagtgcctgctcacacatttttcaaaagggcagtgcactcagaacttcactgtacctgggatttttaattcctcttgcagtgttgaccagcagagagacttgaggctactttaagcctccactatgtgtttgtagataaaattctccattcaaacattttaaaggactttgaacattatctgcttatggaagttgtgcccttcacttggttagtaaccacctcagccataatacttaccatcataggtttcttaaaatgctttttttttttccctaaacttgagtttccttagtgatttcaaaatgaagtataagaatatcagatccagttagcaaaagcctaggacttgtttctccaaacattgtactaacattcaacttgttttaaaattatgactcaagaattttaaaaaattattctggacatgaattaaaacttttttataatataagtatttttctgattgaaaaaaggatataattgacttcactctaattgtcatgtatatttccataagtaaatggattttgaagtatttttattttttgaactttatttaaagcatttgtgatgacatgttcaacttttgcatgtatgtagcctttgaagtaaaaataaataggaatgttaggctcacgttaatatttctagtttctgtttatgatcatggaacatgactagcacacaaagtagatttttgccccagtgaacttctgcaactgtttctgaccctttagaaaataccaactgtgagaaggatttaatttgcctaatgttaaaaacctatcatctaaattactttcagagaggattttgtcagattttggtttggaaattgttttaattgaatatttaatcataatagactttgtatgaactaagctgatttaatcagtttaaaaacctctcattaccttcttagattaaagaagctaatactgttttgagatagaaggaaatattttgtggggcatgtgacttttgtgttaaggcagtttacccatcttggctgatgtggggaaagtgcaaacttccagtagaatcccggtcttttcatccaagtgcttgcaggggcagccttgtagtctgcaaagaaccatgcagaaaccaaagagcttgcttttttgtctttgtaattccttagggtctgtgatatatgccaggaaatctgattgaaactaatatgctttttattctcccattattccctaaattgttatatcacaggcacttgcctacattgggaaagtaaggacaaataatacccatttaaagtaacttgcctatattttgactgtctttcgtaagcacttgctgaactgctgacttaactcagttttaagatttcctctttccccccaacttttccacatttcttaaatgagggtgtaatttactgcaaacatgtacatttaatataatattgctgttagattcgtggtacactttatgaagcaaaaacatgaaaaggaaaccacaactctaataaactttaaattaaagattaagatgactctttctcacccctcttcttgagtttagcccatgtctacaccatgcacacagtcacaagactttatagcttagaaactttaggtataattgggtcctatagacataatatacaatccaccaactgagccttggccgaacttgtcccttgttaaagacgtagggctagccagccacagagctgggtattgaagtcggcaagttgtatcccggtgcaggcgtccttaaatggagagtactcagaatctgccagccttaacctgcccactagccaccctaatcaagcattaaatatctgatccaatctggccactggtgtaactccgtaatcagacatcctgtttgtaaacagctcctccttctctccctctccctctcagagacagaagtggtgctggggtttggagtttgaaaataaccttcctatgacaggaagtgggcttttgctattagttgcccaactcttagaggatcccagcttgtgtctttagacaaaactgacagcctttggaacgatcgcatggtggcgctgccttccagccaacagttctggctcagcagcagaatttatccagctatgtttgtagaatttttttaagatcctactgcattttgctcttaagcttttataaaaatttgacgagaaaatgtaaaaatgatacttggcaataagacatttagttttcatgcacctaataaaaatgtgtcaaagctagatcgctccagatgtgcttaaaatatctcaaatcctaggctctcattggccttataagtgattgggaagaaaaagaataaaataaactcacatataggagatatggaaaatatttcatcaaatattatgcccaaagagagaaaattaggagttgattttttttagcactctgaatatggaacttccttttaaaaatgtaattctacccttcacctttcctacattgtatgtttctgtgagattttactcattacaagtgaaagtagaggactgcctgtgaattgttcacttctgaaaagaatatattgagatcagttaaaattactcaagagtttggtgactcaggattgtaaaaagcctggatctcaacagctgggaggagtcagagggtgaagtgggaaaaaatagggactgagaggcaacgaaaagtccctttgaacctgtggtcatttatagcaattagagtgggttgcccctctacttctcccaagaagaaatcccaaatagattcctttcatgtcagattatactgttctgattttattttctattatttttacatatacatccaaatctaagaatacttattcagattggcccactcaggccaaaagtcactgtcttgtgttctagaaattctttcatgttgctgacataaatccatttttaaaagaacattcagggactcttagaattttagagtggaagggacctttgagatcatctaccagtgcttctcaccccttagcatgcagcaaaatcactcagatacttacttattattcacatttcttgaccccagcactagaaatctgggaggatatctgcatttttaacaagtgccctagtgattctaatgctgatggtgctcagatcgctcttggagaacccctgattttatccaactcccacatatgacaaatgaggaaagcctcccaaccctaagctctgtcaggtgacctgattccaatgtatgataccaacaatcttatgaaggctggagaaaaccattaatactgagacttgagtagatgatgctcgtgaataagaactttatggctgggaccacagcagtcatgggagcccatccctggaagtccataatataaagcctttaatacagagtggtggtttttctcttttctaaataccatttcagtctgttaagagaaaagaaattagtgttcagaaaagtagttactccatatgtgcagtaactacttttctataatgtcttatggcatctggggttcagcatcattgaacaagattaaatgaacgttatagagctataaaattgcatgtaaaataacacaaaactgttcaaatgactatcaaagtagcctgggaatgaatttccactaaaattaattgtcactttcaaaacgtagcttagcaaagctgttactaaactggagagatcctttaatacatagaaatgtcaaaaaaatcaaataagtattccctaaacgatgtgagtgataagcaaaagtcattgcaaagtcagtatttttttgttcatcattgctactgaaattcagagttccattgtatatgtgtgtcttgagtgtaccttattagaatatccaatacaatagcttttggatattctatgcttttgtgtccttcagaaatcatgagattgaaggaatctgtgttaaatgtttttgttttggttgctgcctgaaaaaagttaccaactcatttagtgaaatgcaagatttctttatgaaaatttcaatttctaatatcgaagtcagataatttttcttgaacttttattttggaacagatgtttatttcggatctattaaagtgtcaactttgcattatagaactgaacatgaa

SEQ ID NO: 131348 - DNA, 777 bp, Homo sapiens
  Payload ID: 5634
  Gene Symbol: EIF4E3
  Gene Name: eukaryotic translation initiation factor 4E family member 3
  Uniprot ID: Q8N5X7
  ENST ID: ENST00000421769
  CDS Start-End: 421-777
agttggcggccgcctggccggtggcgcccgggccgtggaaggtccagtcgtggctgacggcgggcaccaggcgcgcgggccgcatcttgcggcggtcgtggatgaagaagagcaggcggaggtagacgaggggctgtggggtcaccttctcttcctctcttctgccaccccaagtcgtctgtgttgcgtgtcatgcagtgggacagcacgttggtccggacctcaagctacccacgttctagtcccgcctctgtcatttcctagagctgtggcctcggatccctccctggtgccacagcagctgagtgcgcatcaaatctgaagaaaatctacacagtacagacagtacagatattttggagtgtatacaataatatccctcctgtgactagcctgcctttgagatgtagttatcatttaatgagaggagagaggcgaccactttgggaagaggagagtaatgcaaagggtggcgtatggaagatgaaagtccccaaggacagcacgtccacagtttggaaagagttgctgttagcaaccatcggggaacagttcacagactgtgccgcagcagatgatgaagtaataggagttagtgtcagtgttcgggaccgagaagacgtcgtccaagtctggaatgtaaatgcctctttagtgggtgaagcgactgttttagaaaagatctatgaacttctgccccacataacttttaaagcagtattttataaaccccatgaagagcatcatgcttttgaaggtggacgtggaaaacactaa

SEQ ID NO: 131349 - DNA, 613 bp, Homo sapiens
  Payload ID: 5634
  Gene Symbol: EIF4E3
  Gene Name: eukaryotic translation initiation factor 4E family member 3
  ENST ID: ENST00000496214
  CDS Start-End: 460-613
ggaaggcggcgtggaagcagaagagcgcggccaggaaggcgagcagcttgcagcccagcgcgcccggcggcgcccccgccgcggccgccgcacgccgcgccgccagcatgacggccgggaggcaggcgagcgcgcgcagcccgtcggccaggcacaggtcgagcagcaggggctgtggggtcaccttctcttcctctcttctgccaccccaagtcgtctgtgttgcgtgtcatgcagtgggacagcacgttggtccggacctcaagctacccacgttctagtcccgcctctgtcatttcctagagctgtggcctcggatccctccctggtgccacagcagctgagtgcgcatcaaatctgaagaaaatctacacagtacagacagtacagatattttggagtgtatacaataatatccctcctgtgactagcctgcctttgagatgtagttatcatttaatgagaggagagaggcgaccactttgggaagaggagagtaatgcaaagggtggcgtatggaagatgaaagtccccaaggacagcacgtccacagtttggaaagagttgctgttagcaaccatcggggaacagttcacagactgtgccgcagcag

SEQ ID NO: 131350 - DNA, 693 bp, Homo sapiens
  Payload ID: 5634
  Gene Symbol: EIF4E3
  Gene Name: eukaryotic translation initiation factor 4E family member 3
  ENST ID: ENST00000497838
  CDS Start-End: 415-693
gtagaagagagaggaccacttgttgctaggcaaccagcacccacctcacccatgttgccatggtgatgatgaaagttgggctgatgggattaccagctcctgctaattgcatatgagtgctcaggggctgtggggtcaccttctcttcctctcttctgccaccccaagtcgtctgtgttgcgtgtcatgcagtgggacagcacgttggtccggacctcaagctacccacgttctagtcccgcctctgtcatttcctagagctgtggcctcggatccctccctggtgccacagcagctgagtgcgcatcaaatctgaagaaaatctacacagtacagacagtacagatattttggagtgtatacaataatatccctcctgtgactagcctgcctttgagatgtagttatcatttaatgagaggagagaggcgaccactttgggaagaggagagtaatgcaaagggtggcgtatggaagatgaaagtccccaaggacagcacgtccacagtttggaaagagttgctgttagcaaccatcggggaacagttcacagactgtgccgcagcagatgatgaagtaataggagttagtgtcagtgttcgggaccgagaagacgtcgtccaagtctggaatgtaaatgcctctttagtgggtgaagcgactgttttagaaaagatctatgaacttctgccc

SEQ ID NO: 131351 - DNA, 519 bp, Homo sapiens
  Payload ID: 5634
  Gene Symbol: EIF4E3
  Gene Name: eukaryotic translation initiation factor 4E family member 3
  ENST ID: ENST00000469524
  CDS Start-End: 388-519
ggtgactggatgctggaggggaggggagtagctgctgcagctaattgcttaattatttatgagtgcctcaagtccttcttgttgtttttgttgctaggggctgtggggtcaccttctcttcctctcttctgccaccccaagtcgtctgtgttgcgtgtcatgcagtgggacagcacgttggtccggacctcaagctacccacgttctagtcccgcctctgtcatttcctagagctgtggcctcggatccctccctggtgccacagcagctgagtgcgcatcaaatctgaagaaaatctacacagtacagacagtacagatattttggagtgtatacaataatatccctcctgtgactagcctgcctttgagatgtagttatcatttaatgagaggagagaggcgaccactttgggaagaggagagtaatgcaaagggtggcgtatggaagatgaaagtccccaaggacagcacgtccacagtttggaaagagttgctgttagcaaccatcggggaacag

SEQ ID NO: 131352 - DNA, 3544 bp, Homo sapiens
  Payload ID: 5635
  Gene Symbol: EIF4ENIF1
  Gene Name: eukaryotic translation initiation factor 4E nuclear import factor 1
  Uniprot ID: Q9NRA8
  ENST ID: ENST00000330125
  CDS Start-End: 76-3033
ggggagcggcggccgaggcaaagggccgccgagcggcggaggcaccgagtgcagagcattgtagaccaaggagccatggataggagaagtatgggtgaaacagaaagtggagatgctttccttgacctgaagaagcctcctgcctccaaatgcccccatcgctatacaaaagaagaactcttggatataaaagaactcccccattccaaacagaggccttcatgcctttctgaaaaatatgacagtgatggtgtctgggaccctgagaagtggcatgcctctctctacccagcttcagggcggagctcaccagtggaaagtctgaagaaagagttggatacagaccggccttccctggtgcgcaggatagtagatccacgagagcgtgtgaaagaagatgacttagatgttgttctcagccctcagagacggagctttggagggggctgccacgtgacagccgctgttagctcccggcgctcaggaagtccattagagaaagatagtgatgggcttcgtctgcttggtggacgtaggattggcagtgggaggataatctctgcccggacctttgagaaggatcaccgtcttagcgataaggacctgcgggacttgagagacagagaccgagagagggacttcaaggacaagcgtttcaggagagagtttggagatagtaagcgtgtctttggtgagcgtagaagaaatgattcttacacagaagaagaaccagagtggttctctgctggacccacaagtcagtctgaaaccatcgaactgactggctttgatgataagatactagaagaagatcacaaagggagaaaaagaacaaggcgacggacagcctctgtgaaggaaggtatagtagagtgcaatggaggagtggccgaagaggatgaagtggaggtcatccttgcacaggagcctgcggctgatcaggaagtgccaagggatgctgtcttgcctgagcagtccccaggagactttgactttaatgagttctttaaccttgataaggtgccatgcttggcttcgatgatagaagatgttttgggagaagggtcagtctctgccagtcggttcagtaggtggttctctaacccgagcagatcaggaagccgatccagcagtcttgggtcaacaccacatgaagagctagagagacttgcaggtctggagcaagccatcctctctcctggacagaactcggggaattactttgctcctataccattggaagaccatgctgaaaataaagtggatattttagaaatgctacagaaagccaaagtggatttgaaacctcttctttccagcctttctgcaaataaagaaaaacttaaagaaagctcacattcaggggttgtgctttcagtggaggaggtagaagcaggtctgaagggcttgaaggttgaccagcaagtgaagaattcaactcccttcatggcagaacacctagaagagaccttgagtgccgtaaccaacaatcgacaactgaagaaagacggagacatgactgcgttcaacaagctagtgagcacaatgaaggcaagtgggactttgccttctcagcccaaagtcagccgaaaccttgaaagccatttgatgtcccctgctgagattccaggccagcctgtccctaagaacatcctgcaggaacttctgggtcaaccagttcagagacctgcttcttccaatcttctgagtggccttatggggagcttggagcctacaacatctttactgggccaaagagcaccctctcctcccttgtcacaggtgtttcaaactcgagcagcctcagctgactaccttcgcccaagaataccatcaccaattggtttcacaccaggaccacagcagctactcggagatccattccaaggcatgcgcaaacccatgagccccatcacagcccagatgagccagctggagttgcaacaggcagctttagaagggctggccttgccacatgaccttgctgtacaggcagcaaacttctaccagcctggttttggcaaaccacaggtggacagaaccagagatggattcagaaacaggcaacagcgagtgaccaagtcaccagcacccgtgcatcgagggaattcctcttcccctgcccctgctgcctccatcacaagcatgctttctccttcctttacccctacctcagtgattcgtaagatgtacgagagcaaagagaaaagcaaggaggagccagcatctggaaaagcagctcttggtgacagtaaagaggatactcagaaggccagtgaagaaaacctcctgtcatccagctctgtacccagtgccgatcgagactcttctcccactacaaattccaaactgtcagcattacagaggtcttcgtgttccaccccactgtcccaggccaaccgttacaccaaagaacaagattatcgacctaaagcaactgggagaaaaacacccaccttggcatccccagttcctacaacaccttttctccgccctgtccaccaagttccccttgtcccccatgtccctatggttaggcctgctcaccagcttcacccagggttggtacagaggatgctggcccagggagtacatccacagcatcttccaagtttgctccaaactggtgtgcttcctcctgggatggacttgagtcatttacagggaatatctggccccatcctgggtcagcccttttaccctttacctgctgctagtcaccctctcttaaaccctcgtcctggaacacctctgcatctggcaatggtgcaacagcagctacagcgctcagttctgcatcctccaggctctggttcccatgcagcagctgtcagcgttcagacaacccctcagaacgtgcccagccggtcaggcctgccccacatgcactcccagctggagcatcgccccagccagaggagcagctcccctgtgggccttgccaaatggtttggctcagatgtgctacagcaacccctgccctccatgcccgccaaagttatcagtgtagatgaattggaataccgacagtgagcagggcaggcagactcaactaagcccggacctgtggtggcacactgggcaggaccctgcttcatctcgggttggtttatgggcttttactttggagcactctgtgtgaagctgtttggtggaacccatgcatctggtgtggtccgcattatgatggaaggatcttaaccagtcgagtggagtgtacattgtctgaatacaggatgcacaatgttgtcaatcctggaaatggtctttcttttttgtaagatatgtgaatgaagtgttggtgtcctcaccaagaggtggcacctaagggttctgaggaaataaatgtatagacccttatgtacagacctgtgtataaacaacttttgtatatacatataggatagcttttttgaactatacagctgtacataaaagtagctgatattagttaggcctgtgtcaacagtttggatttttttcacttgtacatttgggattttcttttggttgattaaaattgcatatgctaagtgtgtgaatg

SEQ ID NO: 131353 - DNA, 3115 bp, Homo sapiens
  Payload ID: 5635
  Gene Symbol: EIF4ENIF1
  Gene Name: eukaryotic translation initiation factor 4E nuclear import factor 1
  Uniprot ID: Q9NRA8
  ENST ID: ENST00000344710
  CDS Start-End: 159-2594
gagacagcccaagccggtcggggtgggggcgcgagagcgaaggctgcggggagcggcgctgggaccggtgcgggcagcggggaggggagcggcggccgaggcaaagggccgccgagcggcggaggcaccgagtgcagagcattgtagaccaaggagccatggataggagaagtatgggtgaaacagaaagtggagatgctttccttgacctgaagaagcctcctgcctccaaatgcccccatcgctatacaaaagaagaactcttggatataaaagaactcccccattccaaacagaggccttcatgcctttctgaaaaatatgacagtgatggtgtctgggaccctgagaagtggcatgcctctctctacccagcttcagggcggagctcaccagtggaaagtctgaagaaagagttggatacagaccggccttccctggtgcgcaggatagtaggtatagtagagtgcaatggaggagtggccgaagaggatgaagtggaggtcatccttgcacaggagcctgcggctgatcaggaagtgccaagggatgctgtcttgcctgagcagtccccaggagactttgactttaatgagttctttaaccttgataaggtgccatgcttggcttcgatgatagaagatgttttgggagaagggtcagtctctgccagtcggttcagtaggtggttctctaacccgagcagatcaggaagccgatccagcagtcttgggtcaacaccacatgaagagctagagagacttgcaggtctggagcaagccatcctctctcctggacagaactcggggaattactttgctcctataccattggaagaccatgctgaaaataaagtggatattttagaaatgctacagaaagccaaagtggatttgaaacctcttctttccagcctttctgcaaataaagaaaaacttaaagaaagctcacattcaggggttgtgctttcagtggaggaggtagaagcaggtctgaagggcttgaaggttgaccagcaagtgaagaattcaactcccttcatggcagaacacctagaagagaccttgagtgccgtaaccaacaatcgacaactgaagaaagacggagacatgactgcgttcaacaagctagtgagcacaatgaagcgaaaccttgaaagccatttgatgtcccctgctgagattccaggccagcctgtccctaagaacatcctgcaggaacttctgggtcaaccagttcagagacctgcttcttccaatcttctgagtggccttatggggagcttggagcctacaacatctttactgggccaaagagcaccctctcctcccttgtcacaggtgtttcaaactcgagcagcctcagctgactaccttcgcccaagaataccatcaccaattggtttcacaccaggaccacagcagctactcggagatccattccaaggcatgcgcaaacccatgagccccatcacagcccagcagatgagccagctggagttgcaacaggcagctttagaagggctggccttgccacatgaccttgctgtacaggcagcaaacttctaccagcctggttttggcaaaccacaggtggacagaaccagagatggattcagaaacaggcaacagcgagtgaccaagtcaccagcacccgtgcatcgagggaattcctcttcccctgcccctgctgcctccatcacaagcatgctttctccttcctttacccctacctcagtgattcgtaagatgtacgagagcaaagagaaaagcaaggaggagccagcatctggaaaagcagctcttggtgacagtaaagaggatactcagaaggccagtgaagaaaacctcctgtcatccagctctgtacccagtgccgatcgagactcttctcccactacaaattccaaactgtcagcattacagaggtcttcgtgttccaccccactgtcccaggccaaccgttacaccaaagaacaagattatcgacctaaagcaactgggagaaaaacacccaccttggcatccccagttcctacaacaccttttctccgccctgtccaccaagttccccttgtcccccatgtccctatggttaggcctgctcaccagcttcacccagggttggtacagaggatgctggcccagggagtacatccacagcatcttccaagtttgctccaaactggtgtgcttcctcctgggatggacttgagtcatttacagggaatatctggccccatcctgggtcagcccttttaccctttacctgctgctagtcaccctctcttaaaccctcgtcctggaacacctctgcatctggcaatggtgcaacagcagctacagcgctcagttctgcatcctccaggctctggttcccatgcagcagctgtcagcgttcagacaacccctcagaacgtgcccagccggtcaggcctgccccacatgcactcccagctggagcatcgccccagccagaggagcagctcccctgtgggccttgccaaatggtttggctcagatgtgctacagcaacccctgccctccatgcccgccaaagttatcagtgtagatgaattggaataccgacagtgagcagggcaggcagactcaactaagcccggacctgtggtggcacactgggcaggaccctgcttcatctcgggttggtttatgggcttttactttggagcactctgtgtgaagctgtttggtggaacccatgcatctggtgtggtccgcattatgatggaaggatcttaaccagtcgagtggagtgtacattgtctgaatacaggatgcacaatgttgtcaatcctggaaatggtctttcttttttgtaagatatgtgaatgaagtgttggtgtcctcaccaagaggtggcacctaagggttctgaggaaataaatgtatagacccttatgtacagacctgtgtataaacaacttttgtatatacatataggatagcttttttgaactatacagctgtacataaaagtagctgatattagttaggcctgtgtcaacagtttggatttttttcacttgtacatttgggattttcttttggttgattaaaattgcatatgctaagtgtgtgaatgaagtaactga

SEQ ID NO: 131354 - DNA, 251 bp, Homo sapiens
  Payload ID: 5635
  Gene Symbol: EIF4ENIF1
  Gene Name: eukaryotic translation initiation factor 4E nuclear import factor 1
  ENST ID: ENST00000397518
  CDS Start-End: 61-251
gcgcgcggcggggaaggcggcgccggggccagggtgcagagcattgtagaccaaggagccatggataggagaagtatgggtgaaacagaaagtggagatgctttccttgacctgaagaagcctcctgcctccaaatgcccccatcgctatacaaaagaagaactcttggatataaaagaactcccccattccaaacagaggccttcatgcctttctgaaaaatatgacagtgatggtgtctgggaccctga

SEQ ID NO: 131355 - DNA, 374 bp, Homo sapiens
  Payload ID: 5635
  Gene Symbol: EIF4ENIF1
  Gene Name: eukaryotic translation initiation factor 4E nuclear import factor 1
  ENST ID: ENST00000397520
  CDS Start-End: 184-374
gttcacagggagtggaaaccggaacccgtggagtatgacccgcccatgcgtggacccggcaggttgctacaacttgcacttggaggggagaggtcccaaggcccccgaattagaaatgccaggctcatctctttttgtaacccttcattttaaaatgtgcagagcattgtagaccaaggagccatggataggagaagtatgggtgaaacagaaagtggagatgctttccttgacctgaagaagcctcctgcctccaaatgcccccatcgctatacaaaagaagaactcttggatataaaagaactcccccattccaaacagaggccttcatgcctttctgaaaaatatgacagtgatggtgtctgggaccctga

SEQ ID NO: 131356 - DNA, 3420 bp, Homo sapiens
  Payload ID: 5635
  Gene Symbol: EIF4ENIF1
  Gene Name: eukaryotic translation initiation factor 4E nuclear import factor 1
  ENST ID: ENST00000397523
  CDS Start-End: 28-2913
gtgcagagcattgtagaccaaggagccatggataggagaagtatgggtgaaacagaaagtggagatgctttccttgacctgaagaagcctcctgcctccaaatgcccccatcgctatacaaaagaagaactcttggatataaaagaactcccccattccaaacagaggccttcatgcctttctgaaaaatatgacagtgatggtgtctgggaccctgagaagtggcatgcctctctctacccagcttcagggcggagctcaccagtggaaagtctgaagaaagagttggatacagaccggccttccctggtgcgcaggatagtagatccacgagagcgtgtgaaagaagatgacttagatgttgttctcagccctcagagacggagctttggagggggctgccacgtgacagccgctgttagctcccggcgctcaggaagtccattagagaaagatagtgatgggcttcgtctgcttggtggacgtaggattggcagtgggaggataatctctgcccggacctttgagaaggatcaccgtcttagcgataaggacctgcgggacttgagagacagagaccgagagagggacttcaaggacaagcgtttcaggagagagtttggagatagtaagcgtgtctttggtgagcgtagaagaaatgattcttacacagaagaagaaccagagtggttctctgctggacccacaagtcagtctgaaaccatcgaactgactggctttgatgataagatactagaagaagatcacaaagggagaaaaagaacaaggcgacggacagcctctgtgaaggaaggtatagtagagtgcaatggaggagtggccgaagaggatgaagtggaggtcatccttgcacaggagcctgcggctgatcaggaagtgccaagggatgctgtcttgcctgagcagtccccaggagactttgactttaatgagttctttaaccttgataaggtgccatgcttggcttcgatgatagaagatgttttgggagaagggtcagtctctgccagtcggttcagtaggtggttctctaacccgagcagatcaggaagccgatccagcagtcttgggtcaacaccacatgaagagctagagagacttgcaggtctggagcaagccatcctctctcctggacagaactcggggaattactttgctcctataccattggaagaccatgctgaaaataaagtggatattttagaaatgctacagaaagccaaagtggatttgaaacctcttctttccagcctttctgcaaataaagaaaaacttaaagaaagctcacattcaggggttgtgctttcagtggaggaggtagaagcaggtctgaagggcttgaaggttgaccagcaagtgaagaattcaactcccttcatggcagaacacctagaagagaccttgagtgccgtaaccaacaatcgacaactgaagaaagacggagacatgactgcgttcaacaagctagtgagcacaatgaaggcaagtgggactttgccttctcagcccaaagtcagcgaacttctgggtcaaccagttcagagacctgcttcttccaatcttctgagtggccttatggggagcttggagcctacaacatctttactgggccaaagagcaccctctcctcccttgtcacaggtgtttcaaactcgagcagcctcagctgactaccttcgcccaagaataccatcaccaattggtttcacaccaggaccacagcagctactcggagatccattccaaggcatgcgcaaacccatgagccccatcacagcccagatgagccagctggagttgcaacaggcagctttagaagggctggccttgccacatgaccttgctgtacaggcagcaaacttctaccagcctggttttggcaaaccacaggtggacagaaccagagatggattcagaaacaggcaacagcgagtgaccaagtcaccagcacccgtgcatcgagggaattcctcttcccctgcccctgctgcctccatcacaagcatgctttctccttcctttacccctacctcagtgattcgtaagatgtacgagagcaaagagaaaagcaaggaggagccagcatctggaaaagcagctcttggtgacagtaaagaggatactcagaaggccagtgaagaaaacctcctgtcatccagctctgtacccagtgccgatcgagactcttctcccactacaaattccaaactgtcagcattacagaggtcttcgtgttccaccccactgtcccaggccaaccgttacaccaaagaacaagattatcgacctaaagcaactgggagaaaaacacccaccttggcatccccagttcctacaacaccttttctccgccctgtccaccaagttccccttgtcccccatgtccctatggttaggcctgctcaccagcttcacccagggttggtacagaggatgctggcccagggagtacatccacagcatcttccaagtttgctccaaactggtgtgcttcctcctgggatggacttgagtcatttacagggaatatctggccccatcctgggtcagcccttttaccctttacctgctgctagtcaccctctcttaaaccctcgtcctggaacacctctgcatctggcaatggtgcaacagcagctacagcgctcagttctgcatcctccaggctctggttcccatgcagcagctgtcagcgttcagacaacccctcagaacgtgcccagccggtcaggcctgccccacatgcactcccagctggagcatcgccccagccagaggagcagctcccctgtgggccttgccaaatggtttggctcagatgtgctacagcaacccctgccctccatgcccgccaaagttatcagtgtagatgaattggaataccgacagtgagcagggcaggcagactcaactaagcccggacctgtggtggcacactgggcaggaccctgcttcatctcgggttggtttatgggcttttactttggagcactctgtgtgaagctgtttggtggaacccatgcatctggtgtggtccgcattatgatggaaggatcttaaccagtcgagtggagtgtacattgtctgaatacaggatgcacaatgttgtcaatcctggaaatggtctttcttttttgtaagatatgtgaatgaagtgttggtgtcctcaccaagaggtggcacctaagggttctgaggaaataaatgtatagacccttatgtacagacctgtgtataaacaacttttgtatatacatataggatagcttttttgaactatacagctgtacataaaagtagctgatattagttaggcctgtgtcaacagtttggatttttttcacttgtacatttgggattttcttttggttgattaaaattgcatatgctaagtgtgtg

SEQ ID NO: 131357 - DNA, 3695 bp, Homo sapiens
  Payload ID: 5635
  Gene Symbol: EIF4ENIF1
  Gene Name: eukaryotic translation initiation factor 4E nuclear import factor 1
  Uniprot ID: Q9NRA8
  ENST ID: ENST00000397525
  CDS Start-End: 225-3182
gcgggcgccggggcgcccgcagggggtgggcaggggcgcgaggcccgcaaggcggccggcgggtagccggcgggctggctggcggggaccgagccgccgggccggggaggacggctgcgggcctgcgctagctccagcttgaagcgcccgggccgggagattcggcctccctcctccctgcggccggccgcccctcagtgcagagcattgtagaccaaggagccatggataggagaagtatgggtgaaacagaaagtggagatgctttccttgacctgaagaagcctcctgcctccaaatgcccccatcgctatacaaaagaagaactcttggatataaaagaactcccccattccaaacagaggccttcatgcctttctgaaaaatatgacagtgatggtgtctgggaccctgagaagtggcatgcctctctctacccagcttcagggcggagctcaccagtggaaagtctgaagaaagagttggatacagaccggccttccctggtgcgcaggatagtagatccacgagagcgtgtgaaagaagatgacttagatgttgttctcagccctcagagacggagctttggagggggctgccacgtgacagccgctgttagctcccggcgctcaggaagtccattagagaaagatagtgatgggcttcgtctgcttggtggacgtaggattggcagtgggaggataatctctgcccggacctttgagaaggatcaccgtcttagcgataaggacctgcgggacttgagagacagagaccgagagagggacttcaaggacaagcgtttcaggagagagtttggagatagtaagcgtgtctttggtgagcgtagaagaaatgattcttacacagaagaagaaccagagtggttctctgctggacccacaagtcagtctgaaaccatcgaactgactggctttgatgataagatactagaagaagatcacaaagggagaaaaagaacaaggcgacggacagcctctgtgaaggaaggtatagtagagtgcaatggaggagtggccgaagaggatgaagtggaggtcatccttgcacaggagcctgcggctgatcaggaagtgccaagggatgctgtcttgcctgagcagtccccaggagactttgactttaatgagttctttaaccttgataaggtgccatgcttggcttcgatgatagaagatgttttgggagaagggtcagtctctgccagtcggttcagtaggtggttctctaacccgagcagatcaggaagccgatccagcagtcttgggtcaacaccacatgaagagctagagagacttgcaggtctggagcaagccatcctctctcctggacagaactcggggaattactttgctcctataccattggaagaccatgctgaaaataaagtggatattttagaaatgctacagaaagccaaagtggatttgaaacctcttctttccagcctttctgcaaataaagaaaaacttaaagaaagctcacattcaggggttgtgctttcagtggaggaggtagaagcaggtctgaagggcttgaaggttgaccagcaagtgaagaattcaactcccttcatggcagaacacctagaagagaccttgagtgccgtaaccaacaatcgacaactgaagaaagacggagacatgactgcgttcaacaagctagtgagcacaatgaaggcaagtgggactttgccttctcagcccaaagtcagccgaaaccttgaaagccatttgatgtcccctgctgagattccaggccagcctgtccctaagaacatcctgcaggaacttctgggtcaaccagttcagagacctgcttcttccaatcttctgagtggccttatggggagcttggagcctacaacatctttactgggccaaagagcaccctctcctcccttgtcacaggtgtttcaaactcgagcagcctcagctgactaccttcgcccaagaataccatcaccaattggtttcacaccaggaccacagcagctactcggagatccattccaaggcatgcgcaaacccatgagccccatcacagcccagatgagccagctggagttgcaacaggcagctttagaagggctggccttgccacatgaccttgctgtacaggcagcaaacttctaccagcctggttttggcaaaccacaggtggacagaaccagagatggattcagaaacaggcaacagcgagtgaccaagtcaccagcacccgtgcatcgagggaattcctcttcccctgcccctgctgcctccatcacaagcatgctttctccttcctttacccctacctcagtgattcgtaagatgtacgagagcaaagagaaaagcaaggaggagccagcatctggaaaagcagctcttggtgacagtaaagaggatactcagaaggccagtgaagaaaacctcctgtcatccagctctgtacccagtgccgatcgagactcttctcccactacaaattccaaactgtcagcattacagaggtcttcgtgttccaccccactgtcccaggccaaccgttacaccaaagaacaagattatcgacctaaagcaactgggagaaaaacacccaccttggcatccccagttcctacaacaccttttctccgccctgtccaccaagttccccttgtcccccatgtccctatggttaggcctgctcaccagcttcacccagggttggtacagaggatgctggcccagggagtacatccacagcatcttccaagtttgctccaaactggtgtgcttcctcctgggatggacttgagtcatttacagggaatatctggccccatcctgggtcagcccttttaccctttacctgctgctagtcaccctctcttaaaccctcgtcctggaacacctctgcatctggcaatggtgcaacagcagctacagcgctcagttctgcatcctccaggctctggttcccatgcagcagctgtcagcgttcagacaacccctcagaacgtgcccagccggtcaggcctgccccacatgcactcccagctggagcatcgccccagccagaggagcagctcccctgtgggccttgccaaatggtttggctcagatgtgctacagcaacccctgccctccatgcccgccaaagttatcagtgtagatgaattggaataccgacagtgagcagggcaggcagactcaactaagcccggacctgtggtggcacactgggcaggaccctgcttcatctcgggttggtttatgggcttttactttggagcactctgtgtgaagctgtttggtggaacccatgcatctggtgtggtccgcattatgatggaaggatcttaaccagtcgagtggagtgtacattgtctgaatacaggatgcacaatgttgtcaatcctggaaatggtctttcttttttgtaagatatgtgaatgaagtgttggtgtcctcaccaagaggtggcacctaagggttctgaggaaataaatgtatagacccttatgtacagacctgtgtataaacaacttttgtatatacatataggatagcttttttgaactatacagctgtacataaaagtagctgatattagttaggcctgtgtcaacagtttggatttttttcacttgtacatttgggattttcttttggttgattaaaattgcatatgctaagtgtgtgaatgaa

SEQ ID NO: 131358 - DNA, 861 bp, Homo sapiens
  Payload ID: 5635
  Gene Symbol: EIF4ENIF1
  Gene Name: eukaryotic translation initiation factor 4E nuclear import factor 1
  ENST ID: ENST00000445424
  CDS Start-End: 1-284
ctgactaccttcgcccaagaataccatcaccaattggtttcacaccaggaccacagcagctactcggagatccattccaaggcatgcgcaaacccatgagccccatcacagcccagatgagccagctggagttgcaacaggcagctttagaagggctggccttgccacatgaccttgctgtacaggcagcaaacttctaccagcctggttttggcaaaccacaggtggacagaaccagagatggattcagaaacagattcaatgttcttatcaaactcccttgatgcaggtttgctacatcagcagttttttggccagagctgacaggcaacagcgagtgaccaagtcaccagcacccgtgcatcgagggaattcctcttcccctgcccctgctgcctccatcacaagcatgctttctccttcctttacccctacctcagtgattcgtaagatgtacgagagcaaagagaaaagcaaggaggagccagcatctggaaaagcagctcttggtgacagtaaagaggatactcagaaggccagtgaagaaaacctcctgtcatccagctctgtacccagtgccgatcgagactcttctcccactacaaattccaaactgtcagcattacagaggtcttcgtgttccaccccactgtcccaggccaaccgttacaccaaagaacaagattatcgacctaaagcaactgggagaaaaacacccaccttggcatccccagttcctacaacaccttttctccgccctgtccaccaagttccccttgtcccccatgtccctatggttaggcctgctcaccagcttcacccagggttggtacagaggatgctggcccagggagtacatcc

SEQ ID NO: 131359 - DNA, 688 bp, Homo sapiens
  Payload ID: 5635
  Gene Symbol: EIF4ENIF1
  Gene Name: eukaryotic translation initiation factor 4E nuclear import factor 1
  ENST ID: ENST00000423097
  CDS Start-End: 123-688
tggccacaggtgcggctggcctggcgaggggcgctcgggccccgtccccagtccctgatcgccggataacaaggggcagctggcgccgtccattggtgcagagcattgtagaccaaggagccatggataggagaagtatgggtgaaacagaaagtggagatgctttccttgacctgaagaagcctcctgcctccaaatgcccccatcgctatacaaaagaagaactcttggatataaaagaactcccccattccaaacagaggccttcatgcctttctgaaaaatatgacagtgatggtgtctgggaccctgagaagtggcatgcctctctctacccagcttcagggcggagctcaccagtggaaagtctgaagaaagagttggatacagaccggccttccctggtgcgcaggatagtagatccacgagagcgtgtgaaagaagatgacttagatgttgttctcagccctcagagacggagctttggagggggctgccacgtgacagccgctgttagctcccggcgctcaggaagtccattagagaaagatagtgatgggcttcgtctgcttggtggacgtaggattggcagtgggaggataatctctgcccggacctttgagaaggatcaccgtcttagcgataaggacctgcgggacttgagagacagagaccgagagagggactt

SEQ ID NO: 131360 - DNA, 718 bp, Homo sapiens
  Payload ID: 5635
  Gene Symbol: EIF4ENIF1
  Gene Name: eukaryotic translation initiation factor 4E nuclear import factor 1
  ENST ID: ENST00000418321
  CDS Start-End: 1-718
cagaaagccaaagtggatttgaaacctcttctttccagcctttctgcaaataaagaaaaacttaaagaaagctcacattcaggggttgtgctttcagtggaggaggtagaagcaggtctgaagggcttgaaggttgaccagcaagtgaagaattcaactcccttcatggcagaacacctagaagagaccttgagtgccgtaaccaacaatcgacaactgaagaaagacggagacatgactgcgttcaacaagctagtgagcacaatgaaggcaagtgggactttgccttctcagcccaaagtcagccgaaaccttgaaagccatttgatgtcccctgctgagattccaggccagcctgtccctaagaacatcctgcaggtgtttcaaactcgagcagcctcagctgactaccttcgcccaagaataccatcaccaattggtttcacaccaggaccacagcagctactcggagatccattccaaggcatgcgcaaacccatgagccccatcacagcccagatgagccagctggagttgcaacaggcagctttagaagggctggccttgccacatgaccttgctgtacaggcagcaaacttctaccagcctggttttggcaaaccacaggtggacagaaccagagatggattcagaaacaggcaacagcgagtgaccaagtcaccagcacccgtgcatcgagggaattcctcttcccctg

SEQ ID NO: 131361 - DNA, 2679 bp, Homo sapiens
  Payload ID: 5636
  Gene Symbol: EIF4H
  Gene Name: eukaryotic translation initiation factor 4H
  Uniprot ID: Q15056
  ENST ID: ENST00000265753
  CDS Start-End: 140-886
gcgcgcgcgtgcgcgtgcctgcgtccaagggatttgcgatcaggcggcgcggcggacagccccggcggcggggcggggggagttatattgcggggtccttcctcgctcaccctggttcctctcggagcggagacggcaaatggcggacttcgacacctacgacgatcgggcctacagcagcttcggcggcggcagagggtcccgcggcagtgctggtggccatggttcccgtagccagaaggagttgcccacagagcccccctacacagcatacgtaggaaatctacctttcaatacggttcagggcgacatagatgctatctttaaggatctcagcataaggagtgtacggctagtcagagacaaagacacagataaatttaaaggattctgctatgtagaattcgatgaagtggattcccttaaggaagccttgacatacgatggtgcactgttgggcgatcggtcacttcgtgtggacattgcagaaggcagaaaacaagataaaggtggctttggattcagaaaaggtggaccagatgacagaggaatgggtagctctcgagaatctagaggtggatgggattcccgggatgacttcaattctggcttcagggatgacttcttagggggcaggggaggtagtcgcccaggcgaccggcgaacaggcccccccatgggcagccgcttcagagatggccctcccctccgtggatccaacatggatttcagagaacccacagaagaggaaagagcacagagaccacgactccagcttaaacctcgaacagtcgcgacgcccctcaatcaagtagccaatcccaactctgctatcttcgggggtgccaggcctagagaggaagtcgttcaaaaggagcaagaatgagcctgcggttgggagggaatggggcgtggggggttagagcaggaccacagcctggtgagtccccgggcagccgtcctgcagccgccactcctgcgcctgccattggcctcctcacagcggaaacacagcttgtgagtgcatgtcagctgttaacaagtggtttttagtacattctgggctttgctgtatctatctagtgcctgtttgtgcgtttttttctttcttccgctgcttccccattttccttctgtcctttttctcctgctccttgttttcccagcagcacatggggttcctcggaggagcagaggtggccgccgtgggggggcgtttgggctgcggtgctgcgtcatttttcctttgctttctctttactttagacactggcccaactccaggcgtttcctttcattccctcagtgcttctcttctgacctgcatgttgagttctgtattgctggggcttccaacaaaaaccagagtcactgacagagggaacagcagagaccttgttggtattcagctgtgatggatatagagaatcagaggcaccttgttttcacaactaggataaaaatatctgcagggtcctttccattcctatttagagggagtcctggctccatgaccccctcccgagtggactgtccaagcagataggctcacacgagaaacagtgaggctgaaagggggggctatggaagagcggtagggagtccacggagaagatgcagtgaatgcttgcatgcattcacacgtgtgtgtgtcccagctagttcactcctttcgccgtgcgtggtggaggctggcctctctggctgggtgcagtgaatggccagcgggtttcttttctgctgggccaaggcgctttgggggtggagggggtggtgctggtgctgcactgggctgactgcggcgctgacgcagcgtttccccccatccctgttgcctgtgtgttgtgtggatctgttcctagtataggcaacataatgagatactgtgcttcccacctccccttcagttcagagccaaaatgggtctagaatctggcactttactcatttcctttgataaattgtactatgcagagctgtcaggaaccttcagatagcagtagaggactgcagctgtctaggtctgcggccacatcttggggacacactggactgttcccatgtgcagggttcagcagttatgtgggagtgctaggggttaggcttttgagcttgaacgcctgcgtgtgaacagatgaaaaatccttcagtacccaagtcccagtctgtcctatggggagcagtttgggggcggccggcagcaggagcctgggaaagaggccctcgccaggtgatggcagggccagggtggcctggggcacccagcggaatgtgcttagtatttggtcaccagccgtcatcctgggcttttcctactgtgtcttgttacaaggcctcagcaatccacagaactctctctccttccttccacctgtcagcttctctgcttctgagataagaaccatttgtgtaacaccaacacttaacttcagaaagacatgcattatgtggtgtaatcaaacccgatgctttcagatgacctacttacatcttcaatgtggataagataaagaacaaaacacatgcatctaaactgctgggcaatccagttgacttttaaatgtaagaatggaattccaaacacttaacacattcagctatatgacagaaagtaaatctatggatatggtattttgtgaatgatcttttaaataaaagaaaaccttacgtaatatttaa

SEQ ID NO: 131362 - DNA, 2503 bp, Homo sapiens
  Payload ID: 5636
  Gene Symbol: EIF4H
  Gene Name: eukaryotic translation initiation factor 4H
  Uniprot ID: Q15056
  ENST ID: ENST00000353999
  CDS Start-End: 29-715
ctggttcctctcggagcggagacggcaaatggcggacttcgacacctacgacgatcgggcctacagcagcttcggcggcggcagagggtcccgcggcagtgctggtggccatggttcccgtagccagaaggagttgcccacagagcccccctacacagcatacgtaggaaatctacctttcaatacggttcagggcgacatagatgctatctttaaggatctcagcataaggagtgtacggctagtcagagacaaagacacagataaatttaaaggattctgctatgtagaattcgatgaagtggattcccttaaggaagccttgacatacgatggtgcactgttgggcgatcggtcacttcgtgtggacattgcagaaggcagaaaacaagataaaggtggctttggattcagaaaaggtggaccagatgacagaggcttcagggatgacttcttagggggcaggggaggtagtcgcccaggcgaccggcgaacaggcccccccatgggcagccgcttcagagatggccctcccctccgtggatccaacatggatttcagagaacccacagaagaggaaagagcacagagaccacgactccagcttaaacctcgaacagtcgcgacgcccctcaatcaagtagccaatcccaactctgctatcttcgggggtgccaggcctagagaggaagtcgttcaaaaggagcaagaatgagcctgcggttgggagggaatggggcgtggggggttagagcaggaccacagcctggtgagtccccgggcagccgtcctgcagccgccactcctgcgcctgccattggcctcctcacagcggaaacacagcttgtgagtgcatgtcagctgttaacaagtggtttttagtacattctgggctttgctgtatctatctagtgcctgtttgtgcgtttttttctttcttccgctgcttccccattttccttctgtcctttttctcctgctccttgttttcccagcagcacatggggttcctcggaggagcagaggtggccgccgtgggggggcgtttgggctgcggtgctgcgtcatttttcctttgctttctctttactttagacactggcccaactccaggcgtttcctttcattccctcagtgcttctcttctgacctgcatgttgagttctgtattgctggggcttccaacaaaaaccagagtcactgacagagggaacagcagagaccttgttggtattcagctgtgatggatatagagaatcagaggcaccttgttttcacaactaggataaaaatatctgcagggtcctttccattcctatttagagggagtcctggctccatgaccccctcccgagtggactgtccaagcagataggctcacacgagaaacagtgaggctgaaagggggggctatggaagagcggtagggagtccacggagaagatgcagtgaatgcttgcatgcattcacacgtgtgtgtgtcccagctagttcactcctttcgccgtgcgtggtggaggctggcctctctggctgggtgcagtgaatggccagcgggtttcttttctgctgggccaaggcgctttgggggtggagggggtggtgctggtgctgcactgggctgactgcggcgctgacgcagcgtttccccccatccctgttgcctgtgtgttgtgtggatctgttcctagtataggcaacataatgagatactgtgcttcccacctccccttcagttcagagccaaaatgggtctagaatctggcactttactcatttcctttgataaattgtactatgcagagctgtcaggaaccttcagatagcagtagaggactgcagctgtctaggtctgcggccacatcttggggacacactggactgttcccatgtgcagggttcagcagttatgtgggagtgctaggggttaggcttttgagcttgaacgcctgcgtgtgaacagatgaaaaatccttcagtacccaagtcccagtctgtcctatggggagcagtttgggggcggccggcagcaggagcctgggaaagaggccctcgccaggtgatggcagggccagggtggcctggggcacccagcggaatgtgcttagtatttggtcaccagccgtcatcctgggcttttcctactgtgtcttgttacaaggcctcagcaatccacagaactctctctccttccttccacctgtcagcttctctgcttctgagataagaaccatttgtgtaacaccaacacttaacttcagaaagacatgcattatgtggtgtaatcaaacccgatgctttcagatgacctacttacatcttcaatgtggataagataaagaacaaaacacatgcatctaaactgctgggcaatccagttgacttttaaatgtaagaatggaattccaaacacttaacacattcagctatatgacagaaagtaaatctatggatatggtattttgtgaatgatcttttaaataaaagaaaaccttacgtaata

SEQ ID NO: 131363 - DNA, 5945 bp, Homo sapiens
  Payload ID: 5637
  Gene Symbol: EIF5
  Gene Name: eukaryotic translation initiation factor 5
  Uniprot ID: P55010
  ENST ID: ENST00000216554
  CDS Start-End: 677-1972
tctgggaaaggcggggggaggggagaggaaggaagcgagaccggggctggaggcgggccgaggccgcgagttgagcctcaggaagcagaaggggcgcggaaagatgcgattgacgtcgcaagcgaaccaatgacgagcgagctgtggcaggcctccagccaatgggcagtgaggcctgacgcggggggcggacgctggggccgagggtagcttgagcgcggcggcggcgttgttcagtcagagcgagaacattccagaggtcgcccagctccggcgctgacgggtgtggaccgcggacgtcgctgggacagcccctccccgctgctcggcggcggcacctggcccggccgctcctcgctgcgcttcgcctccgcctcctcggactcggactcgggtttatatcgcgcctcacttcatcccagtcccgggcgagcagcgttgggtttatgtctttatttgacgaaaacgagctgttgcgcagccattggtacctgtattggggaaacatagcatacaagcaagaagcttacagcctcagtggcgaaaattttttcatgtcagagaccgagaactcttgcagtcgtttatgtcatcccttcttctccagacagaagataccaaaaagttgcaatcaaagatctcttcatcttattgataaagccactaataagccaaaatgtctgtcaatgtcaaccgcagcgtgtcagaccagttctatcgctacaagatgccccgtctgattgccaaggttgagggcaaaggcaatggaatcaagacagttatagtcaacatggttgacgttgcaaaggcgcttaatcggcctccaacgtatcccaccaaatattttggttgtgagctgggagcacagacccagtttgatgttaagaatgaccgttacattgtcaatggatctcatgaggcgaataagctgcaagacatgttggatggattcattaaaaaatttgttctctgtcctgaatgtgagaatcctgaaacagatttgcatgtcaatccaaagaagcaaacaataggtaattcttgtaaagcctgtggctatcgaggcatgcttgacacacatcataaactctgcacattcattctcaaaaacccacctgagaatagtgacagtggtacaggaaagaaagaaaaagaaaagaaaaacagaaagggcaaagacaaggaaaatggctccgtatccagcagtgagacaccaccaccaccaccaccaccaaatgaaattaatcctcctccacatacaatggaagaagaggaggatgatgactggggagaagatacaactgaggaagctcaaaggcgtcgaatggatgaaatcagtgaccatgcaaaagttctgacactcagtgatgatttggaaagaacaattgaggagagggtcaatatcctctttgattttgttaagaaaaagaaagaagagggtgttattgattcatctgacaaagaaatcgttgctgaagcagaaagactggatgtaaaagccatgggccctcttgttctaactgaagttctttttaatgagaagattagagaacagattaagaaatacaggcgccatttcctacgattttgtcacaacaacaaaaaagcccaacggtaccttcttcatggtttggagtgtgtggtagcaatgcatcaagctcagcttatctccaagattccacatatcttgaaggagatgtacgatgcagaccttttagaagaagaggtcatcatcagctggtcggaaaaggcctctaagaaatatgtctccaaagaacttgccaaagagattcgtgtcaaagcagaaccatttataaaatggttgaaggaggcagaggaagaatcttctggtggcgaagaagaagatgaagatgagaacattgaggtggtgtattcgaaggctgccagtgtaccgaaagttgagactgtaaagtcagacaacaaggatgacgacatcgatattgatgccatttaaagggatggatgcaacctagcttaacagtataatgctgcaaattttcctccattatcagccagaagtgcaacatgtatgtgcaaaagctaaaatggcttaacatcatgctacactttacactaaaaatctattactgtgagtggtctgttattaagcccaatgagacatctagggagtccatacacatcagtgagcagatgtagtttgcttatttatagcatgtttctttttgaaaaactagtggtggacacatttggatcacatttatacagttataaaaataaaggtttgattttggtcgttcttcagatgtttggctctgaatgacttaagctgaagtaactggctccttactttaaatgttctgccatcatttcacctgatgagcattcttggagcctgccagatattgttaggtcctggggctgcaaagaggtcctcaacaggatgtaaagcaaacttaattgtaattaatttattcagcccattaagaaagtactaaagttttatctctgtagttcctcaaattggcatctggtaatgtacattgtgaggtagactgataatgaaatgacagtgtaacatcttaaccaagaagtaaatatgacctcagtgtcctataaataatgtaagagcaggatttgaaacttggagagctgttttctcatttcatgtacacttgccccaaattgtctttgaagtcgtgtgcattgcacgttggatgagccagggaaattattacattaacaagcattttgtgtgtacgtagtagttactttgtactgagagaacttgctttggggtgcaattaataaactgattttatttgggagaaacaaggaagggtgcacttaactagcaacctaagcatgatttttcagcttttgcccttagggtttaaattacaattccaaaatgttagacatactgtattttttcgttcagtgtggctttaattttcccctcttgcagtttgttctgtaatgccttttacatttggacacatagtttatgctttttagattttggttgctttcttgccaaaataagtgttaactgtgtttcaaacttgattttctttcctttttcttttttttttcttccagaatgtcttatttaaaaagaaagctaaaagcatacttctaagtcagagcctctattttggtgtaagacttgggatattttttacttcacattgaatatagccaggcacccaagaagtctgatggccacctgagtgcaggtgacaaggacctgacagagcccatgcagggctttagatttggacacacaagagttgataacttcctcatgaactccttgcctgatctaaactcatattatgggttctgactgtttgagtaatcatcttcaaggttaaacctcttggcagttacccttttcacaaagtgcacagtgggaatcgagaatcgatagggttaattttggagcagtggcttataccattcacctctgtttttttgtgattatttcacagataatgagaccttaataacaaataggcgtaaaaaaattttcacattgaaatgatagaaacatttgatgtaataaaacttggttggcttgatattttaaggaattgaaacctagcaatcttattggagagacaagaattggtctccagctgcctttgatcaagattcgggtgcaagtggagcaggagccatatacctggagggaatgtgctttgtcacaccaaagaggatttttttttcttcaaacttgtatgttgcctaggtttcaaattctttgccgcaaggctgatctgctttcattaactggaattctgtaggagatactggtgacctaagctaagttgcactcagcatactcagtgtcaagctaatgaggttctattataaaggttctacttttaatctgagggaaaacatgttcagggcttctagaacactaaaaaatttggcttaaaccagtgttcagtctggtgccaaacttcgaatggaatacaaattcacataatctgaactttgttcacaggttatcctaatagagtaattcttcactttgctctattgaactgtcttaaggatttgtttaaacagctaagttacttgattaaaataatgataaaattgtattttgtctttgctttaatattaaagttaacaagttttcattttataatgagatcaaagcattggaatctgccctgttttgtagccgttgctttggatttgtgttggatgtatcctgcagttacacttgccagccccactcacaaaagttgttcatttcattgggtcactggctttatttgctagtcttgtctgtgaactgagcatctgcctcagttttattacttgaaatcttggcaggtgcttaatagggaacatacatacagctatgtaactgtgaataattgtatatatctctagttaagaatgagggaatggggaggtttgctttctaaacaagtgcattctgaaattgacttaaaaatttttagtgtgggtcctaaagtttagagatgggcaaggaggtctctaatccaccgcttcccgcttgagaagggaggggtatcaaaattgagccccaagctgtttgttccagtgtaccaagcactgactttatgcctttggcctggagatggcagaagtgaaagctggccatctgcaaaaagcagataagtgagtttgaaccttttgcattttgttagctcagtcagtcctcatcgtggtcctgaggcataggtactgttgtaccaaggtcacttatctaacaaaataacccttcatgtattttaaatttatttgacaagtctgcagacaatccttatctaaccagctattttcttaattgctacagcttgacctaccagtattccggagtaaccagcaaatgcaaagttgaccttgttcctgcatcatctttttgatggttcaaatttcagcctccctgactactacaaagccagagcagtcttagtaccagaaacagtgttgcactttcgttgcatgtgctgtgtgaccccaaggggacagggagtcactttggtcatctctgtccccagtacagatcttgattcatagtgacattccataagtggggtgacagcaaatgacttgcaggtagtctcattgtaggtttgtgcaccagagtgaccctgtgagcctttgttaataggttgggagctcagggtgtttatgtccacctgtctggtctagccaaacagtttttttctgggaatcaaatttctgtggtttttatggccagaaattttaaggacttgtgtgtgctgggatatgagaatagaagctacagagttcttttcttgggacctagactgggaggtgcaatgtcaggacctccaggtgaatggtaggatctgagttgaccctgcagttcggttatgcagtcaattatttctttttaagaggaggaggattcacttgggtgttgggatcaaatttggattctgtcccaggccttactgtaaaactaggggattgcctttccatatctgctgggggtggagacccttatgtgcagcactcaatcccactggaagcctaatgctgcagtcagaagcaatgcctggctggggcagtaggggaaattccacccaattttgctatgagcctaaaacctctttaaaaacggtcagttaactaaaaaataaaaatcaagtctttaggagagtagaaaacacaattaactaaaaagcagggacatctgaaagagacgtattaagttaacatttttaaaaatccaaatgaaagtaaatggaataaatgtatcaggtaaaggacaagttgtaagcttggatttttaggtctagcaatacactgtttacaagagcatcacctaaaatgtgacaaaagatgttgaaaggatgaaaaaaggtatagtagacatacactaaccaaaaatgtagctctttgaatctcagaaaaaagtagattttaataaagtgtgaaagttgtcaatcaaa

SEQ ID NO: 131364 - DNA, 3417 bp, Homo sapiens
  Payload ID: 5637
  Gene Symbol: EIF5
  Gene Name: eukaryotic translation initiation factor 5
  Uniprot ID: P55010
  ENST ID: ENST00000392715
  CDS Start-End: 534-1829
gggggcggcccgatcccggcacccctcggccgtgtgtcgcttcccggctgtgcaccctccggggccgccggctctcgggggacgcgctggggatggggccagacgccccggtcgcgcgcccccctccttcgcggagctgcccggttcgccagcccccgcggaaacgcctcggagcgcggtagccatggggaccagggcgaaggttaaccgagtatttgaatagcgaggaaaagggaggccggggcgagcctggcgttcgctcgcgctctcttgcttaatggcaaattgtgggcgagcgctgcgtttaaggaagtgctgctttgaaagctgttgcgcagccattggtacctgtattggggaaacatagcatacaagcaagaagcttacagcctcagtggcgaaaattttttcatgtcagagaccgagaactcttgcagtcgtttatgtcatcccttcttctccagacagaagataccaaaaagttgcaatcaaagatctcttcatcttattgataaagccactaataagccaaaatgtctgtcaatgtcaaccgcagcgtgtcagaccagttctatcgctacaagatgccccgtctgattgccaaggttgagggcaaaggcaatggaatcaagacagttatagtcaacatggttgacgttgcaaaggcgcttaatcggcctccaacgtatcccaccaaatattttggttgtgagctgggagcacagacccagtttgatgttaagaatgaccgttacattgtcaatggatctcatgaggcgaataagctgcaagacatgttggatggattcattaaaaaatttgttctctgtcctgaatgtgagaatcctgaaacagatttgcatgtcaatccaaagaagcaaacaataggtaattcttgtaaagcctgtggctatcgaggcatgcttgacacacatcataaactctgcacattcattctcaaaaacccacctgagaatagtgacagtggtacaggaaagaaagaaaaagaaaagaaaaacagaaagggcaaagacaaggaaaatggctccgtatccagcagtgagacaccaccaccaccaccaccaccaaatgaaattaatcctcctccacatacaatggaagaagaggaggatgatgactggggagaagatacaactgaggaagctcaaaggcgtcgaatggatgaaatcagtgaccatgcaaaagttctgacactcagtgatgatttggaaagaacaattgaggagagggtcaatatcctctttgattttgttaagaaaaagaaagaagagggtgttattgattcatctgacaaagaaatcgttgctgaagcagaaagactggatgtaaaagccatgggccctcttgttctaactgaagttctttttaatgagaagattagagaacagattaagaaatacaggcgccatttcctacgattttgtcacaacaacaaaaaagcccaacggtaccttcttcatggtttggagtgtgtggtagcaatgcatcaagctcagcttatctccaagattccacatatcttgaaggagatgtacgatgcagaccttttagaagaagaggtcatcatcagctggtcggaaaaggcctctaagaaatatgtctccaaagaacttgccaaagagattcgtgtcaaagcagaaccatttataaaatggttgaaggaggcagaggaagaatcttctggtggcgaagaagaagatgaagatgagaacattgaggtggtgtattcgaaggctgccagtgtaccgaaagttgagactgtaaagtcagacaacaaggatgacgacatcgatattgatgccatttaaagggatggatgcaacctagcttaacagtataatgctgcaaattttcctccattatcagccagaagtgcaacatgtatgtgcaaaagctaaaatggcttaacatcatgctacactttacactaaaaatctattactgtgagtggtctgttattaagcccaatgagacatctagggagtccatacacatcagtgagcagatgtagtttgcttatttatagcatgtttctttttgaaaaactagtggtggacacatttggatcacatttatacagttataaaaataaaggtttgattttggtcgttcttcagatgtttggctctgaatgacttaagctgaagtaactggctccttactttaaatgttctgccatcatttcacctgatgagcattcttggagcctgccagatattgttaggtcctggggctgcaaagaggtcctcaacaggatgtaaagcaaacttaattgtaattaatttattcagcccattaagaaagtactaaagttttatctctgtagttcctcaaattggcatctggtaatgtacattgtgaggtagactgataatgaaatgacagtgtaacatcttaaccaagaagtaaatatgacctcagtgtcctataaataatgtaagagcaggatttgaaacttggagagctgttttctcatttcatgtacacttgccccaaattgtctttgaagtcgtgtgcattgcacgttggatgagccagggaaattattacattaacaagcattttgtgtgtacgtagtagttactttgtactgagagaacttgctttggggtgcaattaataaactgattttatttgggagaaacaaggaagggtgcacttaactagcaacctaagcatgatttttcagcttttgcccttagggtttaaattacaattccaaaatgttagacatactgtattttttcgttcagtgtggctttaattttcccctcttgcagtttgttctgtaatgccttttacatttggacacatagtttatgctttttagattttggttgctttcttgccaaaataagtgttaactgtgtttcaaacttgattttctttcctttttcttttttttttcttccagaatgtcttatttaaaaagaaagctaaaagcatacttctaagtcagagcctctattttggtgtaagacttgggatattttttacttcacattgaatatagccaggcacccaagaagtctgatggccacctgagtgcaggtgacaaggacctgacagagcccatgcagggctttagatttggacacacaagagttgataacttcctcatgaactccttgcctgatctaaactcatattatgggttctgactgtttgagtaatcatcttcaaggttaaacctcttggcagttacccttttcacaaagtgcacagtgggaatcgagaatcgatagggttaattttggagcagtggcttataccattcacctctgtttttttgtgattatttcacagataatgagaccttaataacaaataggcgtaaaaaaattttcacattgaaatgatagaaacatttgatgtaataaaacttggttggcttga

SEQ ID NO: 131365 - DNA, 583 bp, Homo sapiens
  Payload ID: 5637
  Gene Symbol: EIF5
  Gene Name: eukaryotic translation initiation factor 5
  ENST ID: ENST00000559130
  CDS Start-End: 378-583
gtgtcgcttcccggctgtgcaccctccggggccgccggctctcgggggacgcgctggggatggggccagacgccccggtcgcgcgcccccctccttcgcggagctgcccggttcgccagcccccgcggaaacgcctcggagcgcggtagccatggggaccagggcgaagagctgttgcgcagccattggtacctgtattggggaaacatagcatacaagcaagaagcttacagcctcagtggcgaaaattttttcatgtcagagaccgagaactcttgcagtcgtttatgtcatcccttcttctccagacagaagataccaaaaagttgcaatcaaagatctcttcatcttattgataaagccactaataagccaaaatgtctgtcaatgtcaaccgcagcgtgtcagaccagttctatcgctacaagatgccccgtctgattgccaaggttgagggcaaaggcaatggaatcaagacagttatagtcaacatggttgacgttgcaaaggcgcttaatcggcctccaacgtatcccaccaaatattttggttgtgagctgggagcacagacccagtttgatgt

SEQ ID NO: 131366 - DNA, 723 bp, Homo sapiens
  Payload ID: 5637
  Gene Symbol: EIF5
  Gene Name:: eukaryotic translation initiation factor 5
  ENST ID: ENST00000560763
  CDS Start-End: 570-723
agtcagagcgagaacattccagaggtgagtccggtgaaggggcggccccctgcccggtgcttcccgccccctcgacccctcgggccgctggctggcggggaaggtgcactccccgaccgcccacggctcacggcgccgtctctccgcgccaggtcgcccagctccggcgctgacgggtgtggaccgcggacgtcgctgggacagcccctccccgctgctcggcggcggcacctggcccggccgctcctcgctgcgcttcgcctccgcctcctcggactcggactcgggtttatatcgcgcctcacttcatcccagtcccgggcgagcagcgttgggtttatgtctttatttgacgaaaacgagctgttgcgcagccattggtacctgtattggggaaacatagcatacaagcaagaagcttacagcctcagtggcgaaaattttttcatgtcagagaccgagaactcttgcagtcgtttatgtcatcccttcttctccagacagaagataccaaaaagttgcaatcaaagatctcttcatcttattgataaagccactaataagccaaaatgtctgtcaatgtcaaccgcagcgtgtcagaccagttctatcgctacaagatgccccgtctgattgccaaggttgagggcaaaggcaatggaatcaagacagttatagtcaacatggttgacgttgcaaaggcgcttaatcggcctccaacgt

SEQ ID NO: 131367 - DNA, 569 bp, Homo sapiens
  Payload ID: 5637
  Gene Symbol: EIF5
  Gene Name: eukaryotic translation initiation factor 5
  ENST ID: ENST00000561325
  CDS Start-End: 243-569
gctcgggctgactcaggcttcagctgctgcatttagctgttgcgcagccattggtacctgtattggggaaacatagcatacaagcaagaagcttacagcctcagtggcgaaaattttttcatgtcagagaccgagaactcttgcagtcgtttatgtcatcccttcttctccagacagaagataccaaaaagttgcaatcaaagatctcttcatcttattgataaagccactaataagccaaaatgtctgtcaatgtcaaccgcagcgtgtcagaccagttctatcgctacaagatgccccgtctgattgccaaggttgagggcaaaggcaatggaatcaagacagttatagtcaacatggttgacgttgcaaaggcgcttaatcggcctccaacgtatcccaccaaatattttggttgtgagctgggagcacagacccagtttgatgttaagaatgaccgttacattgtcaatggatctcatgaggcgaataagctgcaagacatgttggatggattcattaaaaaatttgttctctgtcctgaatgtgagaatcctgaaacagatttg

SEQ ID NO: 131368 - DNA, 719 bp, Homo sapiens
  Payload ID: 5637
  Gene Symbol: EIF5
  Gene Name: eukaryotic translation initiation factor 5
  ENST ID: ENST00000558316
  CDS Start-End: 281-719
aggtcgcccagctccggcgctgacgggtgtggaccgcggacgtcgctgggacagcccctccccgctgctcggcggcggcacctggcccggccgctcctcgctgcgcttcgcctccgcctcctcggactcggactcgggtttatatcgcgcctcacttcatcccagtcccgggcgagcagcgttgggtttatgtctttatttgacgaaaacgacagaagataccaaaaagttgcaatcaaagatctcttcatcttattgataaagccactaataagccaaaatgtctgtcaatgtcaaccgcagcgtgtcagaccagttctatcgctacaagatgccccgtctgattgccaaggttgagggcaaaggcaatggaatcaagacagttatagtcaacatggttgacgttgcaaaggcgcttaatcggcctccaacgtatcccaccaaatattttggttgtgagctgggagcacagacccagtttgatgttaagaatgaccgttacattgtcaatggatctcatgaggcgaataagctgcaagacatgttggatggattcattaaaaaatttgttctctgtcctgaatgtgagaatcctgaaacagatttgcatgtcaatccaaagaagcaaacaataggtaattcttgtaaagcctgtggctatcgaggcatgcttgacacacatcataaactctgcacattcattctcaaaaacccacctg

SEQ ID NO: 131369 - DNA, 678 bp, Homo sapiens
  Payload ID: 5637
  Gene Symbol: EIF5
  Gene Name: eukaryotic translation initiation factor 5
  ENST ID: ENST00000559532
  CDS Start-End: 352-678
gtcgcttcccggctgtgcaccctccggggccgccggctctcgggggacgcgctggggatggggccagacgccccggtcgcgcgcccccctccttcgcggagctgcccggttcgccagcccccgcggaaacgcctcggagcgcgagctgttgcgcagccattggtacctgtattggggaaacatagcatacaagcaagaagcttacagcctcagtggcgaaaattttttcatgtcagagaccgagaactcttgcagtcgtttatgtcatcccttcttctccagacagaagataccaaaaagttgcaatcaaagatctcttcatcttattgataaagccactaataagccaaaatgtctgtcaatgtcaaccgcagcgtgtcagaccagttctatcgctacaagatgccccgtctgattgccaaggttgagggcaaaggcaatggaatcaagacagttatagtcaacatggttgacgttgcaaaggcgcttaatcggcctccaacgtatcccaccaaatattttggttgtgagctgggagcacagacccagtttgatgttaagaatgaccgttacattgtcaatggatctcatgaggcgaataagctgcaagacatgttggatggattcattaaaaaatttgttctctgtcctgaatgtgagaatcctgaaacagatttg

SEQ ID NO: 131370 - DNA, 580 bp, Homo sapiens
  Payload ID: 5637
  Gene Symbol: EIF5
  Gene Name: eukaryotic translation initiation factor 5
  ENST ID: ENST00000560338
  CDS Start-End: 278-580
gacgctggggccgagggtagcttgagcgcggcggcggcgttgttcagtcagagcgagaacattccagagagctgttgcgcagccattggtacctgtattggggaaacatagcatacaagcaagaagcttacagcctcagtggcgaaaattttttcatgtcagagaccgagaactcttgcagtcgtttatgtcatcccttcttctccagacagaagataccaaaaagttgcaatcaaagatctcttcatcttattgataaagccactaataagccaaaatgtctgtcaatgtcaaccgcagcgtgtcagaccagttctatcgctacaagatgccccgtctgattgccaaggttgagggcaaaggcaatggaatcaagacagttatagtcaacatggttgacgttgcaaaggcgcttaatcggcctccaacgtatcccaccaaatattttggttgtgagctgggagcacagacccagtttgatgttaagaatgaccgttacattgtcaatggatctcatgaggcgaataagctgcaagacatgttggatggattcattaaaaaatttgttctctgtcctgaa

SEQ ID NO: 131371 - DNA, 4384 bp, Homo sapiens
  Payload ID: 5637
  Gene Symbol: EIF5
  Gene Name: eukaryotic translation initiation factor 5
  Uniprot ID: P55010
  ENST ID: ENST00000558506
  CDS Start-End: 913-2208
ggggatggggccagacgccccggtcgcgcgcccccctccttcgcggagctgcccggttcgccagcccccgcggaaacgcctcggagcgcggtagccatggggaccagggcgaaggttaaccgagtatttgaatagcgaggaaaagggaggccggggcgagcctggcgttcgctcgcgctctcttgcttaatggcaaattgtgggcgagcgctgcgtttaaggaagtgctgctttgaagtaagccatggttgccgaagcaacgattagttgtagagaacagttccctaggttgcccttaaaaatgaagacgaacgggggtgtgcctgagaagtttgcttatccaggcggggtgggcggcggagagggctcgggttcgttcttcagcacttccaggatggccgcagaggcaaacctgctgattgccctcggtctgatggaatctcacggcggctgaggcagcacagcttgtgttttcttgtcaggcatttccctaccagtcacagcttagtcgaaatggaggcctttttatgttcccgcagattgtactgtgttacatgagaatggctgtttgcatgtgatctcagatgctttttaaggtggagttaagcagaagcataactaggatgtaaaaaggaggcgtttccatccagcgatgatgttaaacctggggggatttttgtgtgttctttccctttttctttcagagctgttgcgcagccattggtacctgtattggggaaacatagcatacaagcaagaagcttacagcctcagtggcgaaaattttttcatgtcagagaccgagaactcttgcagtcgtttatgtcatcccttcttctccagacagaagataccaaaaagttgcaatcaaagatctcttcatcttattgataaagccactaataagccaaaatgtctgtcaatgtcaaccgcagcgtgtcagaccagttctatcgctacaagatgccccgtctgattgccaaggttgagggcaaaggcaatggaatcaagacagttatagtcaacatggttgacgttgcaaaggcgcttaatcggcctccaacgtatcccaccaaatattttggttgtgagctgggagcacagacccagtttgatgttaagaatgaccgttacattgtcaatggatctcatgaggcgaataagctgcaagacatgttggatggattcattaaaaaatttgttctctgtcctgaatgtgagaatcctgaaacagatttgcatgtcaatccaaagaagcaaacaataggtaattcttgtaaagcctgtggctatcgaggcatgcttgacacacatcataaactctgcacattcattctcaaaaacccacctgagaatagtgacagtggtacaggaaagaaagaaaaagaaaagaaaaacagaaagggcaaagacaaggaaaatggctccgtatccagcagtgagacaccaccaccaccaccaccaccaaatgaaattaatcctcctccacatacaatggaagaagaggaggatgatgactggggagaagatacaactgaggaagctcaaaggcgtcgaatggatgaaatcagtgaccatgcaaaagttctgacactcagtgatgatttggaaagaacaattgaggagagggtcaatatcctctttgattttgttaagaaaaagaaagaagagggtgttattgattcatctgacaaagaaatcgttgctgaagcagaaagactggatgtaaaagccatgggccctcttgttctaactgaagttctttttaatgagaagattagagaacagattaagaaatacaggcgccatttcctacgattttgtcacaacaacaaaaaagcccaacggtaccttcttcatggtttggagtgtgtggtagcaatgcatcaagctcagcttatctccaagattccacatatcttgaaggagatgtacgatgcagaccttttagaagaagaggtcatcatcagctggtcggaaaaggcctctaagaaatatgtctccaaagaacttgccaaagagattcgtgtcaaagcagaaccatttataaaatggttgaaggaggcagaggaagaatcttctggtggcgaagaagaagatgaagatgagaacattgaggtggtgtattcgaaggctgccagtgtaccgaaagttgagactgtaaagtcagacaacaaggatgacgacatcgatattgatgccatttaaagggatggatgcaacctagcttaacagtataatgctgcaaattttcctccattatcagccagaagtgcaacatgtatgtgcaaaagctaaaatggcttaacatcatgctacactttacactaaaaatctattactgtgagtggtctgttattaagcccaatgagacatctagggagtccatacacatcagtgagcagatgtagtttgcttatttatagcatgtttctttttgaaaaactagtggtggacacatttggatcacatttatacagttataaaaataaaggtttgattttggtcgttcttcagatgtttggctctgaatgacttaagctgaagtaactggctccttactttaaatgttctgccatcatttcacctgatgagcattcttggagcctgccagatattgttaggtcctggggctgcaaagaggtcctcaacaggatgtaaagcaaacttaattgtaattaatttattcagcccattaagaaagtactaaagttttatctctgtagttcctcaaattggcatctggtaatgtacattgtgaggtagactgataatgaaatgacagtgtaacatcttaaccaagaagtaaatatgacctcagtgtcctataaataatgtaagagcaggatttgaaacttggagagctgttttctcatttcatgtacacttgccccaaattgtctttgaagtcgtgtgcattgcacgttggatgagccagggaaattattacattaacaagcattttgtgtgtacgtagtagttactttgtactgagagaacttgctttggggtgcaattaataaactgattttatttgggagaaacaaggaagggtgcacttaactagcaacctaagcatgatttttcagcttttgcccttagggtttaaattacaattccaaaatgttagacatactgtattttttcgttcagtgtggctttaattttcccctcttgcagtttgttctgtaatgccttttacatttggacacatagtttatgctttttagattttggttgctttcttgccaaaataagtgttaactgtgtttcaaacttgattttctttcctttttcttttttttttcttccagaatgtcttatttaaaaagaaagctaaaagcatacttctaagtcagagcctctattttggtgtaagacttgggatattttttacttcacattgaatatagccaggcacccaagaagtctgatggccacctgagtgcaggtgacaaggacctgacagagcccatgcagggctttagatttggacacacaagagttgataacttcctcatgaactccttgcctgatctaaactcatattatgggttctgactgtttgagtaatcatcttcaaggttaaacctcttggcagttacccttttcacaaagtgcacagtgggaatcgagaatcgatagggttaattttggagcagtggcttataccattcacctctgtttttttgtgattatttcacagataatgagaccttaataacaaataggcgtaaaaaaattttcacattgaaatgatagaaacatttgatgtaataaaacttggttggcttgatattttaaggaattgaaacctagcaatcttattggagagacaagaattggtctccagctgcctttgatcaagattcgggtgcaagtggagcaggagccatatacctggagggaatgtgctttgtcacaccaaagaggatttttttttcttcaaacttgtatgttgcctaggtttcaaattctttgccgcaaggctgatctgctttcattaactggaattctgtaggagatactggtgacctaagctaagttgcactcagcatactcagtgtcaagctaatgaggttctattataaaggttctacttttaatctgagggaaaacatgttcagggcttctagaacactaaaaaatttggcttaaaccagtgttcagtctggtgccaaacttcgaatggaatacaaattcacataatctgaactttgttcacaggttatcctaatagagtaattcttcactttgctctattgaactgtcttaaggatttgtttaaacagctaagttacttgattaaaataatgataaaattgtattttgtctttgctttaatattaaagttaacaagttttcattttataatgagatcaaa

SEQ ID NO: 131372 - DNA, 872 bp, Homo sapiens
  Payload ID: 5637
  Gene Symbol: EIF5
  Gene Name: eukaryotic translation initiation factor 5
  ENST ID: ENST00000558265
  CDS Start-End: 272-872
gcccagctccggcgctgacgggtgtggaccgcggacgtcgctgggacagcccctccccgctgctcggcggcggcacctggcccggccgctcctcgctgcgcttcgcctccgcctcctcggactcggactcgggtttatatcgcgcctcacttcatcccagtcccgggcgagcagcgttgggtttatgtctttatttgacgaaaacgaagataccaaaaagttgcaatcaaagatctcttcatcttattgataaagccactaataagccaaaatgtctgtcaatgtcaaccgcagcgtgtcagaccagttctatcgctacaagatgccccgtctgattgccaaggttgagggcaaaggcaatggaatcaagacagttatagtcaacatggttgacgttgcaaaggcgcttaatcggcctccaacgtatcccaccaaatattttggttgtgagctgggagcacagacccagtttgatgttaagaatgaccgttacattgtcaatggatctcatgaggcgaataagctgcaagacatgttggatggattcattaaaaaatttgttctctgtcctgaatgtgagaatcctgaaacagatttgcatgtcaatccaaagaagcaaacaataggtaattcttgtaaagcctgtggctatcgaggcatgcttgacacacatcataaactctgcacattcattctcaaaaacccacctgagaatagtgacagtggtacaggaaagaaagaaaaagaaaagaaaaacagaaagggcaaagacaaggaaaatggctccgtatccagcagtgagacaccaccaccaccaccaccaccaaatgaaattaatcctcctccacatacaatggaagaagaggaggatg

SEQ ID NO: 131373 - DNA, 1256 bp, Homo sapiens
  Payload ID: 5638
  Gene Symbol: EIF5A
  Gene Name: eukaryotic translation initiation factor 5A
  Uniprot ID: P63241
  ENST ID: ENST00000336452
  CDS Start-End: 49-603
accacactagcgcgctagaagagtggggcggaaagacatctcccgcgcatgtgtggaactggggggactgattccaagacaaggcgcccaccccacagagcaagttttctgaaacgtttggaatcgaagcctcttaaaatggcagatgacttggacttcgagacaggagatgcaggggcctcagccaccttcccaatgcagtgctcagcattacgtaagaatggctttgtggtgctcaaaggccggccatgtaagatcgtcgagatgtctacttcgaagactggcaagcacggccacgccaaggtccatctggttggtattgacatctttactgggaagaaatatgaagatatctgcccgtcaactcataatatggatgtccccaacatcaaaaggaatgacttccagctgattggcatccaggatgggtacctatcactgctccaggacagcggggaggtacgagaggaccttcgtctccctgagggagaccttggcaaggagattgagcagaagtacgactgtggagaagagatcctgatcacggtgctgtctgccatgacagaggaggcagctgttgcaatcaaggccatggcaaaataactggctcccagggtggcggtggtggcagcagtgatcctctgaacctgcagaggccccctccccgagcctggcctggctctggcccggtcctaagctggactcctcctacacaatttatttgacgttttattttggttttccccaccccctcaatctgtcggggagcccctgcccttcacctagctcccttggccaggagcgagcgaagctgtggccttggtgaagctgccctcctcttctcccctcacactacagccctggtgggggagaagggggtgggtgctgcttgtggtttagtcttttttttttttttttttttaattcaatctggaatcagaaagcggtggattctggcaaatggtccttgtgccctccccactcatccctggtctggtcccctgttgcctatagccctttaccctgagcaccaccccaacagactggggaccagccccctcgcctgcctgtgtctctccccaaacccctttagatggggagggaagaggaggagaggggaggggacctgccccctcctcaggcatctgggagggccctgcccccatgggctttacccttccctgcgggctctctccccgacacatttgttaaaatcaaacctgaataaaactacaagtttaatatgaagcccccaa

SEQ ID NO: 131374 - DNA, 1511 bp, Homo sapiens
  Payload ID: 5638
  Gene Symbol: EIF5A
  Gene Name: eukaryotic translation initiation factor 5A
  Uniprot ID: P63241
  ENST ID: ENST00000336458
  CDS Start-End: 402-866
gggagggaagatgaggttgaagagattaaaaaaccgggtgcgcctgcgcgttgcagattagttgaaaacgctcagggtttgtgaggggcggggtcacgtatgcgcgtcattggacgggtcggtgggagggagggtggagatgggtagggtgtgtgcgcttgcgcagtgcgggggtggagggcggaggagatagatagcacgcttgcgcggctgtcatagggctgcttggttggtcagtggggagtcggcgcctgcgtactaagacccgtgtgcagcagcggcggcggcggtagaggcggcggcggcggcggcagcgggctcggaggcagcggttgggctcgcggcgagcggacggggtcgagtcagtgcgttcgcgcgagttggaatcgaagcctcttaaaatggcagatgacttggacttcgagacaggagatgcaggggcctcagccaccttcccaatgcagtgctcagcattacgtaagaatggctttgtggtgctcaaaggccggccatgtaagatcgtcgagatgtctacttcgaagactggcaagcacggccacgccaaggtccatctggttggtattgacatctttactgggaagaaatatgaagatatctgcccgtcaactcataatatggatgtccccaacatcaaaaggaatgacttccagctgattggcatccaggatgggtacctatcactgctccaggacagcggggaggtacgagaggaccttcgtctccctgagggagaccttggcaaggagattgagcagaagtacgactgtggagaagagatcctgatcacggtgctgtctgccatgacagaggaggcagctgttgcaatcaaggccatggcaaaataactggctcccagggtggcggtggtggcagcagtgatcctctgaacctgcagaggccccctccccgagcctggcctggctctggcccggtcctaagctggactcctcctacacaatttatttgacgttttattttggttttccccaccccctcaatctgtcggggagcccctgcccttcacctagctcccttggccaggagcgagcgaagctgtggccttggtgaagctgccctcctcttctcccctcacactacagccctggtgggggagaagggggtgggtgctgcttgtggtttagtcttttttttttttttttttttaattcaatctggaatcagaaagcggtggattctggcaaatggtccttgtgccctccccactcatccctggtctggtcccctgttgcctatagccctttaccctgagcaccaccccaacagactggggaccagccccctcgcctgcctgtgtctctccccaaacccctttagatggggagggaagaggaggagaggggaggggacctgccccctcctcaggcatctgggagggccctgcccccatgggctttacccttccctgcgggctctctccccgacacatttgttaaaatcaaacctgaataaaactacaagtttaatatgaa

SEQ ID NO: 131375 - DNA, 1271 bp, Homo sapiens
  Payload ID: 5638
  Gene Symbol: EIF5A
  Gene Name: eukaryotic translation initiation factor 5A
  Uniprot ID: P63241
  ENST ID: ENST00000419711
  CDS Start-End: 162-626
gggggacggcgagccgcgaggcagccacgcgggagaggccgccaggcggccacgccggggcgagggccaggggccagatcggcccaccggggcaagggtacctgggccgttgaggacccggctcagcgcggccacgtgagttggaatcgaagcctcttaaaatggcagatgacttggacttcgagacaggagatgcaggggcctcagccaccttcccaatgcagtgctcagcattacgtaagaatggctttgtggtgctcaaaggccggccatgtaagatcgtcgagatgtctacttcgaagactggcaagcacggccacgccaaggtccatctggttggtattgacatctttactgggaagaaatatgaagatatctgcccgtcaactcataatatggatgtccccaacatcaaaaggaatgacttccagctgattggcatccaggatgggtacctatcactgctccaggacagcggggaggtacgagaggaccttcgtctccctgagggagaccttggcaaggagattgagcagaagtacgactgtggagaagagatcctgatcacggtgctgtctgccatgacagaggaggcagctgttgcaatcaaggccatggcaaaataactggctcccagggtggcggtggtggcagcagtgatcctctgaacctgcagaggccccctccccgagcctggcctggctctggcccggtcctaagctggactcctcctacacaatttatttgacgttttattttggttttccccaccccctcaatctgtcggggagcccctgcccttcacctagctcccttggccaggagcgagcgaagctgtggccttggtgaagctgccctcctcttctcccctcacactacagccctggtgggggagaagggggtgggtgctgcttgtggtttagtcttttttttttttttttttttaattcaatctggaatcagaaagcggtggattctggcaaatggtccttgtgccctccccactcatccctggtctggtcccctgttgcctatagccctttaccctgagcaccaccccaacagactggggaccagccccctcgcctgcctgtgtctctccccaaacccctttagatggggagggaagaggaggagaggggaggggacctgccccctcctcaggcatctgggagggccctgcccccatgggctttacccttccctgcgggctctctccccgacacatttgttaaaatcaaacctgaataaaactacaagtttaatatgaa

SEQ ID NO: 131376 - DNA, 1336 bp, Homo sapiens
  Payload ID: 5638
  Gene Symbol: EIF5A
  Gene Name: eukaryotic translation initiation factor 5A
  Uniprot ID: P63241
  ENST ID: ENST00000416016
  CDS Start-End: 227-691
gcaggagccggcagcccctagcgcggggagctagtcctcgcgggggttccgagggggcctgagattttgaggagtggaagccggaggctcgggtcctaatcaccccggagggcctgctgcaggcatatgttagcgcttcccaacctcaagggccccaggagctttcctgaaaaaccctcctgtgaagtgtggcggtcagccaggtttggaatcgaagcctcttaaaatggcagatgacttggacttcgagacaggagatgcaggggcctcagccaccttcccaatgcagtgctcagcattacgtaagaatggctttgtggtgctcaaaggccggccatgtaagatcgtcgagatgtctacttcgaagactggcaagcacggccacgccaaggtccatctggttggtattgacatctttactgggaagaaatatgaagatatctgcccgtcaactcataatatggatgtccccaacatcaaaaggaatgacttccagctgattggcatccaggatgggtacctatcactgctccaggacagcggggaggtacgagaggaccttcgtctccctgagggagaccttggcaaggagattgagcagaagtacgactgtggagaagagatcctgatcacggtgctgtctgccatgacagaggaggcagctgttgcaatcaaggccatggcaaaataactggctcccagggtggcggtggtggcagcagtgatcctctgaacctgcagaggccccctccccgagcctggcctggctctggcccggtcctaagctggactcctcctacacaatttatttgacgttttattttggttttccccaccccctcaatctgtcggggagcccctgcccttcacctagctcccttggccaggagcgagcgaagctgtggccttggtgaagctgccctcctcttctcccctcacactacagccctggtgggggagaagggggtgggtgctgcttgtggtttagtcttttttttttttttttttttaattcaatctggaatcagaaagcggtggattctggcaaatggtccttgtgccctccccactcatccctggtctggtcccctgttgcctatagccctttaccctgagcaccaccccaacagactggggaccagccccctcgcctgcctgtgtctctccccaaacccctttagatggggagggaagaggaggagaggggaggggacctgccccctcctcaggcatctgggagggccctgcccccatgggctttacccttccctgcgggctctctccccgacacatttgttaaaatcaaacctgaataaaactacaagtttaatatgaa

SEQ ID NO: 131377 - DNA, 1366 bp, Homo sapiens
  Payload ID: 5638
  Gene Symbol: EIF5A
  Gene Name: eukaryotic translation initiation factor 5A
  Uniprot ID: P63241
  ENST ID: ENST00000571955
  CDS Start-End: 257-721
gggggacggcgagccgcgaggcagccacgcgggagaggccgccaggcggccacgccggggcgagggccaggggccagatcggcccaccggggcaagggtacctgggccgttgaggacccggctcagcgcggccacgtgagggcctgctgcaggcatatgttagcgcttcccaacctcaagggccccaggagctttcctgaaaaaccctcctgtgaagtgtggcggtcagccaggtttggaatcgaagcctcttaaaatggcagatgacttggacttcgagacaggagatgcaggggcctcagccaccttcccaatgcagtgctcagcattacgtaagaatggctttgtggtgctcaaaggccggccatgtaagatcgtcgagatgtctacttcgaagactggcaagcacggccacgccaaggtccatctggttggtattgacatctttactgggaagaaatatgaagatatctgcccgtcaactcataatatggatgtccccaacatcaaaaggaatgacttccagctgattggcatccaggatgggtacctatcactgctccaggacagcggggaggtacgagaggaccttcgtctccctgagggagaccttggcaaggagattgagcagaagtacgactgtggagaagagatcctgatcacggtgctgtctgccatgacagaggaggcagctgttgcaatcaaggccatggcaaaataactggctcccagggtggcggtggtggcagcagtgatcctctgaacctgcagaggccccctccccgagcctggcctggctctggcccggtcctaagctggactcctcctacacaatttatttgacgttttattttggttttccccaccccctcaatctgtcggggagcccctgcccttcacctagctcccttggccaggagcgagcgaagctgtggccttggtgaagctgccctcctcttctcccctcacactacagccctggtgggggagaagggggtgggtgctgcttgtggtttagtcttttttttttttttttttttaattcaatctggaatcagaaagcggtggattctggcaaatggtccttgtgccctccccactcatccctggtctggtcccctgttgcctatagccctttaccctgagcaccaccccaacagactggggaccagccccctcgcctgcctgtgtctctccccaaacccctttagatggggagggaagaggaggagaggggaggggacctgccccctcctcaggcatctgggagggccctgcccccatgggctttacccttccctgcgggctctctccccgacacatttgttaaaatcaaacctgaataaaactacaagtttaatatgaa

SEQ ID NO: 131378 - DNA, 1439 bp, Homo sapiens
  Payload ID: 5638
  Gene Symbol: EIF5A
  Gene Name: eukaryotic translation initiation factor 5A
  Uniprot ID: P63241
  ENST ID: ENST00000576930
  CDS Start-End: 330-794
gcgggggtggagggcggaggagatagatagcacgcttgcgcggctgtcatagggctgcttggttggtcagtggggagtcggcgcctgcgtactaagacccgtgtgcagcagcggcggcggcggtagaggcggcggcggcggcggcagcgggctcggaggcagcggttgggctcgcggcgagcggacggggtcgagtcagtgcgttcgcgcgagggcctgctgcaggcatatgttagcgcttcccaacctcaagggccccaggagctttcctgaaaaaccctcctgtgaagtgtggcggtcagccaggtttggaatcgaagcctcttaaaatggcagatgacttggacttcgagacaggagatgcaggggcctcagccaccttcccaatgcagtgctcagcattacgtaagaatggctttgtggtgctcaaaggccggccatgtaagatcgtcgagatgtctacttcgaagactggcaagcacggccacgccaaggtccatctggttggtattgacatctttactgggaagaaatatgaagatatctgcccgtcaactcataatatggatgtccccaacatcaaaaggaatgacttccagctgattggcatccaggatgggtacctatcactgctccaggacagcggggaggtacgagaggaccttcgtctccctgagggagaccttggcaaggagattgagcagaagtacgactgtggagaagagatcctgatcacggtgctgtctgccatgacagaggaggcagctgttgcaatcaaggccatggcaaaataactggctcccagggtggcggtggtggcagcagtgatcctctgaacctgcagaggccccctccccgagcctggcctggctctggcccggtcctaagctggactcctcctacacaatttatttgacgttttattttggttttccccaccccctcaatctgtcggggagcccctgcccttcacctagctcccttggccaggagcgagcgaagctgtggccttggtgaagctgccctcctcttctcccctcacactacagccctggtgggggagaagggggtgggtgctgcttgtggtttagtcttttttttttttttttttttaattcaatctggaatcagaaagcggtggattctggcaaatggtccttgtgccctccccactcatccctggtctggtcccctgttgcctatagccctttaccctgagcaccaccccaacagactggggaccagccccctcgcctgcctgtgtctctccccaaacccctttagatggggagggaagaggaggagaggggaggggacctgccccctcctcaggcatctgggagggccctgcccccatgggctttacccttccctgcgggctctctccccgacacatttgttaaaatcaaacctgaataaaactacaagtttaatatgaa

SEQ ID NO: 131379 - DNA, 1089 bp, Homo sapiens
  Payload ID: 5638
  Gene Symbol: EIF5A
  Gene Name: eukaryotic translation initiation factor 5A
  Uniprot ID: P63241
  ENST ID: ENST00000573542
  CDS Start-End: 191-655
ttggtcagtggggagtcggcgcctgcgtactaagacccgtgtgcagcagcggcggcggcggtagaggcggcggcggcggcggcagcgggctcggaggcagcggttgggctcgcggcgagcggacggggtcgagtcagtgcgttcgcgcgagttctcttcttggctctagttggaatcgaagcctcttaaaatggcagatgacttggacttcgagacaggagatgcaggggcctcagccaccttcccaatgcagtgctcagcattacgtaagaatggctttgtggtgctcaaaggccggccatgtaagatcgtcgagatgtctacttcgaagactggcaagcacggccacgccaaggtccatctggttggtattgacatctttactgggaagaaatatgaagatatctgcccgtcaactcataatatggatgtccccaacatcaaaaggaatgacttccagctgattggcatccaggatgggtacctatcactgctccaggacagcggggaggtacgagaggaccttcgtctccctgagggagaccttggcaaggagattgagcagaagtacgactgtggagaagagatcctgatcacggtgctgtctgccatgacagaggaggcagctgttgcaatcaaggccatggcaaaataactggctcccagggtggcggtggtggcagcagtgatcctctgaacctgcagaggccccctccccgagcctggcctggctctggcccggtcctaagctggactcctcctacacaatttatttgacgttttattttggttttccccaccccctcaatctgtcggggagcccctgcccttcacctagctcccttggccaggagcgagcgaagctgtggccttggtgaagctgccctcctcttctcccctcacactacagccctggtgggggagaagggggtgggtgctgcttgtggtttagtcttttttttttttttttttttaattcaatctggaatcagaaagcggtggattctggcaaatggtccttgtgccctccccactcatccctggtctggtcccctgttgcctatagccctttaccctgagcaccacccc

SEQ ID NO: 131380 - DNA, 602 bp, Homo sapiens
  Payload ID: 5638
  Gene Symbol: EIF5A
  Gene Name: eukaryotic translation initiation factor 5A
  ENST ID: ENST00000573714
  CDS Start-End: 163-602
ggcagccacgcgggagaggccgccaggcggccacgccggggcgagggccaggggccagatcggcccaccggggcaagggtacctgggccgttgaggacccggctcagcgcggccacgtgaggtgggggagggggctattcgttggaatcgaagcctcttaaaatggcagatgacttggacttcgagacaggagatgcaggggcctcagccaccttcccaatgcagtgctcagcattacgtaagaatggctttgtggtgctcaaaggccggccatgtaagatcgtcgagatgtctacttcgaagactggcaagcacggccacgccaaggtccatctggttggtattgacatctttactgggaagaaatatgaagatatctgcccgtcaactcataatatggatgtccccaacatcaaaaggaatgacttccagctgattggcatccaggatgggtacctatcactgctccaggacagcggggaggtacgagaggaccttcgtctccctgagggagaccttggcaaggagattgagcagaagtacgactgtggagaagagatcctgatcacggtgctgtctgccatgacagaggaggcagctgt

SEQ ID NO: 131381 - DNA, 811 bp, Homo sapiens
  Payload ID: 5638
  Gene Symbol: EIF5A
  Gene Name: eukaryotic translation initiation factor 5A
  ENST ID: ENST00000572815
  CDS Start-End: 193-753
gctgtcatagggctgcttggttggtcagtggggagtcggcgcctgcgtactaagacccgtgtgcagcagcggcggcggcggtagaggcggcggcggcggcggcagcgggctcggaggcagcggttgggctcgcggcgagcggacggggtcgagtcagtgcgttcgcgcgagttggaatcgaagcctcttaaaatggcagatgacttggacttcgagacaggagatgcaggggcctcagccaccttcccaatgcagtgctcagcattacgtaagaatggctttgtggtgctcaaaggccggccatgtaagatcgtcgagatgtctacttcgaagactggcaagcacggccacgccaaggtccatctggttggtattgacatctttactgggaagaaatatgaagatatctgcccgtcaactcataatatggatgtccccaacatcaaaaggaatgacttccagctgattggcatccaggatgggtacctatcactgctccaggacagcggggaggtacgagaggaccttcgtctccctgagggagaccttggcaaggagattgagcagaagtacgactgtggagaagagatcctggtatggtgcctccctccctgcttctgtgctcagctttgttctgtacgtttcttcctgagctcagacatctcttggctatccctcttgcttctccagatcacggtgctgtctgccatgacagaggaggcagctgttgcaatcaaggccatggcaaaataactggctcccagggtggcggtggtggcagcagtgatcctctgaacctgcagaggccccc

SEQ ID NO: 131382 - DNA, 5593 bp, Homo sapiens
  Payload ID: 5639
  Gene Symbol: EIF5A2
  Gene Name: eukaryotic translation initiation factor 5A2
  Uniprot ID: Q9GZV4
  ENST ID: ENST00000295822
  CDS Start-End: 187-648
gggtaagggcggggaggctggggtgtggaaagtgtggcggccccgccccgtctcttggaactgccgcggccgccaccgccgctgccggcgccgctgctgtaggggaccagcgcgggtgcgcagacgaaaggcgctctttgccagctgaaagttcccacggaaaaactaccatctcccctgcccaccatggcagacgaaattgatttcactactggagatgccggggcttccagcacttaccctatgcagtgctcggccttgcgcaaaaacggcttcgtggtgctcaaaggacgaccatgcaaaatagtggagatgtcaacttccaaaactggaaagcatggtcatgccaaggttcaccttgttggaattgatattttcacgggcaaaaaatatgaagatatttgtccttctactcacaacatggatgttccaaatattaagagaaatgattatcaactgatatgcattcaagatggttacctttccctgctgacagaaactggtgaagttcgtgaggatcttaaactgccagaaggtgaactaggcaaagaaatagagggaaaatacaatgcaggtgaagatgtacaggtgtctgtcatgtgtgcaatgagtgaagaatatgctgtagccataaaaccctgcaaataaacggaaacatcaggcatgaacactgtttatgtctgaatcaactgcagatctaatttggttctaagttgtcaccaaagctatagccttcataagcaacctcatttctttttttaattgttttcagattgtgctgggttagttttgcaagcaattgataatttttaaaaaattatcaatatgtataattttttttgaattttgtagatatgtttcctataatattcctgtggttttcagtatgtcagtccaagaaacaaacaagatagcttcagcagatgtgatttgtctgagcaaatcattcctgtgttttagttagatgataaaccagggttttaaatcaaacaatgtagcataaagtggtattgaagtaccatatttaagttgaactgctctgcattaattacagatttaatataaaatgaactgattatatattggaattgttgcactttcagcctgtgtagggcaaacacaaatccttaaacaaaaatcatgttatcaaaaactgtcagttattttggtggccacatgcaaccatgtgattactttggtcatactatttaccaaattgttggcaaacttgatgtaaccttatatggtggttttagtcccttcttatggttggcagaagggcactgaactgttgggtgaaagttagttagcaagtaagattataaggaagacacaaaagacagtggcaaagagggttgattaaatctataagtttttatgtgaggactttgtaagtcagcataaaaatgaaaagttgtttctcagttgtttttgcttttaactttgcccccaacgtttaaagggagtgatctgctttacatgatactatgcaatgcttgttttccaactatgttgaataaatagtaatatttatcagtaaatactcctttccaacttccttttttttttttttttttttgagactgagtctcactccatcagccaggctggagtgcagtggtgcaatctcggctcactgcaacctctgcctcccgagttcaagcaattctcctgcctcagcctcccaagtagctgggactacaggtgcatgccaccacgcccagctacttttttgtgtattttagtagagatggggtttcaccatgttgtctaggctggtcttgaactcctgacctcaggtgatccacctgcctcagcctcccaaagtgctgggattacaggcatgagccaccacacccagcccctttccaaccatttctaagtagattttttgacattaatgtatttattaaacaaaaactgagaattccttaaattgatttggaatttttgttaattttatgtcctttttttcctaaagtgaattaaagtgaatcatggaagcagcattactttatatgaatattattatttaagttaagttattttaagtatatgcattttttctgattgttgtgtgacttaattcagttgctggtgtgaactataactagcaaataattctataaactgaattattttaaaaggtattttaggtgacaccactgcatttctatttcatcttttgagtcatatgtatattatttccagaattttagacattattacagggtttgtgaggacctttgactcagtgacaatcatcatattggagcaaaacatagaacaaaatcactatctcagaaataccttaattctctaagactggctcttagacctctcccatcatgccttgacctctaaaaagccctttgttcctatcttctaaaggaaagtatatcatatatgatgatgtaactgatctaatcagtgactggaaatagcattagtaacagaagatcccaagttttagttgcttaatttgtacacacttttaaatattgtcttagcctcggcaaaccaatttggggaagaagcaagatactttaagagaaatacaaaggaaatttctaaagcacaagaaatagtgaggtagtagttagtcgtctttcctacaacattttagcttttgcccatctaaagcacaattaaaattaggctacattctttccagtattctatttaagtacctactacatactgctctagtttcttagtactctgtaatgtgtatcttaattgctactggttggcattgtaactcataggaattccagaaaattattaatccgtgctgcttgcagttcattcatatggcccctcttaaccatgctggtgttatgattcagtattaactctcaattagcatgcccctgttcttcctaacttgtaaaatttcacataaatatattttcaattgtgtacaaattaagggtgtacaaattataataatgcatctctatcttcatactttgaatggcaaacgctatttatgcataaatattttcattttaagtaatatatgaagtgtaaatactcgatatataagtatagattttaaagatatgggactttattttcacataagtcaatagatgtttctctagaacaaaatatttagtaaagctttataaattatattaaaaggaagcggggaacatgtattttttaacatagaacagaagtgacttcattctttttagacatcagaaatgttaaagttgattcccaatatttgttgtacttttttgtagcaaatgttaaaaatcacgagttaccatgtatagaatgtggactgtcatgttgatatcattgtacagtgataagccatttttatctgtatacatttcaccaatttattaacaggttgaatatttgtttctttttagaacattttatttatactgtgaagactttgttataccttatttgctacaacatagatcatatcattgctactttgacttagcatttgcatcataaacataattatgatgtttttttcatgctcccttccaggggctcagtcacttgaagaaactgttgctaaccaagctcttgactctgtttcccttaatgatacaagtctctgtaccagcgctttatgttaattaccaaaactctcctgcatcagagcatgatatctataataggagatactgcaataaaatgattaggctgtaaaatttggagacacaatttttcattacaatgcaatttgcatgtgcacatgtgcgcacataactttatatgttagttcttttttccaaactcccaactcttaaaagtattgtagtctgttggtgcctcaactgttggtaactttttttttttaaatttacaactttccacaacttgtttttgtactttaaggtttctcaattagaatatttctagttgagctgtaatttgaatgcattgttctcagggctatttgtgctaaaagctgaaatttcattattttaaagctaattgcctgaaaatatattggcagaattttcccaaattgtaataactgtgatacatgcatataaaaaaatccttaatgtcaacacacttaaactacatgctaaatagtcaagaaaaaaatggaaacagtagcatccatactggaatcttgccatatttttttcattttagaatagattttggcagtctcatcttagaatcctatccttaggatacatctgaaagcattcctttggcatggaccccagagatagttttggagccaggcattgatgtagaggttcaccaaacatatttagggataatagataaattcataatgcttttttgggtacactgaaatgtttacatactgaattctgtaatatgaactaggaacgcatttactatgagaaaatatggctcttaagcagtgtaagagtgaaaatataagcatatttccattaacagtatattgtactgatcagcagctctcattttaacatcagttaggcataatatttcatagttttcaagccttttttttctgctaacattcagacaagtaacaggcaacaaagatttaagaaaaatttatggtggaaaaccttaaaaattgagacaattcaatctatttaatctattaaattttttctctgaattgggtatatggcatcattatttgattttagcagggaacatttggatttagcttatgaaacacagatgttctatgggaacatggcttgaagccaatatgtaatttaatgtttttccattaaacaaacatctgaacaccaacttagctaccaagtgaggtcaagtgcctgaaaagtactgtatacatctaataagcatgttttccttatgtaaaagatgcactttatggcaatgcataccaggctttcacctgctagaaacatacttgttgccaactttgccatctaccactattctcctccttagaacaggtagaaacctattttacaaaaaaaaaaaaaaaaaaaaaaagacaggttattgtatttatatgaagtccctaaaactgtttcttggtattgatagacttaagtttatcttagttcaagattgcactttttaaaaaactctggactattttcagcaatgaccgaacagcttgtcacacatcatagttgtgatcttttttgaggagttatttattgtggttaatatctactataaataagcattcttgtgcttgttacaaagcataatgcaaattactagttctatactagtataatgaaaatgactagttctatactgttatgtacttttgtcttcctccccaaaaaggaaacagtttagcattgtctaaattcagtggcacttttttagtaatacatttttttttcttagatacaggagaactattgcttttacctgcagaaactcaaatgttttcgctaaaactttaaaattctaaaatacgtagtatgggtattactaattgtacattttacatttcaaaaatagttaaaattcaaatgttaagtctttgacttaaaaaacctttaaatatagataataccttaacaattataactttgtgatattattaaaatatatttgtctgttaacttcatcagttgtattaaataaaaatagttaacagcttgcacta

SEQ ID NO: 131383 - DNA, 457 bp, Homo sapiens
  Payload ID: 5639
  Gene Symbol: EIF5A2
  Gene Name: eukaryotic translation initiation factor 5A2
  ENST ID: ENST00000474417
  CDS Start-End: 113-457
gccgctgctgtaggggaccagcgcgggtgcgcagacgaaaggcgctctttgccagctgaaagacgaaattgatttcactactggagatgccggggcttccagcacttaccctatgcagtgctcggccttgcgcaaaaacggcttcgtggtgctcaaaggacgaccatgcaaaatagtggagatgtcaacttccaaaactggaaagcatggtcatgccaaggttcaccttgttggaattgatattttcacgggcaaaaaatatgaagatatttgtccttctactcacaacatggatgttccaaatattaagagaaatgattatcaactgatatgcattcaagatggttacctttccctgctgacagaaactggtgaagttcgtgaggatcttaaactgccagaaggtgaactaggcaaagaaatagagggaaaatacaatgcaggtgaagatgtacag

SEQ ID NO: 131384 - DNA, 565 bp, Homo sapiens
  Payload ID: 5639
  Gene Symbol: EIF5A2
  Gene Name: eukaryotic translation initiation factor 5A2
  ENST ID: ENST00000487522
  CDS Start-End: 92-421
gctgtaggggaccagcgcgggtgcgcagacgaaaggcgctctttgccagctgaaagttcccacggaaaaactaccatctcccctgcccaccatggcagacgaaattgatttcactactggagatgccggggcttccagcacttaccctatgcagtgctcggccttgcgcaaaaacggcttcgtggtgctcaaaggacgaccatgcaaaatagtggagatgtcaacttccaaaactggaaagcatggtcatgccaaggttcaccttgttggaattgatattttcacgggcaaaaaatatgaagatatttgtccttctactcacaacatggatgttccaaatattaagagaaatgattatcaagtgtctgtcatgtgtgcaatgagtgaagaatatgctgtagccataaaaccctgcaaataaacggaaacatcaggcatgaacactgtttatgtctgaatcaactgcagatctaatttggttctaagttgtcaccaaagctatagccttcataagcaacctcatttctttttttaattgttttcagattgtgctgggttagttttg

SEQ ID NO: 131385 - DNA, 570 bp, Homo sapiens
  Payload ID: 5639
  Gene Symbol: EIF5A2
  Gene Name: eukaryotic translation initiation factor 5A2
  ENST ID: ENST00000474096
  CDS Start-End: 138-455
gtctcttggaactgccgcggccgccaccgccgctgccggcgccgctgctgtaggggaccagcgcgggtgcgcagacgaaaggcgctctttgccagctgaaagttcccacggaaaaactaccatctcccctgcccaccatggcagacgaaattgatttcactactggagatgccggggcttccagcacttaccctatgcagtgctcggccttgcgcaaaaacggcttcgtggtgctcaaaggacgaccatgcaaaatagtggagatgtcaacttccaaaactggaaagcatggtcatgccaaggttcaccttgttggaattgatattttcacgggcaaaaaatatgaagatatttgtccttctactcacaacatggatgttccaaatattaagagaaatgattatcaaaaactggtgaagttcgtgaggatcttaaactgccagaaggtgaactaggcaaagaaatagagggaaaatacaatgcaggtgaagatgtacaggtgtctgtcatgtgtgcaatgagtgaagaatatgctgtagccataaaaccctgcaaataaacggaaacatc

SEQ ID NO: 131386 - DNA, 3840 bp, Homo sapiens
  Payload ID: 5640
  Gene Symbol: EIF5AL1
  Gene Name: eukaryotic translation initiation factor 5A-like 1
  Uniprot ID: Q6IS14
  ENST ID: ENST00000520547
  CDS Start-End: 50-514
ggggtcgagtcagtgccgtttgcgccagttggaatcgaagcctcttaaaatggcagatgatttggacttcgagacaggagatgcaggggcctcagccaccttcccaatgcagtgctcagcattacgtaagaatggctttgtggtgctcaaaggctggccatgtaagatcgtggagatgtctgcttcgaagactggcaagcacggccacgccaaggtccatctggttggtattgacatctttactgggaagaaatatgaagatatctgcccgtcaactcataatatggatgtccccaacatcaaaaggaatgacttccagctgattggcatccaggatgggtacctatcactgctccaggacagcggggaggtaccagaggaccttcgtctccctgagggagaccttggcaaggagattgagcagaagtacgactgtggagaagagatcctgatcacggtgctgtctgccatgacagaggaggcagctgttgcaatcaaggccatggcaaaataactggctcccaaggtggcagtggtggcagcagtgatcctccgaacctgcagaggccccctcccccagcctggcctggctctggcctggtcctaggttggactcctcctacacaatttatttgacgttttattttggttttccccaccccctcaatctgtcagggagcccctgcccttcacctagctcccttggccaggagcgagcgaagccatggccttggtgaagctgccctcctcttctcccctcacactacagccctggtgggggagaagggggtgggtgctgcttgtggtttagtcttttttttttttttaaattcaatctggaatcagaaagcggtggattctggcaaatggtccttgtgccctccccactcatccttggtctggtcccctgttgcccatagccctttaccctgagcaccacccaacagactggggaccagccccctcgcctgcctgtgtctctccccaaacccctttagatggggagggaagaagaggagaggggaggggacctgccccctcctcaggcatctgggaagggcctgcccccatgggctttacccttccctgcgggctctctccccgacacatttgttaaaatcaaacctgaataaaactacaagtttaatatgaaaaaaaaaaaaaaagaaagaaagacgtgtaaaatgccaagaactctaggaaacagggacaaaaacacttcaaagagaaagttcatgcacttgtttctgaccacccagggcacccttcagcacacgctgtctggagtggcctgaagcaaggagtgtcttgtgaggtgcagaggatgcaatgggagcagggtcctgtccccaccctaaaggagttcacagtttaacgcaaatgagaagccagtgaggacatcactactcctgctgtgaacttgggaactagaaacacaaaacctgagtctggagggaagctaaggaagcattctgctctggagtagacatgagtgcgtgtgaagcttctgatctcccatgagagcaatggggacatggggcagaatctaaaacccatgactgaaagcaccaaattgctaaaatggcaataaagagacatgaggccaagatggagaagaaggaacccaggacgagggtcagcctcacatttggggctcatttccctcagtttcctcactgaatttcagaagggactaactgagatgcaaagaagcagagcagcttttgcaccatgtggaggactagatggaaaacaagtagactgagggtctgctagtgaaggtgacccctactgaagtccactggctttggttgggacccagaagagtcacacgccaggaatagaggtggacaggaaacaccctgacttttgtagggactgaacctcactgataacctcaattgcggatggtatggagggtgtctaggtgtgctaggacccctgcccattccccagaaatagactcccatcttttctacagcaagataacgtgctagtaggcctcaattcattgctaaatatttttaacgagtgtcttacatttagccaaaaagactagtcatgtggcaggaaaaatacaatgtcatatgaccaaaagctaaaagactgtgaaaatgaatccagaggtgacccaagcattgaatttaacaatgccagtacctggacctccgcttgcccctaaaacattacaatcaagaatgtaggaagggaaaggaaacacgaagattaatcaagcaggaaggacaagctcagttttgcacccactgaatttgccacaaatattgtggaaaatattctcggggacattgcagttgtctactttggttggcacatggttcatacaacagtgtttgtgtcagtgaacatcttactcttcctcggcagtctttctttgcccagagatttcgcaatgactgttgaccttcatcatcaccttttggactttggcttgcactttagcttctgtagatctccatgatgtaaagaagtattttaggtccattttaattcctgcaaaggataaaatccttctatttgtgtgcatataagtggacctgagcccttggttagggtgtagagaggagaaggggagaaacctgagggccagaagctgttctttcccttaaaagggcaaactcatttccacactatggggactctgacagatagcataccttcctgtctatggctattggacctgcaggctttcccctgtaaatccgtgttctgtcattgacattttgtgactgtaagacagacttgagataagacatctagaaaacaataattgaacaatgatgtgaatatatttcacacaactgaactgtacatttcaacaaggttaagatggtaattatcacgttatacattttttaccgcaggttaaaatgtttcacaggttgaaaggaaagcaactaccttcagttctctgagttcaagaatttgtaacatttcaccccctgctccttcctgatcttctgtggagcatcttttttccatccatgctctactcagagcccactttcccttccctgacaccagcttcactgaggctggttggaacctaacacaaaacattctcagtaatgactgaattcccacaaagaattccatatagactgcatatgagttgaatcttctaagacatgaaatatttgttctcttcttggctaatatgcaatgcaaatcctgttgcagatgtacgtcatatacctctgaaattcctgatgtattcaatgaaataacatctttaaagttctgtgtagaatgttttttttctgatttcttcacatacgatagaaaaaaaaacccaaaaaaacatgtactaggatttcaatagaagcaatgggtgatctaaaaagatgaaagagcaaccgcatgcgccctacagctaccgctagattttatggggaaagcagctggcccagtttgcagctaggagaaatgtcaaacacatgaagaaatgagaagcaaagaaaaaccatgaggcatgaacatttcatggcaatcacgatgtcctggtttgtgagataatgggatagaggagtagaaaacaaggagaaagatgagaaggtacaaagtggttcaagtcaaacagctcaactgaacttttcttaatggaatatttaaaaagtggtacattaaaaaacttcccccagttcacatcaaaaattctctcttcaggactaagttgggtagagactgttcaatgtgcctagatatcttcagaacttatatattttctgttttctacgtatgttgaagggcagtgccaaatgatgtgtaattatctaggttgtaaaaataaaacatactcccccttcccttgaggataaaaaa

SEQ ID NO: 131387 - DNA, 5777 bp, Homo sapiens
  Payload ID: 5641
  Gene Symbol: EIF5B
  Gene Name: eukaryotic translation initiation factor 5B
  Uniprot ID: O60841
  ENST ID: ENST00000289371
  CDS Start-End: 203-3865
aggcggctgggcgatgcgcttgcgcactgagaactcacaccatatgtgtcctgttccagtgcgcgggtctgtggagagccgggtgcgagcggcggcagcacgaggggaaaagagctgagcggagaccaaagtcagccgggagacagtgggtctgtgagagaccgaatagaggggctggggccacgagcgccattgacaagcaatggggaagaaacagaaaaacaagagcgaagacagcaccaaggatgacattgatcttgatgccttggctgcagaaatagaaggagctggtgctgccaaagaacaggagcctcaaaagtcaaaagggaaaaagaaaaaagagaaaaaaaagcaggactttgatgaagatgatatcctgaaagaactggaagaattgtctttggaagctcaaggcatcaaagctgacagagaaactgttgcagtgaagccaacagaaaacaatgaagaggaattcacctcaaaagataaaaaaaagaaaggacagaagggcaaaaaacagagttttgatgataatgatagcgaagaattggaagataaagattcaaaatcaaaaaagactgcaaaaccgaaagtggaaatgtactctgggagtgatgatgatgatgattttaacaaacttcctaaaaaagctaaagggaaagctcaaaaatcaaataagaagtgggatgggtcagaggaggatgaggataacagtaaaaaaattaaagagcgttcaagaataaattcttctggtgaaagtggtgatgaatcagatgaatttttgcaatctagaaaaggacagaaaaaaaatcagaaaaacaagccaggtcctaacatagaaagtgggaatgaagatgatgacgcctccttcaaaattaagacagtggcccaaaagaaggcagaaaagaaggagcgcgagagaaaaaagcgagatgaagaaaaagcgaaactgcggaagctgaaagaaaaagaagagttagaaacaggtaaaaaggatcagagtaaacaaaaggaatctcaaaggaaatttgaagaagaaactgtaaaatccaaagtgactgttgatactggagtaattcctgcctctgaagagaaagcagagactcccacagctgcagaagatgacaatgaaggagacaaaaagaagaaagataagaagaaaaagaaaggagaaaaggaagaaaaagagaaagagaagaaaaaaggacctagcaaagccactgttaaagctatgcaagaagctctggctaagcttaaagaggaagaagaaagacagaagagagaagaggaagaacgtataaaacggcttgaagaattagaagccaagcgtaaagaagaggaacgattggaacaagaaaaaagagaaaggaaaaagcaaaaagaaaaagaaagaaaagaacgcttgaaaaaagaagggaaacttttaactaaatcccagagagaagccagagccagagccgaagctactcttaaactgctacaagctcagggtgttgaagtgccatcaaaagactctttgccaaagaagaggccaatttatgaagataaaaagaggaaaaaaataccacagcagctagaaagtaaagaagtgtctgaatcaatggaattatgtgctgctgtagaagttatggaacaaggagtaccagaaaaggaagagacaccacctcctgttgaaccagaagaagaagaagatactgaggatgctggattggatgattgggaagctatggccagtgatgaggagacagaaaaagtagaaggaaacaaagttcatatagaagtaaaagaaaaccctgaagaggaggaggaggaggaagaagaggaagaagaagatgaagaaagtgaagaagaggaggaagaggagggagaaagtgaaggcagtgaaggtgatgaggaagatgaaaaggtgtcagatgagaaggattcagggaagacattagataaaaagccaagtaaagaaatgagctcagattctgaatatgactctgatgatgatcggactaaagaagaaagggcttatgacaaagcaaaacggaggattgagaaacggcgacttgaacatagtaaaaatgtaaacaccgaaaagctaagagcccctattatctgcgtacttgggcatgtggacacagggaagacaaaaattctagataagctccgtcacacacatgtacaagatggtgaagcaggtggtatcacacaacaaattggggccaccaatgttcctcttgaagctattaatgaacagactaagatgattaaaaattttgatagagagaatgtacggattccaggaatgctaattattgatactcctgggcatgaatctttcagtaatctgagaaatagaggaagctctctttgtgacattgccattttagttgttgatattatgcatggtttggagccccagacaattgagtctatcaaccttctcaaatctaaaaaatgtcccttcattgttgcactcaataagattgataggttatatgattggaaaaagagtcctgactctgatgtggctgctactttaaagaagcagaaaaagaatacaaaagatgaatttgaggagcgagcaaaggctattattgtagaatttgcacagcagggtttgaatgctgctttgttttatgagaataaagatccccgcacttttgtgtctttggtacctacctctgcacatactggtgatggcatgggaagtctgatctaccttcttgtagagttaactcagaccatgttgagcaagagacttgcacactgtgaagagctgagagcacaggtgatggaggttaaagctctcccggggatgggcaccactatagatgtcatcttgatcaatgggcgtttgaaggaaggagatacaatcattgttcctggagtagaagggcccattgtaactcagattcgaggcctcctgttacctcctcctatgaaggaattacgagtgaagaaccagtatgaaaagcataaagaagtagaagcagctcagggggtaaagattcttggaaaagacctggagaaaacattggctggtttacccctccttgtggcttataaagaagatgaaatccctgttcttaaagatgaattgatccatgagttaaagcagacactaaatgctatcaaattagaagaaaaaggagtctatgtccaggcatctacactgggttctttggaagctctactggaatttctgaaaacatcagaagtgccctatgcaggaattaacattggcccagtgcataaaaaagatgttatgaaggcttcagtgatgttggaacatgaccctcagtatgcagtaattttggccttcgatgtgagaattgaacgagatgcacaagaaatggctgatagtttaggagttagaatttttagtgcagaaattatttatcatttatttgatgcctttacaaaatatagacaagactacaagaaacagaaacaagaagaatttaagcacatagcagtatttccctgcaagataaaaatcctccctcagtacatttttaattctcgagatccgatagtgatgggggtgacggtggaagcaggtcaggtgaaacaggggacacccatgtgtgtcccaagcaaaaattttgttgacatcggaatagtaacaagtattgaaataaaccataaacaagtggatgttgcaaaaaaaggacaagaagtttgtgtaaaaatagaacctatccctggtgagtcacccaaaatgtttggaagacattttgaagctacagatattcttgttagtaagatcagccggcagtccattgatgcactcaaagactggttcagagatgaaatgcagaagagtgactggcagcttattgtggagctgaagaaagtatttgaaatcatctaattttttcacatggagcaggaactggagtaaatgcaatactgtgttgtaatatcccaacaaaaatcagacaaaaaatggaacagacgtatttggacactgatggacttaagtatggaaggaagaaaaataggtgtataaaatgttttccatgagaaaccaagaaacttacactggtttgacagtggtcagttacatgtccccacagttccaatgtgcctgttcactcacctctcccttccccaacccttctctacttggctgctgttttaaagtttgcccttccccaaatttggatttttattacagatctaaagctctttcgattttatactgattaaatcagtactgcagtatttgattaaccaagcttctgcagattttgtgattcttgggacttttttgacgtaagaaatacttctttatttatgcatattcttcccacagtgatttttccagcattcttctgccatatgcctttagggcttttataaaatagaaaattaggcattctgatatttctttagctgctttgtgtgaaaccatggtgtaaaagcacagctggctgctttttactgcttgtgtagtcacgagtccattgtaatcatcacaattctaaaccaaactaccaataaagaaaacagacatccaccagtaagcaagctctgttaggcttccatgttagtgtagcttctctcccacaagttgtcctcctaggacaagaattatcttacaaactaaactatcatcacactaccttgtatgccagcacctggtaacagtagagatttttatacattaatcttgatctgttttaatcttgatctgttttagtagagatttttatacattaatcttgatctgttttaatcttgatctgttttgtcctagaaaattccatcatacacacatttcctgatatttgggcttagtgcttctaaattgttgcagacacaaaacttaatgattcattcgtagtagtaatctgtagctagttttagggttttgctgaagtcagtgtggggtgtttgtttgaggaaaaagttccaaatatccactagcatagaattttaaactatttttattttaaagttatggcataacatataacataaaaatattttatatacgtttgaaaaatctataccgttcttttttatcatcaaagtttctcaatggccagtagaagcaaaaagacaacaccacctctgatctacgggacataatgttcccaggaaaaaaatcttcaagtgggtgtgagggtgtttctaattcaaaatatgtagatttctccgcatggaagaagtagtaaagattttcttaacatgctcctgtgttcatgcttggagacaagaataagatggtttagaagctttaccctttcttggaacaagtagaatcccggtctgagacctctcaggaatttcagagcttagcagtctggcctggaggtttttcagccttttagtataataaacagtagttgcttcctagagttgagtttttaaggattcacaaaaaggagcctgtacaaaatatacatacagttctttattaaacaactgtaaacacttcactgtaaaaatccataaaactttataaacaaacattttgtaaatagaatctatgctacagtaaaataattaacacaattatttacatgcaatactgacaaatttggcactttttgaaaagaaatgtacaaaacacttgctttaaaagaaatttaaaattataaaaactccgagcattactatcatgcactttgcaaatacctcacaagcacttatggcacagctatcagagagcatcaggctctctggtaatatttatgtaacttttaatgtgcttccataagtttgttgtaaaaccacctggacattgtcaagaataaagtcaaatgccatattccaaa

SEQ ID NO: 131388 - DNA, 4698 bp, Homo sapiens
  Payload ID: 5641
  Gene Symbol: EIF5B
  Gene Name: eukaryotic translation initiation factor 5B
  ENST ID: ENST00000617677
  CDS Start-End: 185-3847
cttgcgcactgagaactcacaccatatgtgtcctgttccagtgcgcgggtctgtggagagccgggtgcgagcggcggcagcacgaggggaaaagagctgagcggagaccaaagtcagccgggagacagtgggtctgtgagagaccgaatagaggggctggggccacgagcgccattgacaagcaatggggaagaaacagaaaaacaagagcgaagacagcaccaaggatgacattgatcttgatgccttggctgcagaaatagaaggagctggtgctgccaaagaacaggagcctcaaaagtcaaaagggaaaaagaaaaaagagaaaaaaaagcaggactttgatgaagatgatatcctgaaagaactggaagaattgtctttggaagctcaaggcatcaaagctgacagagaaactgttgcagtgaagccaacagaaaacaatgaagaggaattcacctcaaaagataaaaaaaagaaaggacagaagggcaaaaaacagagttttgatgataatgatagcgaagaattggaagataaagattcaaaatcaaaaaagactgcaaaaccgaaagtggaaatgtactctgggagtgatgatgatgatgattttaacaaacttcctaaaaaagctaaagggaaagctcaaaaatcaaataagaagtgggatgggtcagaggaggatgaggataacagtaaaaaaattaaagagcgttcaagaataaattcttctggtgaaagtggtgatgaatcagatgaatttttgcaatctagaaaaggacagaaaaaaaatcagaaaaacaagccaggtcctaacatagaaagtgggaatgaagatgatgacgcctccttcaaaattaagacagtggcccaaaagaaggcagaaaagaaggagcgcgagagaaaaaagcgagatgaagaaaaagcgaaactgcggaagctgaaagaaaaagaagagttagaaacaggtaaaaaggatcagagtaaacaaaaggaatctcaaaggaaatttgaagaagaaactgtaaaatccaaagtgactgttgatactggagtaattcctgcctctgaagagaaagcagagactcccacagctgcagaagatgacaatgaaggagacaaaaagaagaaagataagaagaaaaagaaaggagaaaaggaagaaaaagagaaagagaagaaaaaaggacctagcaaagccactgttaaagctatgcaagaagctctggctaagcttaaagaggaagaagaaagacagaagagagaagaggaagaacgtataaaacggcttgaagaattagaagccaagcgtaaagaagaggaacgattggaacaagaaaaaagagaaaggaaaaagcaaaaagaaaaagaaagaaaagaacgcttgaaaaaagaagggaaacttttaactaaatcccagagagaagccagagccagagccgaagctactcttaaactgctacaagctcagggtgttgaagtgccatcaaaagactctttgccaaagaagaggccaatttatgaagataaaaagaggaaaaaaataccacagcagctagaaagtaaagaagtgtctgaatcaatggaattatgtgctgctgtagaagttatggaacaaggagtaccagaaaaggaagagacaccacctcctgttgaaccaggcggtaaagaagatactgaggatgctggattggatgattgggaagctatggccagtgatgaggagacagaaaaagtagaaggaaacaaagttcatatagaagtaaaagaaaaccctgaagaggaggaggaggaggaagaagaggaagaagaagatgaagaaagtgaagaagaggaggaagaggagggagaaagtgaaggcagtgaaggtgatgaggaagatgaaaaggtgtcagatgagaaggattcagggaagacattagataaaaagccaagtaaagaaatgagctcagattctgaatatgactctgatgatgatcggactaaagaagaaagggcttatgacaaagcaaaacggaggattgagaaacggcgacttgaacatagtaaaaatgtaaacaccgaaaagctaagagcccctattatctgcgtacttgggcatgtggacacagggaagacaaaaattctagataagctccgtcacacacatgtacaagatggtgaagcaggtggtatcacacaacaaattggggccaccaatgttcctcttgaagctattaatgaacagactaagatgattaaaaattttgatagagagaatgtacggattccaggaatgctaattattgatactcctgggcatgaatctttcagtaatctgagaaatagaggaagctctctttgtgacattgccattttagttgttgatattatgcatggtttggagccccagacaattgagtctatcaaccttctcaaatctaaaaaatgtcccttcattgttgcactcaataagattgataggttatatgattggaaaaagagtcctgactctgatgtggctgctactttaaagaagcagaaaaagaatacaaaagatgaatttgaggagcgagcaaaggctattattgtagaatttgcacagcagggtttgaatgctgctttgttttatgagaataaagatccccgcacttttgtgtctttggtacctacctctgcacatactggtgatggcatgggaagtctgatctaccttcttgtagagttaactcagaccatgttgagcaagagacttgcacactgtgaagagctgagagcacaggtgatggaggttaaagctctcccggggatgggcaccactatagatgtcatcttgatcaatgggcgtttgaaggaaggagatacaatcattgttcctggagtagaagggcccattgtaactcagattcgaggcctcctgttacctcctcctatgaaggaattacgagtgaagaaccagtatgaaaagcataaagaagtagaagcagctcagggggtaaagattcttggaaaagacctggagaaaacattggctggtttacccctccttgtggcttataaagaagatgaaatccctgttcttaaagatgaattgatccatgagttaaagcagacactaaatgctatcaaattagaagaaaaaggagtctatgtccaggcatctacactgggttctttggaagctctactggaatttctgaaaacatcagaagtgccctatgcaggaattaacattggcccagtgcataaaaaagatgttatgaaggcttcagtgatgttggaacatgaccctcagtatgcagtaattttggccttcgatgtgagaattgaacgagatgcacaagaaatggctgatagtttaggagttagaatttttagtgcagaaattatttatcatttatttgatgcctttacaaaatatagacaagactacaagaaacagaaacaagaagaatttaagcacatagcagtatttccctgcaagataaaaatcctccctcagtacatttttaattctcgagatccgatagtgatgggggtgacggtggaagcaggtcaggtgaaacaggggacacccatgtgtgtcccaagcaaaaattttgttgacatcggaatagtaacaagtattgaaataaaccataaacaagtggatgttgcaaaaaaaggacaagaagtttgtgtaaaaatagaacctatccctggtgagtcacccaaaatgtttggaagacattttgaagctacagatattcttgttagtaagatcagccggcagtccattgatgcactcaaagactggttcagagatgaaatgcagaagagtgactggcagcttattgtggagctgaagaaagtatttgaaatcatctaattttttcacatggagcaggaactggagtaaatgcaatactgtgttgtaatatcccaacaaaaatcagacaaaaaatggaacagacgtatttggacactgatggacttaagtatggaaggaagaaaaataggtgtataaaatgttttccatgagaaaccaagaaacttacactggtttgacagtggtcagttacatgtccccacagttccaatgtgcctgttcactcacctctcccttccccaacccttctctacttggctgctgttttaaagtttgcccttccccaaatttggatttttattacagatctaaagctctttcgattttatactgattaaatcagtactgcagtatttgattaaccaagcttctgcagattttgtgattcttgggacttttttgacgtaagaaatacttctttatttatgcatattcttcccacagtgatttttccagcattcttctgccatatgcctttagggcttttataaaatagaaaattaggcattctgatatttctttagctgctttgtgtgaaaccatggtgtaaaagcacagctggctgctttttactgcttgtgtagtcacgagtccattgtaatcatcacaattctaaaccaaactaccaataaagaaaacagacatccaccagtaagcaagctctgttaggcttccatgttagtgtagcttctctcccacaagttgtcctcctaggacaagaattatcttacaaactaaactatcatcacactaccttgtatgccagcacctggtaacagtagagatttttatacattaatcttgatctgttttaatcttgatctgttttagtagagatttttatacattaa

SEQ ID NO: 131389 - DNA, 1252 bp, Homo sapiens
  Payload ID: 5642
  Gene Symbol: EIF6
  Gene Name: eukaryotic translation initiation factor 6
  Uniprot ID: P56537
  ENST ID: ENST00000374436
  CDS Start-End: 229-966
gtgaggggaacctgggagggtcagctccggtcctgggtcgggaggggtgggggccagaggattcagggccggaggttctggtgggggcccagtgggcgggacccgaggacggaggggccgggaggccgagaggggcggggtcgcggcggggcctgagggacggaggccgggatacttgggaaaggatccgccggccttgaactcccgcctccgccgcccctaggcctcatggcggtccgagcttcgttcgagaacaactgtgagatcggctgctttgccaagctcaccaacacctactgtctggtagcgatcggaggctcagagaacttctacagtgtgttcgagggcgagctctccgataccatccccgtggtgcacgcgtctatcgccggctgccgcatcatcgggcgcatgtgtgtggggaacaggcacggtctcctggtacccaacaataccaccgaccaggagctgcaacacattcgcaacagcctcccagacacagtgcagattaggcgggtggaggagcggctctcagccttgggcaatgtcaccacctgcaatgactacgtggccttggtccacccagacttggacagggagacagaagaaattctggcagatgtgctcaaggtggaagtcttcagacagacagtggccgaccaggtgctagtaggaagctactgtgtcttcagcaatcagggagggctggtgcatcccaagacttcaattgaagaccaggatgagctgtcctctcttcttcaagtcccccttgtggcggggactgtgaaccgaggcagtgaggtgattgctgctgggatggtggtgaatgactggtgtgccttctgtggcctggacacaaccagcacagagctgtcagtggtggagagtgtcttcaagctgaatgaagcccagcctagcaccattgccaccagcatgcgggattccctcattgacagcctcacctgagtcaccttccaagttgttccatgggctcctggctctggactgtggccaaccttctccacattccgcccaatctgtaccggatgctggcagggaggtggcagagagctcactgggactgaggggctgggcacccaacccttttccacctgtgcttatcgcctggatctatcattactgcaaaaacctgctctgttgtgctggctggcaggccctgtggctgctggctgagggttctgctgtcctgtgccaccccattaaagtgcagttccctccgggccattctgaa

SEQ ID NO: 131390 - DNA, 1017 bp, Homo sapiens
  Payload ID: 5642
  Gene Symbol: EIF6
  Gene Name: eukaryotic translation initiation factor 6
  Uniprot ID: P56537
  ENST ID: ENST00000374443
  CDS Start-End: 51-731
tccaaggtacagtcgccgcgtgcggagcttgttactggttacttggcctcatggcggtccgagcttcgttcgagaacaactgtgagatcggctgctttgccaagctcaccaacacctactgtctggtagcgatcggaggctcagagaacttctacaggtgcggcgggagccccggggcttacggtggcggggaggcgtgcgcaggagtcaagagctccggcagtgggagggtgccggcccctctgccccgccaccaccgagtccatgtccctacagtgtgttcgagggcgagctctccgataccatccccgtggtgcacgcgtctatcgccggctgccgcatcatcgggcgcatgtgtgtgggagacagaagaaattctggcagatgtgctcaaggtggaagtcttcagacagacagtggccgaccaggtgctagtaggaagctactgtgtcttcagcaatcagggagggctggtgcatcccaagacttcaattgaagaccaggatgagctgtcctctcttcttcaagtcccccttgtggcggggactgtgaaccgaggcagtgaggtgattgctgctgggatggtggtgaatgactggtgtgccttctgtggcctggacacaaccagcacagagctgtcagtggtggagagtgtcttcaagctgaatgaagcccagcctagcaccattgccaccagcatgcgggattccctcattgacagcctcacctgagtcaccttccaagttgttccatgggctcctggctctggactgtggccaaccttctccacattccgcccaatctgtaccggatgctggcagggaggtggcagagagctcactgggactgaggggctgggcacccaacccttttccacctgtgcttatcgcctggatctatcattactgcaaaaacctgctctgttgtgctggctggcaggccctgtggctgctggctgagggttctgctgtcctgtgccaccccattaaagtgcagttccctccgggccattctgaa

SEQ ID NO: 131391 - DNA, 1289 bp, Homo sapiens
  Payload ID: 5642
  Gene Symbol: EIF6
  Gene Name: eukaryotic translation initiation factor 6
  Uniprot ID: P56537
  ENST ID: ENST00000374450
  CDS Start-End: 266-1003
gtcgatgacagctcctaaaaagctcctgaatgaataatgaatgaatgaacgcgagcaggctaggcgtggggccaggcggggtcgcgcccagaccgctcgcgaccatagagtccgccggaggccggaggtagaggggctggatgcgtggcggggagcgccgggctctcccggaagtctccctggacggaagtggaaacggaaacctttttagggagtccaaggtacagtcgccgcgtgcggagcttgttactggttacttggcctcatggcggtccgagcttcgttcgagaacaactgtgagatcggctgctttgccaagctcaccaacacctactgtctggtagcgatcggaggctcagagaacttctacagtgtgttcgagggcgagctctccgataccatccccgtggtgcacgcgtctatcgccggctgccgcatcatcgggcgcatgtgtgtggggaacaggcacggtctcctggtacccaacaataccaccgaccaggagctgcaacacattcgcaacagcctcccagacacagtgcagattaggcgggtggaggagcggctctcagccttgggcaatgtcaccacctgcaatgactacgtggccttggtccacccagacttggacagggagacagaagaaattctggcagatgtgctcaaggtggaagtcttcagacagacagtggccgaccaggtgctagtaggaagctactgtgtcttcagcaatcagggagggctggtgcatcccaagacttcaattgaagaccaggatgagctgtcctctcttcttcaagtcccccttgtggcggggactgtgaaccgaggcagtgaggtgattgctgctgggatggtggtgaatgactggtgtgccttctgtggcctggacacaaccagcacagagctgtcagtggtggagagtgtcttcaagctgaatgaagcccagcctagcaccattgccaccagcatgcgggattccctcattgacagcctcacctgagtcaccttccaagttgttccatgggctcctggctctggactgtggccaaccttctccacattccgcccaatctgtaccggatgctggcagggaggtggcagagagctcactgggactgaggggctgggcacccaacccttttccacctgtgcttatcgcctggatctatcattactgcaaaaacctgctctgttgtgctggctggcaggccctgtggctgctggctgagggttctgctgtcctgtgccaccccattaaagtgcagttccctccgggccattctgaa

SEQ ID NO: 131392 - DNA, 551 bp, Homo sapiens
  Payload ID: 5642
  Gene Symbol: EIF6
  Gene Name: eukaryotic translation initiation factor 6
  ENST ID: ENST00000456600
  CDS Start-End: 227-551
gtcgatgacagctcctaaaaagctcctgaatgaataatgaatgaatgaacgcgagcaggctaggcgtggggccaggcggggtcgcgcccagaccgctcgcgaccatagagtccgccggaggccggaggtagaggggctggatgcgtggcggggagcgccgggctctcccggaagtctccctggacggaagtggaaacggaaacctttttagggagtccaaggcctcatggcggtccgagcttcgttcgagaacaactgtgagatcggctgctttgccaagctcaccaacacctactgtctggtagcgatcggaggctcagagaacttctacagtgtgttcgagggcgagctctccgataccatccccgtggtgcacgcgtctatcgccggctgccgcatcatcgggcgcatgtgtgtggggaacaggcacggtctcctggtacccaacaataccaccgaccaggagctgcaacacattcgcaacagcctcccagacacagtgcagattaggcgggtggaggagcggctctcagccttgggcaatgtcacca

SEQ ID NO: 131393 - DNA, 798 bp, Homo sapiens
  Payload ID: 5642
  Gene Symbol: EIF6
  Gene Name: eukaryotic translation initiation factor 6
  ENST ID: ENST00000440766
  CDS Start-End: 37-216
ggccttgaactcccgcctccgccgcccctaggcctcatggcggtccgagcttcgttcgagaacaactgtgagatcggctgctttgccaagctcaccaacacctactgtctggtagcgatcggaggctcagagaacttctacaggagacagaagaaattctggcagatgtgctcaaggtggaagtcttcagacagacagtggccgaccaggtgctagtaggaagctactgtgtcttcagcaatcagggagggctggtgcatcccaagacttcaattgaagaccaggatgagctgtcctctcttcttcaagtcccccttgtggcggggactgtgaaccgaggcagtgaggtgattgctgctgggatggtggtgaatgactggtgtgccttctgtggcctggacacaaccagcacagagctgtcagtggtggagagtgtcttcaagctgaatgaagcccagcctagcaccattgccaccagcatgcgggattccctcattgacagcctcacctgagtcaccttccaagttgttccatgggctcctggctctggactgtggccaaccttctccacattccgcccaatctgtaccggatgctggcagggaggtggcagagagctcactgggactgaggggctgggcacccaacccttttccacctgtgcttatcgcctggatctatcattactgcaaaaacctgctctgttgtgctggctggcaggccctgtggctgctggctgagggttctgctgtcctgtgccaccccattaaagtgcagttccctccgggccattctgaa

SEQ ID NO: 131394 - DNA, 932 bp, Homo sapiens
  Payload ID: 5642
  Gene Symbol: EIF6
  Gene Name: eukaryotic translation initiation factor 6
  ENST ID: ENST00000447927
  CDS Start-End: 85-411
ggacggaagtggaaacggaaacctttttagggagtccaaggtacagtcgccgcgtgcggagcttgttactggttacttggcctcatggcggtccgagcttcgttcgagaacaactgtgagatcggctgctttgccaagctcaccaacacctactgtctggtagcgatcggaggctcagagaacttctacagtgtgttcgagggcgagctctccgataccatccccgtggtgcacgcgtctatcgccggctgccgcatcatcgggcgcatgtgtgtgggagacagaagaaattctggcagatgtgctcaaggtggaagtcttcagacagacagtggccgaccaggtgctagtaggaagctactgtgtcttcagcaatcagggagggctggtgcatcccaagacttcaattgaagaccaggatgagctgtcctctcttcttcaagtcccccttgtggcggggactgtgaaccgaggcagtgaggtgattgctgctgggatggtggtgaatgactggtgtgccttctgtggcctggacacaaccagcacagagctgtcagtggtggagagtgtcttcaagctgaatgaagcccagcctagcaccattgccaccagcatgcgggattccctcattgacagcctcacctgagtcaccttccaagttgttccatgggctcctggctctggactgtggccaaccttctccacattccgcccaatctgtaccggatgctggcagggaggtggcagagagctcactgggactgaggggctgggcacccaacccttttccacctgtgcttatcgcctggatctatcattactgcaaaaacctgctctgttgtgctggctggcaggccctgtggctgctggctgagggttctgctgtcctgtgccaccccattaaagtgcagttccctccgggccattctgaa

SEQ ID NO: 131395 - DNA, 739 bp, Homo sapiens
  Payload ID: 5642
  Gene Symbol: EIF6
  Gene Name: eukaryotic translation initiation factor 6
  ENST ID: ENST00000415116
  CDS Start-End: 67-627
aaacctttttagggagtccaaggtacagtcgccgcgtgcggagcttgttactggttacttggcctcatggcggtccgagcttcgttcgagaacaactgtgagatcggctgctttgccaagctcaccaacacctactgtctggtagcgatcggaggctcagagaacttctacaggtgcggcgggagccccggggcttacggtggcggggaggcgtgcgcaggagtcaagagctccggcagtgggagggtgccggcccctctgccccgccaccaccgagtccatgtccctacagtgtgttcgagggcgagctctccgataccatccccgtggtgcacgcgtctatcgccggctgccgcatcatcgggcgcatgtgtgtggggaacaggcacggtctcctggtacccaacaataccaccgaccaggagctgcaacacattcgcaacagcctcccagacacagtgcagattaggcgggtggaggagcggctctcagccttgggcaatgtcaccacctgcaatgactacgtggccttggtccacccagacttggacagggagacagaagaaattctggcagatgtgctcaaggtggaagtcttcagacagacagtggccgaccaggtgctagtaggaagctactgtgtcttcagcaatcagggagggctggtgcatcccaagacttcaattgaagaccaggatgagctgtcctctcttcttcaagtcccccttgtggcggggac

SEQ ID NO: 131396 - DNA, 1054 bp, Homo sapiens
  Payload ID: 5642
  Gene Symbol: EIF6
  Gene Name: eukaryotic translation initiation factor 6
  Uniprot ID: P56537
  ENST ID: ENST00000621148
  CDS Start-End: 27-764
gtgtgaggggaacctgggagggcctcatggcggtccgagcttcgttcgagaacaactgtgagatcggctgctttgccaagctcaccaacacctactgtctggtagcgatcggaggctcagagaacttctacagtgtgttcgagggcgagctctccgataccatccccgtggtgcacgcgtctatcgccggctgccgcatcatcgggcgcatgtgtgtggggaacaggcacggtctcctggtacccaacaataccaccgaccaggagctgcaacacattcgcaacagcctcccagacacagtgcagattaggcgggtggaggagcggctctcagccttgggcaatgtcaccacctgcaatgactacgtggccttggtccacccagacttggacagggagacagaagaaattctggcagatgtgctcaaggtggaagtcttcagacagacagtggccgaccaggtgctagtaggaagctactgtgtcttcagcaatcagggagggctggtgcatcccaagacttcaattgaagaccaggatgagctgtcctctcttcttcaagtcccccttgtggcggggactgtgaaccgaggcagtgaggtgattgctgctgggatggtggtgaatgactggtgtgccttctgtggcctggacacaaccagcacagagctgtcagtggtggagagtgtcttcaagctgaatgaagcccagcctagcaccattgccaccagcatgcgggattccctcattgacagcctcacctgagtcaccttccaagttgttccatgggctcctggctctggactgtggccaaccttctccacattccgcccaatctgtaccggatgctggcagggaggtggcagagagctcactgggactgaggggctgggcacccaacccttttccacctgtgcttatcgcctggatctatcattactgcaaaaacctgctctgttgtgctggctggcaggccctgtggctgctggctgagggttctgctgtcctgtgccaccccattaaagtgcagttccctccgggccattctgaatgtg

SEQ ID NO: 131397 - DNA, 3742 bp, Homo sapiens
  Payload ID: 5643
  Gene Symbol: ETF1
  Gene Name: eukaryotic translation termination factor 1
  Uniprot ID: P62495
  ENST ID: ENST00000360541
  CDS Start-End: 223-1536
actcgcaccggccccctcccttccgcctgccgccttccactccgcccctggcggaggaagtgatgtcacaggccccatgtgagcggattgcaacacatgcagctgcctggagagagggagccggtgtcctacgtcagagccgccgccgccgcggagccgccgccggggaggagcagccgctgccgcccaggactgggcccttagggaggaggaggcgagaagatggcggacgaccccagtgctgccgacaggaacgtggagatctggaagatcaagaagctcattaagagcttggaggcggcccgcggcaatggcaccagcatgatatcattgatcattcctcccaaagaccagatttcacgagtggcaaaaatgttagcggatgagtttggaactgcatctaacattaagtcacgagtaaaccgcctttcagtcctgggagccattacatctgtacaacaaagactcaaactttataacaaagtacctccaaatggtctggttgtatactgtggaacaattgtaacagaagaaggaaaggaaaagaaagtcaacattgactttgaacctttcaaaccaattaatacgtcattgtatttgtgtgacaacaaattccatacagaggctcttacagcactactttcagatgatagcaagtttggattcattgtaatagatggtagtggtgcactttttggcacactccaaggaaacacaagagaagtcctgcacaaattcactgtggatctcccaaagaaacacggtagaggaggtcagtcagccttgcgttttgcccgtttaagaatggaaaagcgacataactatgttcggaaagtagcagagactgctgtgcagctgtttatttctggggacaaagtgaatgtggctggtctagttttagctggatccgctgactttaaaactgaactaagtcaatctgatatgtttgatcagaggttacaatcaaaagttttaaaattagttgatatatcctatggtggtgaaaatggattcaaccaagctattgagttatctactgaagtcctctccaacgtgaaattcattcaagagaagaaattaataggacgatactttgatgaaatcagccaggacacgggcaagtactgttttggcgttgaagatacactaaaggctttggaaatgggagctgtagaaattctaatagtctatgaaaatctggatataatgagatatgttcttcattgccaaggcacagaagaggagaaaattctctatctaactccagagcaagaaaaggataaatctcatttcacagacaaagagaccggacaggaacatgagcttatcgagagcatgcccctgttggaatggtttgctaacaactataaaaaatttggagctacgttggaaattgtcacagataaatcacaagaagggtctcagtttgtgaaaggatttggtggaattggaggtatcttgcggtaccgagtagatttccagggaatggaataccaaggaggagacgatgaattttttgaccttgatgactactaggtagtcgacatgggtccggcaaaacgtgcctcaccctccagcatccaacccaaggagcatacccatggtggaatccaaacagatccctgccttacaattggaacatttccagaacttaatccatgagcattggatattgaaaagaaaaccgaaacaaaaccagacccagccctacactttggtttgtcatggtgtcagcgcagcagcctacaactaagttcctaaacgccactttggactaatttaaaaaagaatcccagtttttacttttactggatggtgaaattggttgctcttgtattttatgaaaaaaaatgatttttttaaccttcatacatagaagcaaaaatactttaactgctgtaaaccttcaaaagttaatagaagtgagatcatactggtttgtttcttattttgattggagaaaaattaaattgctgcatttcgcagtgacccatttacatggcattctcagcttagactgcgtaagaagaaatatatgtggtgaaatgttggaaccatttctctcttggtctctgtttaatgttgaaagggtgagctaataggaggcactttcaacttcactccctcacgctaccccgtccccctccagactggcagtttcaaggatgcaaattgcattgcaaaatcaaactgactcatgaagcatttgggccagtgcactgtttacttccatctgtttgcagacacatttgtgcccggcgtttgggagccctttgtatcaatgttctgacaagggtccctataaccttaacctactcgaaaccggtttgggatggatatgatggggcttctgtgctattgctgggattgggagaaataaaacatgcaatttaagtggaagcgaagaaatttaaagaggattttattttgcttgggtcaatccttgttaaaagggaggtggatgtgttttccttgtgttggatggcatgagattatgtgaatgttttgatttattaaaatgaactgcaaggtttttcacaggaacgacagacatgtatgactgcatgtaattataaactcctgacctcctggtggggttggagcatctgtttcaaatgtgggacttacaagcacttctcacatgagaaattaggggcgggtgggaagggatgggacacagcttctggcaccatggatttaagaccatgttggatccaaaagttggcctgaaaccctgaagcttatgcttcacagctgggctgtaagtcagacttgaacccagctgatatgcaaggtcatggcgtgcccagggtggtgacagttgaacaaagtgtatagtacgtgcccagtggtagcgatggaaaaaagtataccaaatggactttgaaggaccaaaggttttaaaagtcaattggtatcacctccacactgactagggtagtggggtgcatttggttttcaaattgggtacttttaacactttagtgcctgactgctgttctttactgacttgattcagtcactcgtagctttattggtctgaaccagctccttgttcccaggttacagacctgcctatcgttccaataatcctgtttcacttgaatgaagggagtatgtcttaaatgtaaagtttctggttctcacactgtactctgaggtccaaatactgtctgtcaatgtgtaacctgatgtctcaaccccctgtgagaagagtccattatttggtgttcaccaacgtgggagacttcaccggaacaggcttttttgctttgggctctgctatttgtttgcagaacacccaagagcgagcaaacatgctctcttcacagcagtaccttagggttttgccattgtaaatgggtctgatgtgatatgacaagaccagagaaattggatgtaaatttacatttttgaatatgcttgttgtttcacatgatacatttagggtatgcagctccttttgtagtttttatttttactatttaagtttggaaatgatgccaaatttttgtatttctttaatcaatgtgttctcttcggtgatatatattgcattatatattgatgtgtgtatcaatatatattgatatgtattacacttacacatacaaacacatataagagggggtgaaaaccgtagcctttgcattctctatagcctctgcagagagatactaagcagcaaaatcttggtgttgtgatgtacagaaatggagaagagtattaaaccatatttaag

SEQ ID NO: 131398 - DNA, 3874 bp, Homo sapiens
  Payload ID: 5643
  Gene Symbol: ETF1
  Gene Name: eukaryotic translation termination factor 1
  Uniprot ID: P62495
  ENST ID: ENST00000499810
  CDS Start-End: 450-1664
gccccatgtgagcggattgcaacacatgcagctgcctggagagagggagccggtgtcctacgtcagagccgccgccgccgcggagccgccgccggggaggagcagccgctgccgcccaggactgggcccttagggaggaggaggcgagaagatggcggacgaccccagtgctgccgacaggaacgtggagatctggaagatcaagaagctcattaagagcttggaggcggcccgcgggtgagcgccgcgtccggcaccctccgtgccctcttggttcccggacccctcaggatggacgcccccgcgccgcatggccggatgaggagaaccaggcactagccaactcccgccttctggatctctgggtagtagcccctgacccaggggcgagggtcggcgcggttggcccgagaaggggtcctttccccgcatggggcaatggcaccagcatgatatcattgatcattcctcccaaagaccagatttcacgagtggcaaaaatgttagcggatgagtttggaactgcatctaacattaagtcacgagtaaaccgcctttcagtcctgggagccattacatctgtacaacaaagactcaaactttataacaaagtacctccaaatggtctggttgtatactgtggaacaattgtaacagaagaaggaaaggaaaagaaagtcaacattgactttgaacctttcaaaccaattaatacgtcattgtatttgtgtgacaacaaattccatacagaggctcttacagcactactttcagatgatagcaagtttggattcattgtaatagatggtagtggtgcactttttggcacactccaaggaaacacaagagaagtcctgcacaaattcactgtggatctcccaaagaaacacggtagaggaggtcagtcagccttgcgttttgcccgtttaagaatggaaaagcgacataactatgttcggaaagtagcagagactgctgtgcagctgtttatttctggggacaaagtgaatgtggctggtctagttttagctggatccgctgactttaaaactgaactaagtcaatctgatatgtttgatcagaggttacaatcaaaagttttaaaattagttgatatatcctatggtggtgaaaatggattcaaccaagctattgagttatctactgaagtcctctccaacgtgaaattcattcaagagaagaaattaataggacgatactttgatgaaatcagccaggacacgggcaagtactgttttggcgttgaagatacactaaaggctttggaaatgggagctgtagaaattctaatagtctatgaaaatctggatataatgagatatgttcttcattgccaaggcacagaagaggagaaaattctctatctaactccagagcaagaaaaggataaatctcatttcacagacaaagagaccggacaggaacatgagcttatcgagagcatgcccctgttggaatggtttgctaacaactataaaaaatttggagctacgttggaaattgtcacagataaatcacaagaagggtctcagtttgtgaaaggatttggtggaattggaggtatcttgcggtaccgagtagatttccagggaatggaataccaaggaggagacgatgaattttttgaccttgatgactactaggtagtcgacatgggtccggcaaaacgtgcctcaccctccagcatccaacccaaggagcatacccatggtggaatccaaacagatccctgccttacaattggaacatttccagaacttaatccatgagcattggatattgaaaagaaaaccgaaacaaaaccagacccagccctacactttggtttgtcatggtgtcagcgcagcagcctacaactaagttcctaaacgccactttggactaatttaaaaaagaatcccagtttttacttttactggatggtgaaattggttgctcttgtattttatgaaaaaaaatgatttttttaaccttcatacatagaagcaaaaatactttaactgctgtaaaccttcaaaagttaatagaagtgagatcatactggtttgtttcttattttgattggagaaaaattaaattgctgcatttcgcagtgacccatttacatggcattctcagcttagactgcgtaagaagaaatatatgtggtgaaatgttggaaccatttctctcttggtctctgtttaatgttgaaagggtgagctaataggaggcactttcaacttcactccctcacgctaccccgtccccctccagactggcagtttcaaggatgcaaattgcattgcaaaatcaaactgactcatgaagcatttgggccagtgcactgtttacttccatctgtttgcagacacatttgtgcccggcgtttgggagccctttgtatcaatgttctgacaagggtccctataaccttaacctactcgaaaccggtttgggatggatatgatggggcttctgtgctattgctgggattgggagaaataaaacatgcaatttaagtggaagcgaagaaatttaaagaggattttattttgcttgggtcaatccttgttaaaagggaggtggatgtgttttccttgtgttggatggcatgagattatgtgaatgttttgatttattaaaatgaactgcaaggtttttcacaggaacgacagacatgtatgactgcatgtaattataaactcctgacctcctggtggggttggagcatctgtttcaaatgtgggacttacaagcacttctcacatgagaaattaggggcgggtgggaagggatgggacacagcttctggcaccatggatttaagaccatgttggatccaaaagttggcctgaaaccctgaagcttatgcttcacagctgggctgtaagtcagacttgaacccagctgatatgcaaggtcatggcgtgcccagggtggtgacagttgaacaaagtgtatagtacgtgcccagtggtagcgatggaaaaaagtataccaaatggactttgaaggaccaaaggttttaaaagtcaattggtatcacctccacactgactagggtagtggggtgcatttggttttcaaattgggtacttttaacactttagtgcctgactgctgttctttactgacttgattcagtcactcgtagctttattggtctgaaccagctccttgttcccaggttacagacctgcctatcgttccaataatcctgtttcacttgaatgaagggagtatgtcttaaatgtaaagtttctggttctcacactgtactctgaggtccaaatactgtctgtcaatgtgtaacctgatgtctcaaccccctgtgagaagagtccattatttggtgttcaccaacgtgggagacttcaccggaacaggcttttttgctttgggctctgctatttgtttgcagaacacccaagagcgagcaaacatgctctcttcacagcagtaccttagggttttgccattgtaaatgggtctgatgtgatatgacaagaccagagaaattggatgtaaatttacatttttgaatatgcttgttgtttcacatgatacatttagggtatgcagctccttttgtagtttttatttttactatttaagtttggaaatgatgccaaatttttgtatttctttaatcaatgtgttctcttcggtgatatatattgcattatatattgatgtgtgtatcaatatatattgatatgtattacacttacacatacaaacacatataagagggggtgaaaaccgtagcctttgcattctctatagcctctgcagagagatactaagcagcaaaatcttggtgttgtgatgtacagaaatggagaagagtattaaaccatatttaagaata

SEQ ID NO: 131399 - DNA, 1736 bp, Homo sapiens
  Payload ID: 5643
  Gene Symbol: ETF1
  Gene Name: eukaryotic translation termination factor 1
  ENST ID: ENST00000503014
  CDS Start-End: 150-1421
atagtagaatggcctgcctcaggccatgtgaaaagttgatttcagcacaagaatttgacattctggtttccagcccaggattgtcatttatgggtagatttgcaattttagaatgacagcccctccaagctcttcattattactgttatatgaaacaggatgtgcttaattgtactgaaggcccaattcacagcaatggcaccagcatgatatcattgatcattcctcccaaagaccagatttcacgagtggcaaaaatgttagcggatgagtttggaactgcatctaacattaagtcacgagtaaaccgcctttcagtcctgggagccattacatctgtacaacaaagactcaaactttataacaaagtacctccaaatggtctggttgtatactgtggaacaattgtaacagaagaaggaaaggaaaagaaagtcaacattgactttgaacctttcaaaccaattaatacgtcattgtatttgtgtgacaacaaattccatacagaggctcttacagcactactttcagatgatagcaagtttggattcattgtaatagatggtagtggtgcactttttggcacactccaaggaaacacaagagaagtcctgcacaaattcactgtggatctcccaaagaaacacggtagaggaggtcagtcagccttgcgttttgcccgtttaagaatggaaaagcgacataactatgttcggaaagtagcagagactgctgtgcagctgtttatttctggggacaaagtgaatgtggctggtctagttttagctggatccgctgactttaaaactgaactaagtcaatctgatatgtttgatcagaggttacaatcaaaagttttaaaattagttgatatatcctatggtggtgaaaatggattcaaccaagctattgagttatctactgaagtcctctccaacgtgaaattcattcaagagaagaaattaataggacgatactttgatgaaatcagccaggacacgggcaagtactgttttggcgttgaagatacactaaaggctttggaaatgggagctgtagaaattctaatagtctatgaaaatctggatataatgagatatgttcttcattgccaaggcacagaagaggagaaaattctctatctaactccagagcaagaaaaggataaatctcatttcacagacaaagagaccggacaggaacatgagcttatcgagagcatgcccctgttggaatggtttgctaacaactataaaaaatttggagctacgttggaaattgtcacagataaatcacaagaagggtctcagtttgtgaaaggatttggtggaattggaggtatcttgcggtaccgagtagatttccagggaatggaataccaaggaggagacgatgaattttttgaccttgatgactactaggtagtcgacatgggtccggcaaaacgtgcctcaccctccagcatccaacccaaggagcatacccatggtggaatccaaacagatccctgccttacaattggaacatttccagaacttaatccatgagcattggatattgaaaagaaaaccgaaacaaaaccagacccagccctacactttggtttgtcatggtgtcagcgcagcagcctacaactaagttcctaaacgccactttggactaatttaaaaaagaatcccagtttttacttttactggatggtgaaattggttgctcttgtattttatgaaaaaaaa

SEQ ID NO: 131400 - DNA, 745 bp, Homo sapiens
  Payload ID: 5643
  Gene Symbol: ETF1
  Gene Name: eukaryotic translation termination factor 1
  ENST ID: ENST00000512198
  CDS Start-End: 74-361
cgcggagccgccgccggggaggagcagccgctgccgcccaggactgggcccttagggaggaggaggcgagaagatggcggacgaccccagtgctgccgacaggaacgtggagatctggaagatcaagaagctcattaagagcttggaggcggcccgcggcaatggcaccagcatgatatcattgatcattcctcccaaagaccagatttcacgagtggcaaaaatgttagcggatgagtttggaactgcatctaacattaagtcacgagtaaaccgcctttcagtcctgggagccattacatctgtacaacaaagactcaaactttataacaaaggctcttacagcactactttcagatgatagcaagtttggattcattgtaatagatggtagtggtgcactttttggcacactccaaggaaacacaagagaagtcctgcacaaattcactgtggatctcccaaagaaacacggtagaggaggtcagtcagccttgcgttttgcccgtttaagaatggaaaagcgacataactatgttcggaaagtagcagagactgctgtgcagctgtttatttctggggacaaagtgaatgtggctggtctagttttagctggatccgctgactttaaaactgaactaagtcaatctgatatgtttgatcagaggttacaatcaaaagttttaaaattagttgatatatcctatggtggtgaaaatggattcaaccaagctattgagttatc

SEQ ID NO: 131401 - DNA, 713 bp, Homo sapiens
  Payload ID: 5643
  Gene Symbol: ETF1
  Gene Name: eukaryotic translation termination factor 1
  ENST ID: ENST00000507939
  CDS Start-End: 355-713
aacacatgcagctgcctggagagagggagccggtgtcctacgtcagagccgccgccgccgcggagccgccgccggggaggagcagccgctgccgcccaggactgggcccttagggaggaggaggcgagaagatggcggacgaccccagtgctgccgacaggaacgtggagatctggaagatcaagaagctcattaagagcttggaggcggcccgcggacgttaaccctctgggcgaagcattgatgaaagctttgataagccaaagtgcccctaaaaccaatgagaacaagaagagaatctgagtgcagaggcccctgggagctttgagggatacattgctcaatggcaccagcatgatatcattgatcattcctcccaaagaccagatttcacgagtggcaaaaatgttagcggatgagtttggaactgcatctaacattaagtcacgagtaaaccgcctttcagtcctgggagccattacatctgtacaacaaagactcaaactttataacaaagtacctccaaatggtctggttgtatactgtggaacaattgtaacagaagaaggaaaggaaaagaaagtcaacattgactttgaacctttcaaaccaattaatacgtcattgtatttgtgtgacaacaaattccatacagaggctcttacagcactactttcagatgatagcaagtttggattcattgtaatagatgg

SEQ ID NO: 131402 - DNA, 990 bp, Homo sapiens
  Payload ID: 5643
  Gene Symbol: ETF1
  Gene Name: eukaryotic translation termination factor 1
  ENST ID: ENST00000572514
  CDS Start-End: 366-990
ggattgcaacacatgcagctgcctggagagagggagccggtgtcctacgtcagagccgccgccgccgcggagccgccgccggggaggagcagccgctgccgcccaggactgggcccttagggaggaggaggcgagaagatggcggacgaccccagtgctgccgacaggaacgtggagatctggaagatcaagaagctcattaagagcttggaggcggcccgcgggtgagcgccgcgtccggcaccctccgtgccctcttggttcccggacccctcaggatggacgcccccgcgccgcatggccggatgaggagaaccaggcactagccaactcccgccttctggatctctggcaatggcaccagcatgatatcattgatcattcctcccaaagaccagatttcacgagtggcaaaaatgttagcggatgagtttggaactgcatctaacattaagtcacgagtaaaccgcctttcagtcctgggagccattacatctgtacaacaaagactcaaactttataacaaagtacctccaaatggtctggttgtatactgtggaacaattgtaacagaagaaggaaaggaaaagaaagtcaacattgactttgaacctttcaaaccaattaatacgtcattgtatttgtgtgacaacaaattccatacagaggctcttacagcactactttcagatgatagcaagtttggattcattgtaatagatggtagtggtgcactttttggcacactccaaggaaacacaagagaagtcctgcacaaattcactgtggatctcccaaagaaacacggtagaggaggtcagtcagccttgcgttttgcccgtttaagaatggaaaagcgacataactatgttcggaaagtagcagagactgctgtgcagctgtttatttctggggacaaagtgaatgtggctggtctagttttagctggatccgctgactttaaaactgaactaagtcaatctgatatgt

SEQ ID NO: 131403 - DNA, 1815 bp, Homo sapiens
  Payload ID: 5644
  Gene Symbol: EVA1A
  Gene Name: eva-1 homolog A (C. elegans)
  Uniprot ID: Q9H8M9
  ENST ID: ENST00000233712
  CDS Start-End: 439-897
agcataacctgtttgtgaaactgcaaaaaggttgacatggctgaagcagaagatgggttggtactgaatggttgggagagatatgtagcggctgaccctgaaggacgttgcagcccatgctatggagacctgattttattttgtaagaggtgggcaacccctgaagcattttagtgatgcgaacagatgtgtctgttaccaagcaaagccagttaaagaaggtcacagaggaggaatgatcacaaagagtctgagaagccaactggggccaaacaagttttagaacctctactggctgatgccaacatcatcagagatgaactgttcttaccagaaacttctctgctcctgacaccccacctctccccagaagagaagaaggagagtggccacgttgattcagccaagcacctccaggaggtcccctctggatgtcccatgaggctgcccctcagccacagcccagagcacgtggagatggctttgctcagcaacatcctagcggcctattcctttgtctcagaaaatcctgagcgagcagctctgtactttgtttctggcgtgtgcatcgggctggtgctgaccctggctgctctggtgataaggatctcttgccacacagactgcaggcggcgtcccgggaagaagttcctgcaggacagagagagcagcagcgacagcagcgacagcgaggatggcagtgaggacaccgtgtccgatctctccgtgcggagacaccgccgcttcgagaggactttgaacaagaatgtgttcacctctgcggaggagctggagcgcgcccagcggctggaggagcgcgagcgcatcatcagggagatctggatgaatggccagcctgaggtgcccgggaccaggagcctgaatcgctactattagggagcagcaggaccccggaaaccactggaggccgcctggaaaggagagcgtctgcagggacagtgggcacaaggaactgaacccagctctgctaatattgtgatttcagagaaaaagcaggacatgccccttttctagccaggaggattgctcctttttggccaaatgtatggagaagtagaaaaatcaaagcagttcatcaccctttccaggtctcggaatggtgctgaaaaatcctctccaacactgtggatggagatcggagaaacgcgactgtggtttctcttgatttctgaggatctcagaagtttcagcagacttccttgctctgtgttattcctttgcaaaaggaaagatcattatagcatgagggctgggaatagcagggtgaacttaacccaataaatgcaatttcctaaatgacttcatgctatggaggtgattctgattcaaatagcatgatccatgcttattatttaaggctgatttttaaaatcttgtgttgcaagggcaacctcgtccattttaactggcacctcagggattaaaatcctactttttagtgtagttcccacctcattcatgaaaatgaatagaactattgtattatgggagatgtgtcagtgaactagaaaatgtcaataacctcaaaggatgaagggtttttattttaaatagtttataaaatatatattgacatgcatatttgaaaatgctgcataaaaataaaagtggtgtgttttccccctctttggagacaagaaaattttattatgactctagataattgtgattttaaacactttgtttttttttttttttttaattggatttcaaagaaaagaatggaaatgagaggtaaggattaaagccaaagttaggatgggaattaaaaaaataaacattacataaaatctt

SEQ ID NO: 131404 - DNA, 1802 bp, Homo sapiens
  Payload ID: 5644
  Gene Symbol: EVA1A
  Gene Name: eva-1 homolog A (C. elegans)
  Uniprot ID: Q9H8M9
  ENST ID: ENST00000393913
  CDS Start-End: 426-884
cggggcttggcgccgccgtccgtgagcacccaggccgggaccccacatccccaggccagccctgaccccggcggcccctccgccgggattcctttccgaggtactggtgccggcccaagacccgggcagcgctttgtcgtgtccgcccctcagtgatcagctccgggtccccctgctcggccccgcgcgccccaagcgcagtccccggaagtgcgcgccggggccccagcaaagagtctgagaagccaactggggccaaacaagttttagaacctctactggctgatgccaacatcatcagagatgaactgttcttaccagaaacttctctgctcctgacaccccacctctccccagaagagaagaaggagagtggccacgttgattcagccaagcacctccaggaggtcccctctggatgtcccatgaggctgcccctcagccacagcccagagcacgtggagatggctttgctcagcaacatcctagcggcctattcctttgtctcagaaaatcctgagcgagcagctctgtactttgtttctggcgtgtgcatcgggctggtgctgaccctggctgctctggtgataaggatctcttgccacacagactgcaggcggcgtcccgggaagaagttcctgcaggacagagagagcagcagcgacagcagcgacagcgaggatggcagtgaggacaccgtgtccgatctctccgtgcggagacaccgccgcttcgagaggactttgaacaagaatgtgttcacctctgcggaggagctggagcgcgcccagcggctggaggagcgcgagcgcatcatcagggagatctggatgaatggccagcctgaggtgcccgggaccaggagcctgaatcgctactattagggagcagcaggaccccggaaaccactggaggccgcctggaaaggagagcgtctgcagggacagtgggcacaaggaactgaacccagctctgctaatattgtgatttcagagaaaaagcaggacatgccccttttctagccaggaggattgctcctttttggccaaatgtatggagaagtagaaaaatcaaagcagttcatcaccctttccaggtctcggaatggtgctgaaaaatcctctccaacactgtggatggagatcggagaaacgcgactgtggtttctcttgatttctgaggatctcagaagtttcagcagacttccttgctctgtgttattcctttgcaaaaggaaagatcattatagcatgagggctgggaatagcagggtgaacttaacccaataaatgcaatttcctaaatgacttcatgctatggaggtgattctgattcaaatagcatgatccatgcttattatttaaggctgatttttaaaatcttgtgttgcaagggcaacctcgtccattttaactggcacctcagggattaaaatcctactttttagtgtagttcccacctcattcatgaaaatgaatagaactattgtattatgggagatgtgtcagtgaactagaaaatgtcaataacctcaaaggatgaagggtttttattttaaatagtttataaaatatatattgacatgcatatttgaaaatgctgcataaaaataaaagtggtgtgttttccccctctttggagacaagaaaattttattatgactctagataattgtgattttaaacactttgtttttttttttttttttaattggatttcaaagaaaagaatggaaatgagaggtaaggattaaagccaaagttaggatgggaattaaaaaaataaacattacataaaatctt

SEQ ID NO: 131405 - DNA, 1747 bp, Homo sapiens
  Payload ID: 5644
  Gene Symbol: EVA1A
  Gene Name: eva-1 homolog A (C. elegans)
  Uniprot ID: Q9H8M9
  ENST ID: ENST00000410113
  CDS Start-End: 539-997
ctgactcgggctcctgcagcttctgcggggcttggcgccgccgtccgtgagcacccaggccgggaccccacatccccaggccagccctgaccccggcggcccctccgccgggattcctttccgaggtactggtgccggcccaagacccgggcagcgctttgtcgtgtccgcccctcagtgatcagctccgggtccccctgctcggccccgcgcgccccaagcgcagtccccggaagtgcgcgccggggccccagcaaagtgcaggtaggtagatcgctgaccacatttgctcatttctggattattcattcaaaggaagcactatgagtcaatcattgggcacagagagtctgagaagccaactggggccaaacaagttttagaacctctactggctgatgccaacatcatcagagatgaactgttcttaccagaaacttctctgctcctgacaccccacctctccccagaagagaagaaggagagtggccacgttgattcagccaagcacctccaggaggtcccctctggatgtcccatgaggctgcccctcagccacagcccagagcacgtggagatggctttgctcagcaacatcctagcggcctattcctttgtctcagaaaatcctgagcgagcagctctgtactttgtttctggcgtgtgcatcgggctggtgctgaccctggctgctctggtgataaggatctcttgccacacagactgcaggcggcgtcccgggaagaagttcctgcaggacagagagagcagcagcgacagcagcgacagcgaggatggcagtgaggacaccgtgtccgatctctccgtgcggagacaccgccgcttcgagaggactttgaacaagaatgtgttcacctctgcggaggagctggagcgcgcccagcggctggaggagcgcgagcgcatcatcagggagatctggatgaatggccagcctgaggtgcccgggaccaggagcctgaatcgctactattagggagcagcaggaccccggaaaccactggaggccgcctggaaaggagagcgtctgcagggacagtgggcacaaggaactgaacccagctctgctaatattgtgatttcagagaaaaagcaggacatgccccttttctagccaggaggattgctcctttttggccaaatgtatggagaagtagaaaaatcaaagcagttcatcaccctttccaggtctcggaatggtgctgaaaaatcctctccaacactgtggatggagatcggagaaacgcgactgtggtttctcttgatttctgaggatctcagaagtttcagcagacttccttgctctgtgttattcctttgcaaaaggaaagatcattatagcatgagggctgggaatagcagggtgaacttaacccaataaatgcaatttcctaaatgacttcatgctatggaggtgattctgattcaaatagcatgatccatgcttattatttaaggctgatttttaaaatcttgtgttgcaagggcaacctcgtccattttaactggcacctcagggattaaaatcctactttttagtgtagttcccacctcattcatgaaaatgaatagaactattgtattatgggagatgtgtcagtgaactagaaaatgtcaataacctcaaaggatgaagggtttttattttaaatagtttataaaatatatattgacatgcatatttgaaaatgctgcataaaaataaaagtggtgtgttttccccctc

SEQ ID NO: 131406 - DNA, 696 bp, Homo sapiens
  Payload ID: 5644
  Gene Symbol: EVA1A
  Gene Name: eva-1 homolog A (C. elegans)
  ENST ID: ENST00000410010
  CDS Start-End: 112-534
attctcagtaaagacacactacgtaatcaaagctactgctctgctttgctgagctttgagatgaaaggtctccaggttgggagttaagcttgtcattctctaatttgaaaaatgaagggttctaagagctttgtcttgcagaaaatgtttagctgctcaaaaaatcctgagcgagcagctctgtactttgtttctggcgtgtgcatcgggctggtgctgaccctggctgctctggtgataaggatctcttgccacacagactgcaggcggcgtcccgggaagaagttcctgcaggacagagagagcagcagcgacagcagcgacagcgaggatggcagtgaggacaccgtgtccgatctctccgtgcggagacaccgccgcttcgagaggactttgaacaagaatgtgttcacctctgcggaggagctggagcgcgcccagcggctggaggagcgcgagcgcatcatcagggagatctggatgaatggccagcctgaggtgcccgggaccaggagcctgaatcgctactattagggagcagcaggaccccggaaaccactggaggccgcctggaaaggagagcgtctgcagggacagtgggcacaaggaactgaacccagctctgctaatattgtgatttcagagaaaaagcaggacatgccccttttctagccaggaggattgctcctttttggc

SEQ ID NO: 131407 - DNA, 777 bp, Homo sapiens
  Payload ID: 5644
  Gene Symbol: EVA1A
  Gene Name: eva-1 homolog A (C. elegans)
  Uniprot ID: Q9H8M9
  ENST ID: ENST00000410071
  CDS Start-End: 234-692
cgggacaggaatgagaggatggatgctggcaggggcttggagagtctgagaagccaactggggccaaacaagttttagaacctctactggctgatgccaacatcatcagagatgaactgttcttaccagaaacttctctgctcctgacaccccacctctccccagaagagaagaaggagagtggccacgttgattcagccaagcacctccaggaggtcccctctggatgtcccatgaggctgcccctcagccacagcccagagcacgtggagatggctttgctcagcaacatcctagcggcctattcctttgtctcagaaaatcctgagcgagcagctctgtactttgtttctggcgtgtgcatcgggctggtgctgaccctggctgctctggtgataaggatctcttgccacacagactgcaggcggcgtcccgggaagaagttcctgcaggacagagagagcagcagcgacagcagcgacagcgaggatggcagtgaggacaccgtgtccgatctctccgtgcggagacaccgccgcttcgagaggactttgaacaagaatgtgttcacctctgcggaggagctggagcgcgcccagcggctggaggagcgcgagcgcatcatcagggagatctggatgaatggccagcctgaggtgcccgggaccaggagcctgaatcgctactattagggagcagcaggaccccggaaaccactggaggccgcctggaaaggagagcgtctgcagggacagtgggcacaaggaactgaaccca

SEQ ID NO: 131408 - DNA, 434 bp, Homo sapiens
  Payload ID: 5644
  Gene Symbol: EVA1A
  Gene Name: eva-1 homolog A (C. elegans)
  ENST ID: ENST00000452003
  CDS Start-End: 132-434
gaacccgatgggctgtgcctcaaaggtgaaccagggagaatcaaataaagagttccagaagtgaagagaagaaggagagtggccacgttgattcagccaagcacctccaggaggtcccctctggatgtcccatgaggctgcccctcagccacagcccagagcacgtggagatggctttgctcagcaacatcctagcggcctattcctttgtctcagaaaatcctgagcgagcagctctgtactttgtttctggcgtgtgcatcgggctggtgctgaccctggctgctctggtgataaggatctcttgccacacagactgcaggcggcgtcccgggaagaagttcctgcaggacagagagagcagcagcgacagcagcgacagcgaggatggcagtgaggacaccgtgtccgatctctccgtgcggagacaccgc

SEQ ID NO: 131409 - DNA, 569 bp, Homo sapiens
  Payload ID: 5644
  Gene Symbol: EVA1A
  Gene Name: eva-1 homolog A (C. elegans)
  ENST ID: ENST00000432649
  CDS Start-End: 142-569
gagtagctgaatacaggctcaaagcaggcgacgggacaggaatgagaggatggatgctggcaggggcttggagaagagaagaaggagagtggccacgttgattcagccaagcacctccaggaggtcccctctggatgtcccatgaggctgcccctcagccacagcccagagcacgtggagatggctttgctcagcaacatcctagcggcctattcctttgtctcagaaaatcctgagcgagcagctctgtactttgtttctggcgtgtgcatcgggctggtgctgaccctggctgctctggtgataaggatctcttgccacacagactgcaggcggcgtcccgggaagaagttcctgcaggacagagagagcagcagcgacagcagcgacagcgaggatggcagtgaggacaccgtgtccgatctctccgtgcggagacaccgccgcttcgagaggactttgaacaagaatgtgttcacctctgcggaggagctggagcgcgcccagcggctggaggagcgcgagcgcatcatcagggagatctggatgaatggccagcctgaggtgcc

SEQ ID NO: 131410 - DNA, 1054 bp, Homo sapiens
  Payload ID: 5645
  Gene Symbol: EVA1B
  Gene Name: eva-1 homolog B (C. elegans)
  Uniprot ID: Q9NVM1
  ENST ID: ENST00000270824
  CDS Start-End: 293-790
attcaagcctgggccctggaaggaggggtggacagtcccctcccttccagtccagcatgggtctggggaagagaagcagctttgcctggaaggggcctcctaggagggggagcggtggtttctagctcaggctttaggatcagagagcagcagattcaaatcctgacggttttggtaaagtcaattcaatctctccaagactccgtttatttgatctgcgaagtggggataatggtatcacgtcgcagggttgtcaggcggagctggtaggggagctgccccccagagcagcatggatgccccgcgaagggacatggagttgctcagcaacagcctggctgcctacgcgcacatccgcgccaaccccgagagcttcggcctctacttcgtgctgggcgtctgcttcggcctgctgctcaccctctgcctgctcgtcatcagcatctcgtgggcgccccgcccgcggccccggggcccggctcagcgccgggacccccgcagcagcaccctggagcccgaggacgacgacgaggacgaggaggacacggtgactcggctgggccccgacgacacgctgccgggccccgagctgtccgcagagccggacgggcccctcaacgtcaacgtcttcacgtcggcggaggagctggagcgggcgcagcggctggaggagcgcgaacggatcctgcgggagatctggcgcaccgggcagccggacctgctgggcacaggcacgctggggcccagccccacggccacgggcaccctgggccgcatgcactattactgatgggccccggctcccgctgcaaggcgctcggggtaccggacctgcacatgagctcagagctaccccacaccttcggactgcctcggcccccacagctcccaggtgctactgggcgtggaccgccaccccctgagaggctcccttccccagtcctgccagaagaccccgggggcggggagggggcagcatgcagggtccccactccctctctggggtcgatgaagaggtgaagtgaccaaatgaaagaaagctgcattctcagtg

SEQ ID NO: 131411 - DNA, 1998 bp, Homo sapiens
  Payload ID: 5646
  Gene Symbol: EVA1C
  Gene Name: eva-1 homolog C (C. elegans)
  Uniprot ID: P58658
  ENST ID: ENST00000300255
  CDS Start-End: 474-1799
gggcgaggctggcacccggccagcgcgggcagggccacgggtgcccggctgtttcccgggtgtggaaggcgctcaaggtgcgcggcccggggcgcgctactgggggcgccctccgcggtgggcagcgcgccagggatcggcctgggcagccgcggggcgcgcgaaggctgcgctttccctacggcccccctcgcttcctccggcacggcggcaacggagatttcctctcggggaaactacgcggatccttttcggggatcctcgccccgccccagttctccgccccctcccctttgctggggcgcctgggctggcccgcgcaggggaggaggctctggcagcctgggcagggaggcggcggggggccgcggagccgctggccatcgattctccccgccatgtgacgccgtccttagccctgcgacccccagcgcgtcccgggcctgcgcctccgccccgccgcgcagcgcacgatgcttctgccgggacgcgcacgccaaccgccgacgccccagcccgtgcagcatcccggcctccgccggcaggtagagccgccggggcagctcctgcgcctcttctactgcactgtcctggtctgctccaaagagatctcagcgctcaccgacttctctggttacctaaccaaactcctgcaaaaccacaccacctatgcctgtgatggggactatttgaatctacagtgccctcggcattctacgataagtgtccaatcggcattttatgggcaagattaccaaatgtgtagttcccagaagcctgcctcccagagggaagacagcttaacctgtgtggcagccaccaccttccagaaggtgctggacgaatgccagaaccagcgggcctgccacctcctggtcaatagccgtgtttttggacctgacctttgtccaggaagcagtaaatacctcctggtctcctttaaatgccaacctaatgaattaaaaaacaaaaccgtgtgtgaagaccaggagctgaaactgcactgccatgaatccaagttcctcaacatctactctgcgacctacggcaggaggacccaggaaagggacatctgctcctccaaggcagagcggctcccccctttcgattgcttgtcttactcagctttgcaagtcctatcccgaaggtgctatgggaagcagagatgcaaaatcatcgtcaacaatcaccattttggaagcccctgtttgccaggcgtgaaaaaatacctcactgtgacctacgcatgtgttcccaagaacatactcacagcgattgatccagccattgctaatctaaaaccttctttgaagcagaaagatggtgaatatggtataaacttcgacccaagcggatcgaaggttctgaggaaagatggaattcttgttagcaactctctggcagcctttgcttacattagagcccacccggagagagctgccctgctgttcgtgtccagtgtctgcatcggcctggccctcacactgtgcgccctggtcatcagagagtcctgtgccaaggacttccgcgacttgcagctggggagggagcagctggtgccaggaagtgacaaggtcgaggaggacagcgaggatgaagaagaggaggaggacccctctgagtctgatttcccaggggaactgtcggggttctgtaggacttcatatcctatatacagttccatagaagctgcagagctcgcagaaaggattgagcgcagggagcaaatcattcaggaaatatggatgaacagtggtttggacacctcgctcccaagaaacatgggccagttctactgaaaaccacatgcatcttgatgcgatcgcactttctgaagaaggaaggatcccaaatgcccctccagttctggttcacctgtaccttctatgaaggagaattcgtcatgtcattcaacactcgtgaggccaggaagctattaaagggatgtttcaagctgtttctagcacattccaaaataaatgaggagggaagagtctt

SEQ ID NO: 131412 - DNA, 1668 bp, Homo sapiens
  Payload ID: 5646
  Gene Symbol: EVA1C
  Gene Name: eva-1 homolog C (C. elegans)
  Uniprot ID: P58658
  ENST ID: ENST00000382699
  CDS Start-End: 153-1469
aggggaggaggctctggcagcctgggcagggaggcggcggggggccgcggagccgctggccatcgattctccccgccatgtgacgccgtccttagccctgcgacccccagcgcgtcccgggcctgcgcctccgccccgccgcgcagcgcacgatgcttctgccgggacgcgcacgccaaccgccgacgccccagcccgtgcagcatcccggcctccgccggcaggtagagccgccggggcagctcctgcgcctcttctactgcactgtcctggtctgctccaaagagatctcagcgctcaccgacttctctggttacctaaccaaactcctgcaaaaccacaccacctatgcctgtgatggggactatttgaatctacagtgccctcggcattctacgataagtgtccaatcggcattttatgggcaagattaccaaatgtgtagttcccagaagcctgcctcccagagggaagacagcttaacctgtgtggcagccaccaccttccagaaggtgctggacgaatgccagaaccagcgggcctgccacctcctggtcaatagccgtgtttttggacctgacctttgtccaggaagcagtaaatacctcctggtctcctttaaatgccaacctaatgaattaaaaaacaaaaccgtgtgtgaagaccaggagctgaaactgcactgccatgaatccaagttcctcaacatctactctgcgacctacggcaggaggacccaggaaagggacatctgctcctccaaggcagagcggctcccccctttcgattgcttgtcttactcagctttgcaagtcctatcccgaaggtgctatgggaagcagagatgcaaaatcatcgtcaacaatcaccattttggaagcccctgtttgccaggcgtgaaaaaatacctcactgtgacctacgcatgtgttcccaagaacatactcacagcgattgatccagccattgctaatctaaaaccttctttgaagcagaaagatggtataaacttcgacccaagcggatcgaaggttctgaggaaagatggaattcttgttagcaactctctggcagcctttgcttacattagagcccacccggagagagctgccctgctgttcgtgtccagtgtctgcatcggcctggccctcacactgtgcgccctggtcatcagagagtcctgtgccaaggacttccgcgacttgcagctggggagggagcagctggtgccaggaagtgacaaggtcgaggaggacagcgaggatgaagaagaggaggaggacccctctgagtctgatttcccaggggaactgtcggggttctgtaggacttcatatcctatatacagttccatagaagctgcagagctcgcagaaaggattgagcgcagggagcaaatcattcaggaaatatggatgaacagtggtttggacacctcgctcccaagaaacatgggccagttctactgaaaaccacatgcatcttgatgcgatcgcactttctgaagaaggaaggatcccaaatgcccctccagttctggttcacctgtaccttctatgaaggagaattcgtcatgtcattcaacactcgtgaggccaggaagctattaaagggatgtttcaagctgtttctagcacattccaaaataaatgaggagggaagagtctt

SEQ ID NO: 131413 - DNA, 1558 bp, Homo sapiens
  Payload ID: 5646
  Gene Symbol: EVA1C
  Gene Name: eva-1 homolog C (C. elegans)
  ENST ID: ENST00000401402
  CDS Start-End: 170-1351
cctgggctggcccgcgcaggggaggaggctctggcagcctgggcagggaggcggcggggggccgcggagccgctggccatcgattctccccgccatgtgacgccgtccttagccctgcgacccccagcgcgtcccgggcctgcgcctccgccccgccgcgcagcgcacgatgcttctgccgggacgcgcacgccaaccgccgacgccccagcccgtgcagcatcccggcctccgccggcaggtagagccgccggggcagctcctgcgcctcttctactgcactgtcctggtctgctccaaagagatctcagcgctcaccgacttctctggttacctaaccaaactcctgcaaaaccacaccacctatgcctgtgatggggactatttgaatctacagtgccctcggcattctacgataagtgtccaatcggcattttatgggcaagattaccaaatgtgtagttcccagaagcctgcctcccagagggaagacagcttaacctgtgtggcagccaccaccttccagaaggtgctggacgaatgccagaaccagcgggcctgccacctcctggtcaatagccgtgtttttggacctgacctttgtccaggaagcagtaaatacctcctggtctcctttaaatgccaacctaatgaattaaaaaacaaaaccgtgtgtgaagaccaggagctgaaactgcactgccatgaatccaagttcctcaacatctactctgcgacctacggcaggaggacccaggaaagggacatctgctcctccaaggcagagcggctcccccctttcgttcccaagaacatactcacagcgattgatccagccattgctaatctaaaaccttctttgaagcagaaagatggtgaatatggtataaacttcgacccaagcggatcgaaggttctgaggaaagatggaattcttgttagcaactctctggcagcctttgcttacattagagcccacccggagagagctgccctgctgttcgtgtccagtgtctgcatcggcctggccctcacactgtgcgccctggtcatcagagagtcctgtgccaaggacttccgcgacttgcagctggggagggagcagctggtgccaggaagtgacaaggtcgaggaggacagcgaggatgaagaagaggaggaggacccctctgagtctgatttcccaggggaactgtcggggttctgtaggacttcatatcctatatacagttccatagaagctgcagagctcgcagaaaggattgagcgcagggagcaaatcattcaggaaatatggatgaacagtggtttggacacctcgctcccaagaaacatgggccagttctactgaaaaccacatgcatcttgatgcgatcgcactttctgaagaaggaaggatcccaaatgcccctccagttctggttcacctgtaccttctatgaaggagaattcgtcatgtcattcaacactcgtgaggccaggaagctattaaagggatgtttcaagctgtttctagcacattccaaaataaatgaggagggaagagtctttgttttct

SEQ ID NO: 131414 - DNA, 936 bp, Homo sapiens
  Payload ID: 5646
  Gene Symbol: EVA1C
  Gene Name: eva-1 homolog C (C. elegans)
  ENST ID: ENST00000412833
  CDS Start-End: 477-936
tggagtgccagtacacaacatggattgcaccaggctgggtctaagataaaaccagactgtggacaacgggacagataaggcccacatggctctgcactgcctgggtctgttactgtgtggaggaatgtcttagtctgttgctcctgtgggtgtagctaaaacacgaaccaggagccttcatccttagaaaggagtcagacagacacctgagaaccaatcccaaactgcacccttcccctgaacctcgtggaaccttctggaatgcaacttattactgccagagggtctttgatgagagtctactctccactatttgtcttcattacccacatattctctttccgtggaaaggttacctaaccaaactcctgcaaaaccacaccacctatgcctgtgatggggactatttgaatctacagtgccctcggcattctacgataagtgtccaatcggcattttatgggcaagattaccaaatgtgtagttcccagaagcctgcctcccagagggaagacagcttaacctgtgtggcagccaccaccttccagaaggtgctggacgaatgccagaaccagcgggcctgccacctcctggtcaatagccgtgtttttggacctgacctttgtccaggaagcagtaaatacctcctggtctcctttaaatgccaacctaatgaattaaaaaacaaaaccgtgtgtgaagaccaggagctgaaactgcactgccatgaatccaagttcctcaacatctactctgcgacctacggcaggaggacccaggaaagggacatctgctcctccaaggcagagcggctcccccctttcgattgcttgtcttactcagctttgcaagtcctatcccgaaggtgctatgggaagcagagatgcaaaatcatcgtcaacaatcaccattttggaagcccctgtttgccaggcg

SEQ ID NO: 131415 - DNA, 1745 bp, Homo sapiens
  Payload ID: 5646
  Gene Symbol: EVA1C
  Gene Name: eva-1 homolog C (C. elegans)
  ENST ID: ENST00000437338
  CDS Start-End: 418-630
cgggtgtggaaggcgctcaaggtgcgcggcccggggcgcgctactgggggcgccctccgcggtgggcagcgcgccagggatcggcctgggcagccgcggggcgcgcgaaggctgcgctttccctacggcccccctcgcttcctccggcacggcggcaacggagatttcctctcggggaaactacgcggatccttttcggggatcctcgccccgccccagttctccgccccctcccctttgctggggcgcctgggctggcccgcgcaggggaggaggctctggcagcctgggcagggaggcggcggggggccgcggagccgctggccatcgattctccccgccatgtgacgccgtccttagccctgcgacccccagcgcgtcccgggcctgcgcctccgccccgccgcgcagcgcacgatgcttctgccgggacgcgcacgccaaccgccgacgccccagcccgtgcagcatcccggcctccgccggcaggtagagccgccggggcagctcctgcgcctcttctactgcactgtcctggtctgctccaaagagatctcagcgctcaccgacttctctgaaggtgctggacgaatgccagaaccagcgggcctgccacctcctggtcaatagccgtgtttttggacctgacctttgtccaggaagcagtaaatacctcctggtctcctttaaatgccaacctaatgaattaaaaaacaaaaccgtgtgtgaagaccaggagctgaaactgcactgccatgaatccaagttcctcaacatctactctgcgacctacggcaggaggacccaggaaagggacatctgctcctccaaggcagagcggctcccccctttcgattgcttgtcttactcagctttgcaagtcctatcccgaaggtgctatgggaagcagagatgcaaaatcatcgtcaacaatcaccattttggaagcccctgtttgccaggcgtgaaaaaatacctcactgtgacctacgcatgtgttcccaagaacatactcacagcgattgatccagccattgctaatctaaaaccttctttgaagcagaaagatggtgaatatggtataaacttcgacccaagcggatcgaaggttctgaggaaagatggaattcttgttagcaactctctggcagcctttgcttacattagagcccacccggagagagctgccctgctgttcgtgtccagtgtctgcatcggcctggccctcacactgtgcgccctggtcatcagagagtcctgtgccaaggacttccgcgacttgcagctggggagggagcagctggtgccaggaagtgacaaggtcgaggaggacagcgaggatgaagaagaggaggaggacccctctgagtctgatttcccaggggaactgtcggggttctgtaggacttcatatcctatatacagttccatagaagctgcagagctcgcagaaaggattgagcgcagggagcaaatcattcaggaaatatggatgaacagtggtttggacacctcgctcccaagaaacatgggccagttctactgaaaaccacatgcatcttgatgcgatcgcactttctgaagaaggaaggatcccaaatgcccctccagttctggttcacctgtaccttctatgaaggagaattcgtcatgtcattcaacactcgtgaggccaggaagctattaaagggatgtttcaagctgtttctagcacattccaaaataaatgaggagggaagagtctt

SEQ ID NO: 131416 - DNA, 1548 bp, Homo sapiens
  Payload ID: 5646
  Gene Symbol: EVA1C
  Gene Name: eva-1 homolog C (C. elegans)
  ENST ID: ENST00000457807
  CDS Start-End: 302-880
ctttccctacggcccccctcgcttcctccggcacggcggcaacggagatttcctctcggggaaactacgcggatccttttcggggatcctcgccccgccccagttctccgccccctcccctttgctggggcgcctgggctggcccgcgcaggggaggaggctctggcagcctgggcagggaggcggcggggggccgcggagccgctggccatcgattctccccgccatgtgacgccgtccttagccctgcgacccccagcgcgtcccgggcctgcgcctccgccccgccgcgcagcgcacgatgcttctgccgggacgcgcacgccaaccgccgacgccccagcccgtgcagcatcccggcctccgccggcaggtagagccgccggggcagctcctgcgcctcttctactgcactgtcctggtctgctccaaagagatctcagcgctcaccgacttctctgatgaattaaaaaacaaaaccgtgtgtgaagaccaggagctgaaactgcactgccatgaatccaagttcctcaacatctactctgcgacctacggcaggaggacccaggaaagggacatctgctcctccaaggcagagcggctcccccctttcgattgcttgtcttactcagctttgcaagtcctatcccgaaggtgctatgggaagcagagatgcaaaatcatcgtcaacaatcaccattttggaagcccctgtttgccaggcgtgaaaaaatacctcactgtgacctacgcatgtgttcccaagaacatactcacagcgattgatccagccattgctaatctaaaaccttctttgaagcagaaagatggtgaatatggtaatttttatggcttactaccagcatttctctttaagtaaaggtataaacttcgacccaagcggatcgaaggttctgaggaaagatggaattcttgttagcaactctctggcagcctttgcttacattagagcccacccggagagagctgccctgctgttcgtgtccagtgtctgcatcggcctggccctcacactgtgcgccctggtcatcagagagtcctgtgccaaggacttccgcgacttgcagctggggagggagcagctggtgccaggaagtgacaaggtcgaggaggacagcgaggatgaagaagaggaggaggacccctctgagtctgatttcccaggggaactgtcggggttctgtaggacttcatatcctatatacagttccatagaagctgcagagctcgcagaaaggattgagcgcagggagcaaatcattcaggaaatatggatgaacagtggtttggacacctcgctcccaagaaacatgggccagttctactgaaaaccacatgcatcttgatgcgatcgcactttctgaagaaggaaggatcccaaatgcccctccagttctggttcacctgtaccttctatgaaggagaattcgtcatgtcattcaacactcgtgaggccaggaagctattaaagggatgtttcaagctgtttctagcacattccaaaataaatgaggagggaagagtctt

SEQ ID NO: 131417 - DNA, 1601 bp, Homo sapiens
  Payload ID: 5646
  Gene Symbol: EVA1C
  Gene Name: eva-1 homolog C (C. elegans)
  ENST ID: ENST00000435323
  CDS Start-End: 418-630
cgggtgtggaaggcgctcaaggtgcgcggcccggggcgcgctactgggggcgccctccgcggtgggcagcgcgccagggatcggcctgggcagccgcggggcgcgcgaaggctgcgctttccctacggcccccctcgcttcctccggcacggcggcaacggagatttcctctcggggaaactacgcggatccttttcggggatcctcgccccgccccagttctccgccccctcccctttgctggggcgcctgggctggcccgcgcaggggaggaggctctggcagcctgggcagggaggcggcggggggccgcggagccgctggccatcgattctccccgccatgtgacgccgtccttagccctgcgacccccagcgcgtcccgggcctgcgcctccgccccgccgcgcagcgcacgatgcttctgccgggacgcgcacgccaaccgccgacgccccagcccgtgcagcatcccggcctccgccggcaggtagagccgccggggcagctcctgcgcctcttctactgcactgtcctggtctgctccaaagagatctcagcgctcaccgacttctctgaaggtgctggacgaatgccagaaccagcgggcctgccacctcctggtcaatagccgtgtttttggacctgacctttgtccaggaagcagtaaatacctcctggtctcctttaaatgccaacctaatgaattaaaaaacaaaaccgtgtgtgaagaccaggagctgaaactgcactgccatgaatccaagttcctcaacatctactctgcgacctacggcaggaggacccaggaaagggacatctgctcctccaaggcagagcggctcccccctttcgttcccaagaacatactcacagcgattgatccagccattgctaatctaaaaccttctttgaagcagaaagatggtgaatatggtataaacttcgacccaagcggatcgaaggttctgaggaaagatggaattcttgttagcaactctctggcagcctttgcttacattagagcccacccggagagagctgccctgctgttcgtgtccagtgtctgcatcggcctggccctcacactgtgcgccctggtcatcagagagtcctgtgccaaggacttccgcgacttgcagctggggagggagcagctggtgccaggaagtgacaaggtcgaggaggacagcgaggatgaagaagaggaggaggacccctctgagtctgatttcccaggggaactgtcggggttctgtaggacttcatatcctatatacagttccatagaagctgcagagctcgcagaaaggattgagcgcagggagcaaatcattcaggaaatatggatgaacagtggtttggacacctcgctcccaagaaacatgggccagttctactgaaaaccacatgcatcttgatgcgatcgcactttctgaagaaggaaggatcccaaatgcccctccagttctggttcacctgtaccttctatgaaggagaattcgtcatgtcattcaacactcgtgaggccaggaagctattaaagggatgtttcaagctgtttctagcacattccaaaataaatgaggagggaagagtctt

SEQ ID NO: 131418 - DNA, 1500 bp, Homo sapiens
  Payload ID: 5647
  Gene Symbol: EVX1
  Gene Name: even-skipped homeobox 1
  ENST ID: ENST00000222761
  CDS Start-End: 332-937
atccacttgcgctcgccgagtggcgtcaccagcggtactgtaatgacgattgcagcaggaggatgacagcttagaaagaagagggcaatggggcttcctcccagaggcggtgcggcacagaggagcgctcgcttcacaaggtgaccctagctcccaccgccaccgccgcggtcgcggtccagaccgcgctccagcagctccgcgccctcccaggcacccggcctttctttctccctcttgcaaccaagatccgtccggccgctggagacccagggagccggggttaggaactcacttggggctttcccctcccccaccggagagccccgggatggagagccgaaaggacatggttgtgtttctggatgggggtcagcttggcactctggttggcaagagagtctcaaatttgtccgaagccgtgggcagcccgctgccggagccgcccgagaaaatggtgccccgtggttgcctgagccctcgggccgtccctccggccacccgggagcgcggcgggggaggcccggaggaggagccggtagatggactcgcaggcagcgcggcggggccgggcgccgagccccaggtagctggggcggccatgctcggcccaggacccccggccccctcagtcgacagcctctccggacaggggcaacccagtagctcggacaccgagtcggatttctatgaagaaatcgagggtccggctccgaggcgctggtcggcagtccgaacggagggagcgagacccccaagagcaacggcggcagtggtgggggcggctcgcaaggcaccctggcgtgcagcgccagtgaccagatgcgtcgttaccgcaccgccttcacccgagagcagattgcgcggctggagaaggaattctaccgggagaactacgtatccaggccgcggagatgtgagctggcggccgccctaaacctgccggaaaccaccatcaaggtgtggttccagaaccggcgcatgaaggacaagcggcagcgcctggccatgacgtggccgcacccggcggaccccgccttctacacttacatgatgagccatgcggcggccgcgggcggcctgccctaccccttcccatcgcacctgcccctgccctactactcgccggtgggcctgggcgccgcatccgccgcctccgccgccgcctcgcccttcagcggctcgctgcgcccgctcgacacgttccgcgtgctgtcgcagccctacccgcggcccgaactgctgtgcgccttccgccacccgccgctctaccccgggcccgcgcacggactgggcgcctctgccggcggcccctgctcctgcctcgcctgtcacagcggcccggccaacgggctggcgccccgggctgccgccgcctcggacttcacctgtgcctccacctcccgctcggactccttcctcaccttcgcgccctcggtgctcagcaaggcctcctccgtcgcgctggaccagagggaggaggtgcccctcactagataa

SEQ ID NO: 131419 - DNA, 2955 bp, Homo sapiens
  Payload ID: 5647
  Gene Symbol: EVX1
  Gene Name: even-skipped homeobox 1
  Uniprot ID: P49640
  ENST ID: ENST00000496902
  CDS Start-End: 332-1555
atccacttgcgctcgccgagtggcgtcaccagcggtactgtaatgacgattgcagcaggaggatgacagcttagaaagaagagggcaatggggcttcctcccagaggcggtgcggcacagaggagcgctcgcttcacaaggtgaccctagctcccaccgccaccgccgcggtcgcggtccagaccgcgctccagcagctccgcgccctcccaggcacccggcctttctttctccctcttgcaaccaagatccgtccggccgctggagacccagggagccggggttaggaactcacttggggctttcccctcccccaccggagagccccgggatggagagccgaaaggacatggttgtgtttctggatgggggtcagcttggcactctggttggcaagagagtctcaaatttgtccgaagccgtgggcagcccgctgccggagccgcccgagaaaatggtgccccgtggttgcctgagccctcgggccgtccctccggccacccgggagcgcggcgggggaggcccggaggaggagccggtagatggactcgcaggcagcgcggcggggccgggcgccgagccccaggtagctggggcggccatgctcggcccaggacccccggccccctcagtcgacagcctctccggacaggggcaacccagtagctcggacaccgagtcggatttctatgaagaaatcgaggtgagctgcaccccggactgcgccaccgggaacgccgagtaccagcacagcaaagggtccggctccgaggcgctggtcggcagtccgaacggagggagcgagacccccaagagcaacggcggcagtggtgggggcggctcgcaaggcaccctggcgtgcagcgccagtgaccagatgcgtcgttaccgcaccgccttcacccgagagcagattgcgcggctggagaaggaattctaccgggagaactacgtatccaggccgcggagatgtgagctggcggccgccctaaacctgccggaaaccaccatcaaggtgtggttccagaaccggcgcatgaaggacaagcggcagcgcctggccatgacgtggccgcacccggcggaccccgccttctacacttacatgatgagccatgcggcggccgcgggcggcctgccctaccccttcccatcgcacctgcccctgccctactactcgccggtgggcctgggcgccgcatccgccgcctccgccgccgcctcgcccttcagcggctcgctgcgcccgctcgacacgttccgcgtgctgtcgcagccctacccgcggcccgaactgctgtgcgccttccgccacccgccgctctaccccgggcccgcgcacggactgggcgcctctgccggcggcccctgctcctgcctcgcctgtcacagcggcccggccaacgggctggcgccccgggctgccgccgcctcggacttcacctgtgcctccacctcccgctcggactccttcctcaccttcgcgccctcggtgctcagcaaggcctcctccgtcgcgctggaccagagggaggaggtgcccctcactagataaggggccgccggctggctgccggctccatgacgcccgtggggtcaccccccggccccgggactcagccagcctcgctcctcgctcctcgctcctcgcccctaggacgccaagggggaaaggagagggcggaaaaggaccagcgggatccggccgcaagaattggaaagcctaggaagtggcggtggctggcgcgtttggggagcaggagtggggatagggaagcagagcttgagagaccttcctccggggcagcctccggacccaccgccccccaccagggtcgaggctgtagctccaaagctaaacaaaacttagcagcaacagcaaccaatatccagtccctcggcccctcggcccctcaccctccacctcacactcccttctcaccgggccccctctccccagccaaggcccaagcactggaaagggaaattgctgtctctctgaacaaaatgctgtgtatgcagagcaggtagagattaatctttgccagcttttccaaggcatgacaaggggctggtggatggcaacataccagtcatttggaggagagagtgagagatgatttactaccagggagaatccagccccttggcatgggacctggagcctcgactacacagcatcttctgggtctggcgtctgccagcacctgatctctttcctcattcccagctttgtgacacttctcaacttgcggctccatctctccctgcccccacttttttgttggccagggaggctgcagatgccccaggagccctttgccgcttctatgaggccaagccttttttccctgggcccagcacacaccctgattagcaagtgatgtgtgcgaggagggtttgtgaatgttgaatgtgtaataatgatcaccatggagctggccactgaccccagagctgagctgttaacaaggcgcccagggaagagcttagggagtgggaacttcacctccctctctcggtatctggcggtaaattagaggcaattttcatcctttgcttgttcaccttcacttcaccaggaactttctggccctaccctttgcattgggtattttacaactttctctcattttcttcccaagctaccactggagcttgactttcagataccagtgggagccttctgtcccttttggggaccctgtctgtggcctccaccagggtttgtttagagccactcccaaatcctcactcccacactcatccttgcagccagtttttgaggaagaggagaacgtgtaaccccaatgcaagcttcaccctgactgagagggagtggttcttcctgtagggaatgaatttggtttgatttggggttttcctttgaagcccaaagaacttgctgttatgattcgttaaccatattgcaataaaagctggacataattctca

SEQ ID NO: 131420 - DNA, 1635 bp, Homo sapiens
  Payload ID: 5647
  Gene Symbol: EVX1
  Gene Name: even-skipped homeobox 1
  ENST ID: ENST00000580535
  CDS Start-End: 1-321
cggacaccgagtcggatttctatgaagaaatcgagcctccttcccataaccctcagaacaacctggactccactcacatatactaagggtccggctccgaggcgctggtcggcagtccgaacggagggagcgagacccccaagagcaacggcggcagtggtgggggcggctcgcaaggcaccctggcgtgcagcgccagtgaccagatgcgtcgttaccgcaccgccttcacccgagagcagattgcgcggctggagaaggaattctaccgggagaactacgtatccaggccgcggagatgtgagctggcggccgccctaaacctgccggaaaccaccatcaaggtgtggttccagaaccggcgcatgaaggacaagcggcagcgcctggccatgacgtggccgcacccggcggaccccgccttctacacttacatgatgagccatgcggcggccgcgggcggcctgccctaccccttcccatcgcacctgcccctgccctactactcgccggtgggcctgggcgccgcatccgccgcctccgccgccgcctcgcccttcagcggctcgctgcgcccgctcgacacgttccgcgtgctgtcgcagccctacccgcggcccgaactgctgtgcgccttccgccacccgccgctctaccccgggcccgcgcacggactgggcgcctctgccggcggcccctgctcctgcctcgcctgtcacagcggcccggccaacgggctggcgccccgggctgccgccgcctcggacttcacctgtgcctccacctcccgctcggactccttcctcaccttcgcgccctcggtgctcagcaaggcctcctccgtcgcgctggaccagagggaggaggtgcccctcactagataaggggccgccggctggctgccggctccatgacgcccgtggggtcaccccccggccccgggactcagccagcctcgctcctcgctcctcgctcctcgcccctaggacgccaagggggaaaggagagggcggaaaaggaccagcgggatccggccgcaagaattggaaagcctaggaagtggcggtggctggcgcgtttggggagcaggagtggggatagggaagcagagcttgagagaccttcctccggggcagcctccggacccaccgccccccaccagggtcgaggctgtagctccaaagctaaacaaaacttagcagcaacagcaaccaatatccagtccctcggcccctcggcccctcaccctccacctcacactcccttctcaccgggccccctctccccagccaaggcccaagcactggaaagggaaattgctgtctctctgaacaaaatgctgtgtatgcagagcaggtagagattaatctttgccagcttttccaaggcatgacaaggggctggtggatggcaacataccagtcatttggaggagagagtgagagatgatttactaccagggagaatccagccccttggcatgggacctggagcctcgactacacagcatcttctgggtctggcgtctgccagcacctgatctctttcctcattcccagctttgtgacacttctcaacttgcggctccatctctccctgcccccacttttttgttggccagggaggctgcagatg

SEQ ID NO: 131421 - DNA, 4203 bp, Homo sapiens
  Payload ID: 5648
  Gene Symbol: EVX2
  Gene Name: even-skipped homeobox 2
  Uniprot ID: Q03828
  ENST ID: ENST00000308618
  CDS Start-End: 138-1568
caatttttccgcctccctccgaaagcgataataatatttagaggcgttcgctggggctgaatgagaattagccctaggcgcagcctatcattaggacgggacagcagggccactgtgacatttttaagaaagctgagatgatggaaagaataagaaaagagatgattctgatggagagagggctgcacagccctacggcgggcaagagattctccaatttgtccaactcggctggcaatgctgtgctcgaggccctggaaaattcgcagcacccggctcgcctaagcccgcgcctgccgtctgcccccctgcacagcgctctgggagaactccccgccaagggcaaattcgaaatagacactttgttcaacctgcagcacacgggcagcgaaagcaccgtctcctccgaaatctcctccgccgccgagagccgcaagaagccgggccattattcagaggcggccgctgaggccgacatgagcagcgacgtggaggtgggctgctccgcgcttcgctcccccgggggcctcggcgccgctcagcttaaggaaaacaatggcaaagggtacgcagagagcggctcggctgccggcaccacgacgtcggcgtcgggctcaggcctcggaagcctgcatggaggcagcggaggcagcggcgggagcgcggcgctgggtggctccggctctggcgcggatcaagtgcggcgctaccgtacggcgttcacccgcgagcagatcgcgcgcctggagaaggagttctaccgggagaactatgtgtcgcggccccgccggtgcgagctggccgcggcactcaacctgcccgaaaccaccatcaaggtgtggttccagaaccggcgcatgaaggacaagcggcagcgcctggccatgtcctggccgcacccagccgaccccagcttctacacctacatgatgacgcacgcggccgccaccggaagcctgccctaccccttccactcgcacgtgccgctgcactactacccgcacgtgggcgtcacggcggcggcggccgcggctgcagcctcaggcgcggcggccgcggcttcgtcgcccttcgctacttccatccggccactggacaccttccgcgccctctcgcacccctactctcggccggagctgctgtgtagcttccgccaccctggtctctaccaggctcccgcggccgccgcggggctcaacagcgcggcctctgccgcggcagccgcggcagccgcagcggctgcggcctcctcggcggcggcggccggcgcgccccccagcggcggctctgcaccctgctcgtgcctcagttgccacagcagtcagtcggcggcggcagccgcggcagcagctgccgcagccctgggttcccggggtggcggtggcggcggcggtggtggtggtggcggcggcggcgggggcgccggggccgggggaggctcggacttcggctgcagcgcggcggcgccgcgttccgagagcggcttcctgccctactcggccgcggtgcttagtaagacggccgtgagcccgccggaccagagggacgaggctccgctcaccagataactacgtcgccaccgccagggggccgcgcccgcctctctgagtgtgcccgggagtcccctgtgcgccccctgagccctccgcgcgttgcccgctgctgccgctgccgccagggggcgccccggggcgcgggaggccgaagggaacctgctccgaattgggggagaaggagcaggcgcaaaagcctggcgggcatccccctaaattatttctatttttgtatttgccacccagccgtctgcccttctctctcttttctggctcccgggacccactttccacctctgtcctgagcgcttggtttcccaaagaccaacccctcgccccctaagctagtcctggctgtgcactctcaggtccgggttgcttggctgaacggcgtggcccgaagcaacggagaaccacaacaaagacagagggggatgctgtgcgctggtgcttgggggcgggggaggagtcgccccggaggtttctcgctgctgctgtttttcttccttttctttcaacgagggtgggggaggtggcaaacgttctttcagcctgagcttattagggaccctgcccgaagagtgcgggagaacggaggtctgataaggccgggaggacggatggagagcgtgggcagcggtggttgtttgtgagattgtttactacgttcaggagcaaggcgggtagggatgtggccgccttccccgggaaggacaaagccgaggtgctggaaggggtggccgttgcgccgcctccttttcggtccaacacctttctctcttttggtctttggtttcagtgctgatggaatggaagcatcttgcatattttatgcaaaaagtgatggcaaaagaggttgccacggccagggaagggaaaggaagggagttggggtaggggtaagactgatagatcgctgtagtatttggagaggcgttttcagctcagttttccaactaccgggttccactcgatctgggaaatacttgaatctctagatatattaatattatcctaaagcatttccttagacacttttctaagttagaactctctatgtccctcgtccccttctctcctcgctttccttttcctcgggtgaaatggttcttggcatatttctcacgcatgtctattgcgccttcgcctctgcaaagccaccgctgggttgctgagacccgctctgccaacccggctactggaggggtttccttgaacttgaagaaaggtacatcaaaacccactagtgttaactgccacgtcaagtttgatgctaataatgtgcagattatgacgaaaattgccaatcatgctctctgatggacctcctttgaatgtggaattggagaaaagttccccgcacggagacctgctgtcaagtactaacaacccgctaagggaagtcattaggagagacggataagagactcggtacataaaacattgttcttggtgcatagaatgtatgttatttaatgttatctctgttacctgaagtgatttcgcagaagaaagccacgttcttatcatctcaattgccgattttcattttggtaacttggacgccctgggtagacttttctctgttaagttgatattccaccagtgtgaacagcctcattaaatcaagcccagatatttccataatgctccccgcagagccacttggctcctcacataatgagattttctgaagagttgaagccctaaaataacttgctagtgcatgtttagacccagcgaagtgggtatgtgtgtgtacgtgtattaaaatgtaggtaggctacctacatgtgtttgtgtatgtgtatatatatgtatatgtatgtatatgcatatatatatccgtgctcttaaatacatatgtaagagatacacacatattcatgtatacatacacattggcactattttctgtggtttatttcagatttgtgtcctgccatcatattgttattttaaagacactggattttaaaatatcatttcctaaatataggctttcagtaaacttttgaaagaattagttttccaggagaaattatttccatcaaatggaaaatacataaaggggaaacagtatttcgaaattcctggggtctattaaaatattaccataaaatattagagaactttccaatgaaatagcaatgatctaaaacttaagtttttgtttttgtttttaaaaacatgagactacttatgtaaaatattgattataccagctcttattcactgagtttacatttttaaaaatattaatatataatttaaggctaaataaaataaaccaaaatatggtaccctttatcagctttacctatttagattgttaaagtcctttgttatgatcagctaacagatgtatataaggtactttaggcagtaatgtttacatttcccccaaaaaatatatatgattgatgagaacgctggttggtaaaattaacataaattcatcatttgttgggtccattggatctggttattatattgaaataaaattgtaaataaagtcttcgtgctttaaatattgctggatgtatgaactcactgtaagatattttacaaatgtgcaataattataaagccttgtatattacgttatttattgtgtttggtcatgtaaaataaatgttatttaaatcaa

SEQ ID NO: 131422 - DNA, 3418 bp, Homo sapiens
  Payload ID: 5649
  Gene Symbol: ETAA1
  Gene Name: Ewing tumor-associated antigen 1
  Uniprot ID: Q9NY74
  ENST ID: ENST00000272342
  CDS Start-End: 131-2911
cttgcgcgcgccccaccgaccaaaatggcggctgccgttggtgcggggtgcggtttgtagtgctgttgccctactcatccctttgcaaaatgtgaaagaagaagcggctggtggaggcgggccataggcaatgagtcggcgaaggaaacatgatgacagccctagcccgaagaaaacgccgcacaaaacagtggcggcggaggaatgcggctcggtggtcgagccagggaggaggcggctgagatcggcccgcggttcgtggccctgcggggctagagaggggcctcccgggccagtgcggcagcgagagcagcctccgaccgccgccctgtgcagtaaaagtaaccccgaggaaaggtatgaaacaccaaagagagcgctgaaaatggactcactgtcatcttccttcagttctcctaatgatccagatggacagaatgatatcttttgggatcagaattctccattgacaaagcagttaggtaaaggaagaaaaaaacagatttacaccacagatagtgatgagatttcacatattgttaatcgtattgctcctcaggatgaaaaaccaacaacaaattctatgctggacatgtggattggtgaaactgctattccttgtactcccagtgtagcaaaaggaaaatcaagagcaaaaatcagctgcacaaagttaaaaacacaaagtcaagaagaagaacttatgaaactggctaaacaatttgataaaaatatggaagagctagatgtgattcaagagcaaaacaagaggaattatgattttacccagatgatttcagaaacagagattttaagtaattataaagataatatacagatgtggtcattacataatatagttcccgaaatagataatgctacaaaaaagccaatcaaaggaaacaccaagatatctgtggcaaataatcaaaatagcagtcagaagccatttgaccaaattgctgaagcagcctttaatgctatttttgatggttctactcagaaatgtagcggacagttaagccaagaactgccagaggctttttggagcaccagtaatactacctttgtaaagacaaatgctttgaaagaggagaaaatcattactaatgaaactctggtcattgaaaaactgtcaaataaaaccccacgatcactttcttctcaagtagatacacccataatgacaaaatcatgtgtgacttcctgtactaaggagccagaaacttctaataagtacattgatgcatttactacaagtgattttgaggatgattgggaaaacttactaggtagtgaaccttttgctatgcaaaatatcgacatgcctgaactctttccttctaaaacagcccatgttactgatcaaaaggaaatttgtacctttaatagtaaaactgttaaaaatacgtcaagagcaaatacaagtccagatgccaggttaggagattcaaaagtattacaagatctttcttcaaagacatatgacagagaattaatagatgcagaatatagattttcaccaaattcaaataaatcaaacaaattatccactggaaataaaatgaaatttgagaactcttccaataaaattgttattcaagacgaaattcaaaattgtatagttacatctaatctgacaaaaataaaggaagatattcttactaactctactgaagcttctgaaaggaagtcagctttgaacacaaggtattctaatgaacagaaaaataagtgcattttaaatcagtctattaaagcccctgttaatactgatctttttggctctgcaaatctaggcagtaaaaccagtgttagtaacccaaatcagactagtgcatcaaaagtaggttctttctttgatgattggaatgatccctcatttgccaatgaaattattaaagcatgtcatcaattagataatacctgggaagcagatgatgtagatgatgatttgttgtaccaagcatgtgatgatattgaaagactaactcagcaacaagacattagaaaggacagtaagacatcagaaagtatatgtgagatcaataataattccgaacatggagccaaactaactcagcaacaagacattagaaaggacagtaagacatcagaaagtatatgtgagatcaataataattccgaacatggagccaaaaacatgtttgctatatctaaacaaggaagtaatttggtacaatcaaagcatttgaatccaggcagcatttcagtgcagacatctttgacaaatagctcacaaatagataagccaatgaagatggagaaaggggaaatgtatggaaattctccaagatttttaggtgccacaaatttgactatgtattctaagatctcaaactgtcagataaataatctgcatgtgtcttatactaacactgatgttccaatacaagtgaatagttccaaattggttcttccaggaagttcaagtttgaatgtaacttcagatcatatgaatacagaaattactacttataagaagaaattgagtactaatcagccatgccataagactgtaacagatgaagctcagagcaaccttaacacaacagttggattttcaaagtttacatttacaaggatgaaaaattctcagattctttctcagtttaatcaaaattgtataactggaagtatgtctgataccaaaattacacagggtgtggagaaaaagaaaggtgtcaacccattactggaggaagctgttggacagcaatctttggtgaaactttctgaatctttgaaacaatcttcaaaagaggaagaagagaaaaatagaaagtgttctcctgaagaaattcagagaaaaagacaagaagcactggttcggagaatggctaaagcacgagcctcatctgtaaatgcagctcccacttcatttctttaatgaaatattagttggaagacttcacgaagactgctgataactatctgtgattgataggaaattttttttcttgatttctctgtgagaaatgtaatgctgacttttataaagcctggacttctactttatttaataaatcaatgtttgcaatggtaaatgaaacatttccttggacatgtatttgaaagtcattaaatacaaaagttttggaaattcaggaaagttagcaattatgtacggatattatacagaggaaagtagttatatttttaaatgctattattgcagaggatcatcaaaaaagaggtaatctacgttatttcctattctaatgtcttttcctaataaaaaacttcaactttctaagttagtagagactgtttttgtagttttactttcattaactgttgcttaaggtttttatacacttccagattttaattaatactttcatatttctaggaacatggttgatatgaaataaaggactttttatttgtaaggaaa

SEQ ID NO: 131423 - DNA, 1265 bp, Homo sapiens
  Payload ID: 5650
  Gene Symbol: EWSR1
  Gene Name: EWS RNA-binding protein 1
  Uniprot ID: Q01844
  ENST ID: ENST00000333395
  CDS Start-End: 20-1084
cgaggaggaaggagagaaaatggcgtccacggattacagtacctatagccaagctgcagcgcagcagggctacagtgcttacaccgcccagcccactcaaggatatgcacagaccacccaggcatatgggcaacaaagctatggaacctatggacagcccactgatgtcagctatacccaggctcagaccactgcaacctatgggcagaccgcctatgcaacttcttatggacagcctcccactggttatactactccaactgccccccaggcatacagccagcctgtccaggggtatggcactggtgcttatgataccaccactgctacagtcaccaccacccaggcctcctatgcagctcagtctgcatatggcactcagcctgcttatccagcctatgggcagcagccagcagccactgcacctacaagaccgcaggatggaaacaagcccactgagactagtcaacctcaatctagcacagggggttacaaccagcccagcctaggatatggacagagtaactacagttatccccaggtacctgggagctaccccatgcagccagtcactgcacctccatcctaccctcctaccagctattcctctacacagccgactagttatgatcagagcagttactctcagcagaacacctatgggcaaccgagcagctatggacagcagagtagctatggtcaacaaagcagctatgggcagcagcctcccactagttacccaccccaaactggatcctacagccaagctccaagtcaatatagccaacagagcagcagctacgggcagcagagttcattccgacaggaccaccccagtagcatgggtgtttatgggcaggagtctggaggattttccggaccaggagagaaccggagcatgagtggccctgataaccggggcaggggaagagggggatttgatcgtggaggcatgagcagaggtgggcggggaggaggacgcggtggaatggggttacaaagtgagagccttgtatacacttcaatacttaaaaagtacccgtactcagtactcagccggcagcataatgaaaagtgggactagacacggtgtccatatggagaggaaaaatatacatagaatatttttaacaaaatgtattcattgtataaatggaatccttctgtaactttggtaactgcatacttgttgtttggtaatgaaccagaggaggtataatactctagaattgtgtaacattaaagtgtaaacttttgtgtttaaa

SEQ ID NO: 131424 - DNA, 2267 bp, Homo sapiens
  Payload ID: 5650
  Gene Symbol: EWSR1
  Gene Name: EWS RNA-binding protein 1
  ENST ID: ENST00000331029
  CDS Start-End: 47-1903
gcgagagggagacggacgttgagagaacgaggaggaaggagagaaaatggcgtccacggattacagtacctatagccaagctgcagcgcagcagggctacagtgcttacaccgcccagcccactcaaggatatgcacagaccacccaggcatatgggcaacaaagctatggaacctatggacagcccactgatgtcagctatacccaggctcagaccactgcaacctatgggcagaccgcctatgcaacttcttatggacagcctcccactggttatactactccaactgccccccaggcatacagccagcctgtccaggggtatggcactggtgcttatgataccaccactgctacagtcaccaccacccaggcctcctatgcagctcagtctgcatatggcactcagcctgcttatccagcctatgggcagcagccagcagccactgcacctacaagaccgcaggatggaaacaagcccactgagactagtcaacctcaatctagcacagggggttacaaccagcccagcctaggatatggacagagtaactacagttatccccaggtacctgggagctaccccatgcagccagtcactgcacctccatcctaccctcctaccagctattcctctacacagccgactagttatgatcagagcagttactctcagcagaacacctatgggcaaccgagcagctatggacagcagagtagctatggtcaacaaagcagctatgggcagcagcctcccactagttacccaccccaaactggatcctacagccaagctccaagtcaatatagccaacagagcagcagctacgggcagcagagttcattccgacaggaccaccccagtagcatgggtgtttatgggcaggagtctggaggattttccggaccaggagagaaccggagcatgagtggccctgataaccggggcaggggaagagggggatttgatcgtggaggcatgagcagagatccagatgaagactctgacaacagtgcaatttatgtacaaggattaaatgacagtgtgactctagatgatctggcagacttctttaagcagtgtggggttgttaagatgaacaagagaactgggcaacccatgatccacatctacctggacaaggaaacaggaaagcccaaaggcgatgccacagtgtcctatgaagacccacccactgccaaggctgccgtggaatggtttgatgggaaagattttcaagggagcaaacttaaagtctcccttgctcggaagaagcctccaatgaacagtatgcggggtggtctgccaccccgtgagggcagaggcatgccaccaccactccgtggaggtccaggaggcccaggaggtcctgggggacccatgggtcgcatgggaggccgtggaggagatagaggaggcttccctccaagaggaccccggggttcccgagggaacccctctggaggaggaaacgtccagcaccgagctggagactggcagtgtcccaatccgggttgtggaaaccagaacttcgcctggagaacagagtgcaaccagtgtaaggccccaaagcctgaaggcttcctcccgccaccctttccgcccccgggtggtgatcgtggcagaggtggccctggtggcatgcggggaggaagaggtggcctcatggatcgtggtggtcccggtggaatgttcagaggtggccgtggtggagacagaggtggcttccgtggtggccggggcatggaccgaggtggctttggtggaggaagacgaggtggccctggggggccccctggacctttgatggaacagatgggaggaagaagaggaggacgtggaggacctggaaaaatggataaaggcgagcaccgtcaggagcgcagagatcggccctactagatgcagagaccccgcagagctgcattgactaccagatttattttttaaaccagaaaatgttttaaatttataattccatatttataatgttggccacaacattatgattattccttgtctgtactttagtatttttcaccatttgtgaagaaacattaaaacaagttaaatggtagtgtgcggagtttttttttcttccttcttttaaaaatggttgtttaagactttaacaatgggaaccccttgtgagcatgctcagtatcattgtggagaaccaagagggcctcttaactgtaacaatgttcatggttgtgatgttttttttttttttttaaataaaattccaaatgtttataaagagtca

SEQ ID NO: 131425 - DNA, 2552 bp, Homo sapiens
  Payload ID: 5650
  Gene Symbol: EWSR1
  Gene Name: EWS RNA-binding protein 1
  ENST ID: ENST00000332050
  CDS Start-End: 329-2191
agagccagcggacggaaccattccaaacagcctagtctcgtgctgagagcctctccggtttcacgctgagacccgctcacccccgctctggccccttagatgctattttggcccgagtgtcacgtcgggcgctctttagagaggactgggacaagagttgcggacgcgaagaacgagtaagcggtggttcatccctcctgaccccacccccgtggcctggcccgatggtcgcgcccggggttgcgagatttgcgcctgcgcagtgcggcgcctagagggaaagcgagagggagacggacgttgagagaacgaggaggaaggagagaaaatggcgtccacggattacagtacctatagccaagctgcagcgcagcagggctacagtgcttacaccgcccagcccactcaaggatatgcacagaccacccaggcatatgggcaacaaagctatggaacctatggacagcccactgatgtcagctatacccaggctcagaccactgcaacctatgggcagaccgcctatgcaacttcttatggacagcctcccactggttatactactccaactgccccccaggcatacagccagcctgtccaggggtatggcactggtgcttatgataccaccactgctacagtcaccaccacccaggcctcctatgcagctcagtctgcatatggcactcagcctgcttatccagcctatgggcagcagccagcagccactgcacctacaagaccgcaggatggaaacaagcccactgagactagtcaacctcaatctagcacagggggttacaaccagcccagcctaggatatggacagagtaactacagttatccccaggtacctgggagctaccccatgcagccagtcactgcacctccatcctaccctcctaccagctattcctctacacagccgactagttatgatcagagcagttactctcagcagaacacctatgggcaaccgagcagctatggacagcagagtagctatggtcaacaaagcagctatgggcagcagcctcccactagttacccaccccaaactggatcctacagccaagctccaagtcaatatagccaacagagcagcagctacgggcagcagatatacttcgttgggtcggggagaacaaagaatggttttgaaaccagagctttcagttcccttcatggtttccagagcgctggagagcgaggtggcttcaataagcctggtggacccatggatgaaggaccagatcttgatctaggcccacctgtagatccagatgaagactctgacaacagtgcaatttatgtacaaggattaaatgacagtgtgactctagatgatctggcagacttctttaagcagtgtggggttgttaagatgaacaagagaactgggcaacccatgatccacatctacctggacaaggaaacaggaaagcccaaaggcgatgccacagtgtcctatgaagacccacccactgccaaggctgccgtggaatggtttgatgggaaagattttcaagggagcaaacttaaagtctcccttgctcggaagaagcctccaatgaacagtatgcggggtggtctgccaccccgtgagggcagaggcatgccaccaccactccgtggaggtccaggaggcccaggaggtcctgggggacccatgggtcgcatgggaggccgtggaggagatagaggaggcttccctccaagaggaccccggggttcccgagggaacccctctggaggaggaaacgtccagcaccgagctggagactggcagtgtcccaatccgggttgtggaaaccagaacttcgcctggagaacagagtgcaaccagtgtaaggccccaaagcctgaaggcttcctcccgccaccctttccgcccccgggtggtgatcgtggcagaggtggccctggtggcatgcggggaggaagaggtggcctcatggatcgtggtggtcccggtggaatgttcagaggtggccgtggtggagacagaggtggcttccgtggtggccggggcatggaccgaggtggctttggtggaggaagacgaggtggccctggggggccccctggacctttgatggaacagatgggaggaagaagaggaggacgtggaggacctggaaaaatggataaaggcgagcaccgtcaggagcgcagagatcggccctactagatgcagagaccccgcagagctgcattgactaccagatttattttttaaaccagaaaatgttttaaatttataattccatatttataatgttggccacaacattatgattattccttgtctgtactttagtatttttcaccatttgtgaagaaacattaaaacaagttaaatggtagtgtgcggagtttttttttcttccttcttttaaaaatggttgtttaagactttaacaatgggaaccccttgtgagcatgctcagtatcattgtggagaaccaagagggcctcttaactgtaacaatgttcatggttgtgatgttttttttttttttttaaataaaattccaaatgtttataaagag

SEQ ID NO: 131426 - DNA, 1989 bp, Homo sapiens
  Payload ID: 5650
  Gene Symbol: EWSR1
  Gene Name: EWS RNA-binding protein 1
  Uniprot ID: Q01844
  ENST ID: ENST00000332035
  CDS Start-End: 12-1814
aaggagagaaaatggcgtccacggattacagtacctatagccaagctgcagcgcagcagggctacagtgcttacaccgcccagcccactcaaggatatgcacagaccacccaggcatatgggcaacaaagctatggaacctatggacagcccactgatgtcagctatacccaggctcagaccactgcaacctatgggcagaccgcctatgcaacttcttatggacagcctcccactggttatactactccaactgccccccaggcatacagccagcctgtccaggggtatggcactggtgcttatgataccaccactgctacagtcaccaccacccaggcctcctatgcagctcagtctgcatatggcactcagcctgcttatccagcctatgggcagcagccagcagccactgcacctacaagctattcctctacacagccgactagttatgatcagagcagttactctcagcagaacacctatgggcaaccgagcagctatggacagcagagtagctatggtcaacaaagcagctatgggcagcagcctcccactagttacccaccccaaactggatcctacagccaagctccaagtcaatatagccaacagagcagcagctacgggcagcagagttcattccgacaggaccaccccagtagcatgggtgtttatgggcaggagtctggaggattttccggaccaggagagaaccggagcatgagtggccctgataaccggggcaggggaagagggggatttgatcgtggaggcatgagcagaggtgggcggggaggaggacgcggtggaatgggcagcgctggagagcgaggtggcttcaataagcctggtggacccatggatgaaggaccagatcttgatctaggcccacctgtagatccagatgaagactctgacaacagtgcaatttatgtacaaggattaaatgacagtgtgactctagatgatctggcagacttctttaagcagtgtggggttgttaagatgaacaagagaactgggcaacccatgatccacatctacctggacaaggaaacaggaaagcccaaaggcgatgccacagtgtcctatgaagacccacccactgccaaggctgccgtggaatggtttgatgggaaagattttcaagggagcaaacttaaagtctcccttgctcggaagaagcctccaatgaacagtatgcggggtggtctgccaccccgtgagggcagaggcatgccaccaccactccgtggaggtccaggaggcccaggaggtcctgggggacccatgggtcgcatgggaggccgtggaggagatagaggaggcttccctccaagaggaccccggggttcccgagggaacccctctggaggaggaaacgtccagcaccgagctggagactggcagtgtcccaatccgggttgtggaaaccagaacttcgcctggagaacagagtgcaaccagtgtaaggccccaaagcctgaaggcttcctcccgccaccctttccgcccccgggtggtgatcgtggcagaggtggccctggtggcatgcggggaggaagaggtggcctcatggatcgtggtggtcccggtggaatgttcagaggtggccgtggtggagacagaggtggcttccgtggtggccggggcatggaccgaggtggctttggtggaggaagacgaggtggccctggggggccccctggacctttgatggaacagatgggaggaagaagaggaggacgtggaggacctggaaaaatggataaaggcgagcaccgtcaggagcgcagagatcggccctactagatgcagagaccccgcagagctgcattgactaccagatttattttttaaaccagaaaatgttttaaatttataattccatatttataatgttggccacaacattatgattattccttgtctgtactttagtatttttcaccatttgtgaagaaacattaaaacaagttaaatggta

SEQ ID NO: 131427 - DNA, 1289 bp, Homo sapiens
  Payload ID: 5650
  Gene Symbol: EWSR1
  Gene Name: EWS RNA-binding protein 1
  ENST ID: ENST00000360091
  CDS Start-End: 1-925
tcttgatctaggcccacctgtagatccagatgaagactctgacaacagtgcaatttatgtacaaggattaaatgacagtgtgactctagatgatctggcagacttctttaagcagtgtggggttgttaagatgaacaagagaactgggcaacccatgatccacatctacctggacaaggaaacaggaaagcccaaaggcgatgccacagtgtcctatgaagacccacccactgccaaggctgccgtggaatggtttgatgggaaagattttcaagggagcaaacttaaagtctcccttgctcggaagaagcctccaatgaacagtatgcggggtggtctgccaccccgtgagggcagaggcatgccaccaccactccgtggaggtccaggaggcccaggaggtcctgggggacccatgggtcgcatgggaggccgtggaggagatagaggaggcttccctccaagaggaccccggggttcccgagggaacccctctggaggaggaaacgtccagcaccgagctggagactggcagtgtcccaatccttcaattggtgatttctgctgtgatgtaattgtatgcaggggttgtggaaaccagaacttcgcctggagaacagagtgcaaccagtgtggtgatcgtggcagaggtggccctggtggcatgcggggaggaagaggtggcctcatggatcgtggtggtcccggtggaatgttcagaggtggccgtggtggagacagaggtggcttccgtggtggccggggcatggaccgaggtggctttggtggaggaagacgaggtggccctggggggccccctggacctttgatggaacagatgggaggaagaagaggaggacgtggaggacctggaaaaatggataaaggcgagcaccgtcaggagcgcagagatcggccctactagatgcagagaccccgcagagctgcattgactaccagatttattttttaaaccagaaaatgttttaaatttataattccatatttataatgttggccacaacattatgattattccttgtctgtactttagtatttttcaccatttgtgaagaaacattaaaacaagttaaatggtagtgtgcggagtttttttttcttccttcttttaaaaatggttgtttaagactttaacaatgggaaccccttgtgagcatgctcagtatcattgtggagaaccaagagggcctcttaactgtaacaatgttcatggttgtgatgttttttttttttttttaaataaaattccaaatgtttataaagagtca

SEQ ID NO: 131428 - DNA, 2654 bp, Homo sapiens
  Payload ID: 5650
  Gene Symbol: EWSR1
  Gene Name: EWS RNA-binding protein 1
  Uniprot ID: Q01844
  ENST ID: ENST00000397938
  CDS Start-End: 320-2290
ggacggaaccattccaaacagcctagtctcgtgctgagagcctctccggtttcacgctgagacccgctcacccccgctctggccccttagatgctattttggcccgagtgtcacgtcgggcgctctttagagaggactgggacaagagttgcggacgcgaagaacgagtaagcggtggttcatccctcctgaccccacccccgtggcctggcccgatggtcgcgcccggggttgcgagatttgcgcctgcgcagtgcggcgcctagagggaaagcgagagggagacggacgttgagagaacgaggaggaaggagagaaaatggcgtccacggattacagtacctatagccaagctgcagcgcagcagggctacagtgcttacaccgcccagcccactcaaggatatgcacagaccacccaggcatatgggcaacaaagctatggaacctatggacagcccactgatgtcagctatacccaggctcagaccactgcaacctatgggcagaccgcctatgcaacttcttatggacagcctcccactggttatactactccaactgccccccaggcatacagccagcctgtccaggggtatggcactggtgcttatgataccaccactgctacagtcaccaccacccaggcctcctatgcagctcagtctgcatatggcactcagcctgcttatccagcctatgggcagcagccagcagccactgcacctacaagaccgcaggatggaaacaagcccactgagactagtcaacctcaatctagcacagggggttacaaccagcccagcctaggatatggacagagtaactacagttatccccaggtacctgggagctaccccatgcagccagtcactgcacctccatcctaccctcctaccagctattcctctacacagccgactagttatgatcagagcagttactctcagcagaacacctatgggcaaccgagcagctatggacagcagagtagctatggtcaacaaagcagctatgggcagcagcctcccactagttacccaccccaaactggatcctacagccaagctccaagtcaatatagccaacagagcagcagctacgggcagcagagttcattccgacaggaccaccccagtagcatgggtgtttatgggcaggagtctggaggattttccggaccaggagagaaccggagcatgagtggccctgataaccggggcaggggaagagggggatttgatcgtggaggcatgagcagaggtgggcggggaggaggacgcggtggaatgggcagcgctggagagcgaggtggcttcaataagcctggtggacccatggatgaaggaccagatcttgatctaggcccacctgtagatccagatgaagactctgacaacagtgcaatttatgtacaaggattaaatgacagtgtgactctagatgatctggcagacttctttaagcagtgtggggttgttaagatgaacaagagaactgggcaacccatgatccacatctacctggacaaggaaacaggaaagcccaaaggcgatgccacagtgtcctatgaagacccacccactgccaaggctgccgtggaatggtttgatgggaaagattttcaagggagcaaacttaaagtctcccttgctcggaagaagcctccaatgaacagtatgcggggtggtctgccaccccgtgagggcagaggcatgccaccaccactccgtggaggtccaggaggcccaggaggtcctgggggacccatgggtcgcatgggaggccgtggaggagatagaggaggcttccctccaagaggaccccggggttcccgagggaacccctctggaggaggaaacgtccagcaccgagctggagactggcagtgtcccaatccgggttgtggaaaccagaacttcgcctggagaacagagtgcaaccagtgtaaggccccaaagcctgaaggcttcctcccgccaccctttccgcccccgggtggtgatcgtggcagaggtggccctggtggcatgcggggaggaagaggtggcctcatggatcgtggtggtcccggtggaatgttcagaggtggccgtggtggagacagaggtggcttccgtggtggccggggcatggaccgaggtggctttggtggaggaagacgaggtggccctggggggccccctggacctttgatggaacagatgggaggaagaagaggaggacgtggaggacctggaaaaatggataaaggcgagcaccgtcaggagcgcagagatcggccctactagatgcagagaccccgcagagctgcattgactaccagatttattttttaaaccagaaaatgttttaaatttataattccatatttataatgttggccacaacattatgattattccttgtctgtactttagtatttttcaccatttgtgaagaaacattaaaacaagttaaatggtagtgtgcggagtttttttttcttccttcttttaaaaatggttgtttaagactttaacaatgggaaccccttgtgagcatgctcagtatcattgtggagaaccaagagggcctcttaactgtaacaatgttcatggttgtgatgttttttttttttttttaaataaaattccaaatgtttataaagagtca

SEQ ID NO: 131429 - DNA, 2207 bp, Homo sapiens
  Payload ID: 5650
  Gene Symbol: EWSR1
  Gene Name: EWS RNA-binding protein 1
  Uniprot ID: Q01844
  ENST ID: ENST00000406548
  CDS Start-End: 65-2032
gcggcgcctagagggaaagcgagagggagacggacgttgagagaacgaggaggaaggagagaaaatggcgtccacggattacagtacctatagccaagctgcagcgcagcagggctacagtgcttacaccgcccagcccactcaaggatatgcacagaccacccaggcatatgggcaacaaagctatggaacctatggacagcccactgatgtcagctatacccaggctcagaccactgcaacctatgggcagaccgcctatgcaacttcttatggacagcctcccactggttatactactccaactgccccccaggcatacagccagcctgtccaggggtatggcactggtgcttatgataccaccactgctacagtcaccaccacccaggcctcctatgcagctcagtctgcatatggcactcagcctgcttatccagcctatgggcagcagccagcagccactgcacctacaagaccgcaggatggaaacaagcccactgagactagtcaacctcaatctagcacagggggttacaaccagcccagcctaggatatggacagagtaactacagttatccccaggtacctgggagctaccccatgcagccagtcactgcacctccatcctaccctcctaccagctattcctctacacagccgactagttatgatcagagcagttactctcagcagaacacctatgggcaaccgagcagctatggacagcagagtagctatggtcaacaaagcagctatgggcagcagcctcccactagttacccaccccaaactggatcctacagccaagctccaagtcaatatagccaacagagcagcagctacgggcagcagagttcattccgacaggaccaccccagtagcatgggtgtttatgggcaggagtctggaggattttccggaccaggagagaaccggagcatgagtggccctgataaccggggcaggggaagagggggatttgatcgtggaggcatgagcagaggtgggcggggaggaggacgcggtggaatgggcgctggagagcgaggtggcttcaataagcctggtggacccatggatgaaggaccagatcttgatctaggcccacctgtagatccagatgaagactctgacaacagtgcaatttatgtacaaggattaaatgacagtgtgactctagatgatctggcagacttctttaagcagtgtggggttgttaagatgaacaagagaactgggcaacccatgatccacatctacctggacaaggaaacaggaaagcccaaaggcgatgccacagtgtcctatgaagacccacccactgccaaggctgccgtggaatggtttgatgggaaagattttcaagggagcaaacttaaagtctcccttgctcggaagaagcctccaatgaacagtatgcggggtggtctgccaccccgtgagggcagaggcatgccaccaccactccgtggaggtccaggaggcccaggaggtcctgggggacccatgggtcgcatgggaggccgtggaggagatagaggaggcttccctccaagaggaccccggggttcccgagggaacccctctggaggaggaaacgtccagcaccgagctggagactggcagtgtcccaatccgggttgtggaaaccagaacttcgcctggagaacagagtgcaaccagtgtaaggccccaaagcctgaaggcttcctcccgccaccctttccgcccccgggtggtgatcgtggcagaggtggccctggtggcatgcggggaggaagaggtggcctcatggatcgtggtggtcccggtggaatgttcagaggtggccgtggtggagacagaggtggcttccgtggtggccggggcatggaccgaggtggctttggtggaggaagacgaggtggccctggggggccccctggacctttgatggaacagatgggaggaagaagaggaggacgtggaggacctggaaaaatggataaaggcgagcaccgtcaggagcgcagagatcggccctactagatgcagagaccccgcagagctgcattgactaccagatttattttttaaaccagaaaatgttttaaatttataattccatatttataatgttggccacaacattatgattattccttgtctgtactttagtatttttcaccatttgtgaagaaacattaaaacaagttaaatggta

SEQ ID NO: 131430 - DNA, 710 bp, Homo sapiens
  Payload ID: 5650
  Gene Symbol: EWSR1
  Gene Name: EWS RNA-binding protein 1
  ENST ID: ENST00000455726
  CDS Start-End: 12-710
aaggagagaaaatggcgtccacggattacagtacctatagccaagctgcagcgcagcagggctacagtgcttacaccgcccagcccactcaaggatatgcacagaccacccaggcatatgggcaacaaagctatggaacctatggacagcccactgatgtcagctatacccaggctcagaccactgcaacctatgggcagaccgcctatgcaacttcttatggacagcctcccactggttatactactccaactgccccccaggcatacagccagcctgtccaggggtatggcactggtgcttatgataccaccactgctacagtcaccaccacccaggcctcctatgcagctcagtctgcatatggcactcagcctgcttatccagcctatgggcagcagccagcagccactgcacctacaagctattcctctacacagccgactagttatgatcagagcagttactctcagcagaacacctatgggcaaccgagcagctatggacagcagagtagctatggtcaacaaagcagctatgggcagcagcctcccactagttacccaccccaaactggatcctacagccaagctccaagtcaatatagccaacagagcagcagctacgggcagcagagttcattccgacaggaccaccccagtagcatgggtgtttatgggcaggagtctggaggattttccggaccagga

SEQ ID NO: 131431 - DNA, 587 bp, Homo sapiens
  Payload ID: 5650
  Gene Symbol: EWSR1
  Gene Name: EWS RNA-binding protein 1
  ENST ID: ENST00000415761
  CDS Start-End: 48-587
agcgagagggagacggacgttgagagaacgaggaggaaggagagaaaatggcgtccacggattacagtacctatagccaagctgcagcgcagcagggctacagtgcttacaccgcccagcccactcaaggatatgcacagaccacccaggcctcctatgcagctcagtctgcatatggcactcagcctgcttatccagcctatgggcagcagccagcagccactgcacctacaagaccgcaggatggaaacaagcccactgagactagtcaacctcaatctagcacagggggttacaaccagcccagcctaggatatggacagagtaactacagttatccccaggtacctgggagctaccccatgcagccagtcactgcacctccatcctaccctcctaccagctattcctctacacagccgactagttatgatcagagcagttactctcagcagaacacctatgggcaaccgagcagctatggacagcagagtagctatggtcaacaaagcagctatgggcagcagcctcccactagttacccaccccaaactggatcctacagccaagctccaagtcaatatagc

SEQ ID NO: 131432 - DNA, 2189 bp, Homo sapiens
  Payload ID: 5650
  Gene Symbol: EWSR1
  Gene Name: EWS RNA-binding protein 1
  Uniprot ID: Q01844
  ENST ID: ENST00000414183
  CDS Start-End: 22-2007
aacgaggaggaaggagagaaaatggcgtccacggattacagtacctatagccaagctgcagcgcagcagggctacagtgcttacaccgcccagcccactcaaggatatgcacagaccacccaggcatatgggcaacaaagctatggaacctatggacagcccactgatgtcagctatacccaggctcagaccactgcaacctatgggcagaccgcctatgcaacttcttatggacagcctcccactgtagaagggaccagtacaggttatactactccaactgccccccaggcatacagccagcctgtccaggggtatggcactggtgcttatgataccaccactgctacagtcaccaccacccaggcctcctatgcagctcagtctgcatatggcactcagcctgcttatccagcctatgggcagcagccagcagccactgcacctacaagaccgcaggatggaaacaagcccactgagactagtcaacctcaatctagcacagggggttacaaccagcccagcctaggatatggacagagtaactacagttatccccaggtacctgggagctaccccatgcagccagtcactgcacctccatcctaccctcctaccagctattcctctacacagccgactagttatgatcagagcagttactctcagcagaacacctatgggcaaccgagcagctatggacagcagagtagctatggtcaacaaagcagctatgggcagcagcctcccactagttacccaccccaaactggatcctacagccaagctccaagtcaatatagccaacagagcagcagctacgggcagcagagttcattccgacaggaccaccccagtagcatgggtgtttatgggcaggagtctggaggattttccggaccaggagagaaccggagcatgagtggccctgataaccggggcaggggaagagggggatttgatcgtggaggcatgagcagaggtgggcggggaggaggacgcggtggaatgggcgctggagagcgaggtggcttcaataagcctggtggacccatggatgaaggaccagatcttgatctaggcccacctgtagatccagatgaagactctgacaacagtgcaatttatgtacaaggattaaatgacagtgtgactctagatgatctggcagacttctttaagcagtgtggggttgttaagatgaacaagagaactgggcaacccatgatccacatctacctggacaaggaaacaggaaagcccaaaggcgatgccacagtgtcctatgaagacccacccactgccaaggctgccgtggaatggtttgatgggaaagattttcaagggagcaaacttaaagtctcccttgctcggaagaagcctccaatgaacagtatgcggggtggtctgccaccccgtgagggcagaggcatgccaccaccactccgtggaggtccaggaggcccaggaggtcctgggggacccatgggtcgcatgggaggccgtggaggagatagaggaggcttccctccaagaggaccccggggttcccgagggaacccctctggaggaggaaacgtccagcaccgagctggagactggcagtgtcccaatccgggttgtggaaaccagaacttcgcctggagaacagagtgcaaccagtgtaaggccccaaagcctgaaggcttcctcccgccaccctttccgcccccgggtggtgatcgtggcagaggtggccctggtggcatgcggggaggaagaggtggcctcatggatcgtggtggtcccggtggaatgttcagaggtggccgtggtggagacagaggtggcttccgtggtggccggggcatggaccgaggtggctttggtggaggaagacgaggtggccctggggggccccctggacctttgatggaacagatgggaggaagaagaggaggacgtggaggacctggaaaaatggataaaggcgagcaccgtcaggagcgcagagatcggccctactagatgcagagaccccgcagagctgcattgactaccagatttattttttaaaccagaaaatgttttaaatttataattccatatttataatgttggccacaacattatgattattccttgtctgtactttagtatttttcaccatttgtgaagaaacattaaaacaagttaaatggtagtgtgcg

SEQ ID NO: 131433 - DNA, 582 bp, Homo sapiens
  Payload ID: 5650
  Gene Symbol: EWSR1
  Gene Name: EWS RNA-binding protein 1
  ENST ID: ENST00000447973
  CDS Start-End: 85-582
gagatttgcgcctgcgcagtgcggcgcctagagggaaagcgagagggagacggacgttgagagaacgaggaggaaggagagaaaatggcgtccacggattacagtacctatagccaagctgcagcgcagcagggctacagtgcttacaccgcccagcccactcaaggatatgcacagaccacccagcaggcatatgggcaacaaagctatggaacctatggacagcccactgatgtcagctatacccaggctcagaccactgcaacctatgggcagaccgcctatgcaacttcttatggacagcctcccactgaagggaccagtacaggttatactactccaactgccccccaggcatacagccagcctgtccaggggtatggcactggtgcttatgataccaccactgctacagtcaccaccacccaggcctcctatgcagctcagtctgcatatggcactcagcctgcttatccagcctatgggcagcagccagcagccactgcacctacaagaccgcaggatggaaacaagcccactgagactagtcaacctcaatctagcacagggggttacaaccag

SEQ ID NO: 131434 - DNA, 553 bp, Homo sapiens
  Payload ID: 5650
  Gene Symbol: EWSR1
  Gene Name: EWS RNA-binding protein 1
  ENST ID: ENST00000436425
  CDS Start-End: 85-553
gagatttgcgcctgcgcagtgcggcgcctagagggaaagcgagagggagacggacgttgagagaacgaggaggaaggagagaaaatggcgtccacggattacagtacctatagccaagctgcagcgcagcagggctacagtgcttacaccgcccagcccactcaaggatatgcacagaccacccagcaggcatatgggcaacaaagctatggaacctatggacagcccactgatgtcagctatacccaggctcagaccactgcaacctatgggcagaccgcctatgcaacttcttatggacagcctcccactgtagaagggaccagtacaggttatactactccaactgccccccaggcatacagccagcctgtccaggggtatggcactggtgcttatgataccaccactgctacagtcaccaccacccaggcctcctatgcagctcagtctgcatatggcactcagcctgcttatccagcctatgggcagcagccagcagccactgcacctacaagaccgcaggatggaaacaagcccactgagactagtc

SEQ ID NO: 131435 - DNA, 933 bp, Homo sapiens
  Payload ID: 5650
  Gene Symbol: EWSR1
  Gene Name: EWS RNA-binding protein 1
  ENST ID: ENST00000437155
  CDS Start-End: 56-933
agagggaaagcgagagggagacggacgttgagagaacgaggaggaaggagagaaaatggcgtccacggattacagtacctatagccaagctgcagcgcagcagggctacagtgcttacaccgcccagcccactcaaggatatgcacagaccacccagcaggcatatgggcaacaaagctatggaacctatggacagcccactgatgtcagctatacccaggctcagaccactgcaacctatgggcagaccgcctatgcaacttcttatggacagcctcccactggttatactactccaactgccccccaggcatacagccagcctgtccaggggtatggcactggtgcttatgataccaccactgctacagtcaccaccacccaggcctcctatgcagctcagtctgcatatggcactcagcctgcttatccagcctatgggcagcagccagcagccactgcacctacaagaccgcaggatggaaacaagcccactgagactagtcaacctcaatctagcacagggggttacaaccagcccagcctaggatatggacagagtaactacagttatccccaggtacctgggagctaccccatgcagccagtcactgcacctccatcctaccctcctaccagctattcctctacacagccgactagttatgatcagagcagttactctcagcagaacacctatgggcaaccgagcagctatggacagcagagtagctatggtcaacaaagcagctatgggcagcagcctcccactagttacccaccccaaactggatcctacagccaagctccaagtcaatatagccaacagagcagcagctacgggcagcagagttcattccgacaggaccaccccagtagcatgggtgtttatgggcaggagtctggaggattttccggaccaggagagaaccg

SEQ ID NO: 131436 - DNA, 560 bp, Homo sapiens
  Payload ID: 5650
  Gene Symbol: EWSR1
  Gene Name: EWS RNA-binding protein 1
  ENST ID: ENST00000444626
  CDS Start-End: 329-560
agagccagcggacggaaccattccaaacagcctagtctcgtgctgagagcctctccggtttcacgctgagacccgctcacccccgctctggccccttagatgctattttggcccgagtgtcacgtcgggcgctctttagagaggactgggacaagagttgcggacgcgaagaacgagtaagcggtggttcatccctcctgaccccacccccgtggcctggcccgatggtcgcgcccggggttgcgagatttgcgcctgcgcagtgcggcgcctagagggaaagcgagagggagacggacgttgagagaacgaggaggaaggagagaaaatggcgtccacggattacagtacctatagccaagctgcagcgcagcagggtgcttacaccgcccagcccactcaaggatatgcacagaccacccaggcatatgggcaacaaagctatggaacctatggacagcccactgatgtcagctatacccaggctcagaccactgcaacctatgggcagaccgcctatgcaacttcttatggacagcctcccactggttatactactc

SEQ ID NO: 131437 - DNA, 2446 bp, Homo sapiens
  Payload ID: 5650
  Gene Symbol: EWSR1
  Gene Name: EWS RNA-binding protein 1
  ENST ID: ENST00000629659
  CDS Start-End: 329-2083
agagccagcggacggaaccattccaaacagcctagtctcgtgctgagagcctctccggtttcacgctgagacccgctcacccccgctctggccccttagatgctattttggcccgagtgtcacgtcgggcgctctttagagaggactgggacaagagttgcggacgcgaagaacgagtaagcggtggttcatccctcctgaccccacccccgtggcctggcccgatggtcgcgcccggggttgcgagatttgcgcctgcgcagtgcggcgcctagagggaaagcgagagggagacggacgttgagagaacgaggaggaaggagagaaaatggcgtccacggattacagtacctatagccaagctgcagcgcagcagggctacagtgcttacaccgcccagcccactcaaggatatgcacagaccacccagcaggcatatgggcaacaaagctatggaacctatggacagcccactgatgtcagctatacccaggctcagaccactgcaacctatgggcagaccgcctatgcaacttcttatggacagcctcccactggttatactactccaactgccccccaggcatacagccagcctgtccaggggtatggcactggtgcttatgataccaccactgctacagtcaccaccacccaggcctcctatgcagctcagtctgcatatggcactcagcctgcttatccagcctatgggcagcagccagcagccactgcacctacaagaccgcaggatggaaacaagcccactgagactagtcaacctcaatctagcacagggggttacaaccagcccagcctaggatatggacagagtaactacagttatccccaggtacctgggagctaccccatgcagccagtcactgcacctccatcctaccctcctaccagctattcctctacacagccgactagttatgatcagagcagttactctcagcagaacacctatgggcaaccgagcagctatggacagcagagtagctatggtcaacaaagcagctatgggcagcagcctcccactagttacccaccccaaactggatcctacagccaagctccaagtcaatatagccaacagagcagcagctacgggcagcagagacccatggatgaaggaccagatcttgatctaggcccacctgtagatccagatgaagactctgacaacagtgcaatttatgtacaaggattaaatgacagtgtgactctagatgatctggcagacttctttaagcagtgtggggttgttaagatgaacaagagaactgggcaacccatgatccacatctacctggacaaggaaacaggaaagcccaaaggcgatgccacagtgtcctatgaagacccacccactgccaaggctgccgtggaatggtttgatgggaaagattttcaagggagcaaacttaaagtctcccttgctcggaagaagcctccaatgaacagtatgcggggtggtctgccaccccgtgagggcagaggcatgccaccaccactccgtggaggtccaggaggcccaggaggtcctgggggacccatgggtcgcatgggaggccgtggaggagatagaggaggcttccctccaagaggaccccggggttcccgagggaacccctctggaggaggaaacgtccagcaccgagctggagactggcagtgtcccaatccgggttgtggaaaccagaacttcgcctggagaacagagtgcaaccagtgtaaggccccaaagcctgaaggcttcctcccgccaccctttccgcccccgggtggtgatcgtggcagaggtggccctggtggcatgcggggaggaagaggtggcctcatggatcgtggtggtcccggtggaatgttcagaggtggccgtggtggagacagaggtggcttccgtggtggccggggcatggaccgaggtggctttggtggaggaagacgaggtggccctggggggccccctggacctttgatggaacagatgggaggaagaagaggaggacgtggaggacctggaaaaatggataaaggcgagcaccgtcaggagcgcagagatcggccctactagatgcagagaccccgcagagctgcattgactaccagatttattttttaaaccagaaaatgttttaaatttataattccatatttataatgttggccacaacattatgattattccttgtctgtactttagtatttttcaccatttgtgaagaaacattaaaacaagttaaatggtagtgtgcggagtttttttttcttccttcttttaaaaatggttgtttaagactttaacaatgggaaccccttgtgagcatgctcagtatcattgtggagaaccaagagggcctcttaactgtaacaatgttcatggttgtgatgttttttttttttttttaaataaaattccaaatgtttataaagagtc

SEQ ID NO: 131438 - DNA, 1278 bp, Homo sapiens
  Payload ID: 5651
  Gene Symbol: ERCC1
  Gene Name: excision repair cross-complementation group 1
  Uniprot ID: P07992
  ENST ID: ENST00000013807
  CDS Start-End: 193-1164
gggcgagccgaaggtggaggtcaaaggggcgtggcgttacagagcctctagcgctgggtgttggggacctgacgctatggagctctcggagttttgtgggggacggctgtgagtggggggttcctgctgcgggatgagaacgtagacgccagtggctcactcgctcctggcaccttccctttcaggctccagatggaccctgggaaggacaaagagggggtgccccagccctcagggccgccagcaaggaagaaatttgtgatacccctcgacgaggatgaggtccctcctggagtggccaagcccttattccgatctacacagagccttcccactgtggacacctcggcccaggcggcccctcagacctacgccgaatatgccatctcacagcctctggaaggggctggggccacgtgccccacagggtcagagcccctggcaggagagacgcccaaccaggccctgaaacccggggcaaaatccaacagcatcattgtgagccctcggcagaggggcaatcccgtactgaagttcgtgcgcaatgtgccctgggaatttggcgacgtaattcccgactatgtgctgggccagagcacctgtgccctgttcctcagcctccgctaccacaacctgcacccagactacatccatgggcggctgcagagcctggggaagaacttcgccttgcgggtcctgcttgtccaggtggatgtgaaagatccccagcaggccctcaaggagctggctaagatgtgtatcctggccgactgcacattgatcctcgcctggagccccgaggaagctgggcggtacctggagacctacaaggcctatgagcagaaaccagcggacctcctgatggagaagctagagcaggacttcgtctcccgggtgactgaatgtctgaccaccgtgaagtcagtcaacaaaacggacagtcagaccctcctgaccacatttggatctctggaacagctcatcgccgcatcaagagaagatctggccttatgcccaggcctgggccctcagaaagtaagagctctgggaaagaacccaaggagttgggggaaggagagagccccaaataaacacaacctgagaccccaaagttttaaggtgaaaaaagaaccaaagaccagacacagtggcttccgcctgtaatcccaacattttgggaggccaaggcgggaggactgcttgaggccagaagttggagaccagcctgggcaagtggacacctcatttttactaaaaataaaaaaaactagctgggca

SEQ ID NO: 131439 - DNA, 3828 bp, Homo sapiens
  Payload ID: 5651
  Gene Symbol: ERCC1
  Gene Name: excision repair cross-complementation group 1
  Uniprot ID: P07992
  ENST ID: ENST00000300853
  CDS Start-End: 593-1486
gggaacgtgtctgtgtcccttactgaaccgtaagctccgggaggacaacacggggctgtcgttggtcactgctgtgtcaccagcacggactcgcacaggaccgggaagagaggaagcgcgtggggggaataggtgtggaataaatgaatgaatgaggaaactgaagccaagtcaatgtctgagttggattcaaacttaagtctctccttactgagaggagggaccaagttggatctcctgcgatctgttctccactgagccctgccaggattctgggcacacagaagcgctcagtaagggctttgaaacttaacagtttgggagccagatcctcaggccacatctctctcctcccacgacctccgcggtcctccagaaccatagagagttgtacagagatcgccctgctctatgctctactctcctggggagcggggccagagaggccggaagtgctgcgagccctgggccacgctggccgtgctggcagtgggccgcctcgatccctctgcagtctttcccttgaggctccaagaccagcaggtgaggcctcgcggcgctgaaaccgtgaggcccggaccacaggctccagatggaccctgggaaggacaaagagggggtgccccagccctcagggccgccagcaaggaagaaatttgtgatacccctcgacgaggatgaggtccctcctggagtggccaagcccttattccgatctacacagagccttcccactgtggacacctcggcccaggcggcccctcagacctacgccgaatatgccatctcacagcctctggaaggggctggggccacgtgccccacagggtcagagcccctggcaggagagacgcccaaccaggccctgaaacccggggcaaaatccaacagcatcattgtgagccctcggcagaggggcaatcccgtactgaagttcgtgcgcaatgtgccctgggaatttggcgacgtaattcccgactatgtgctgggccagagcacctgtgccctgttcctcagcctccgctaccacaacctgcacccagactacatccatgggcggctgcagagcctggggaagaacttcgccttgcgggtcctgcttgtccaggtggatgtgaaagatccccagcaggccctcaaggagctggctaagatgtgtatcctggccgactgcacattgatcctcgcctggagccccgaggaagctgggcggtacctggagacctacaaggcctatgagcagaaaccagcggacctcctgatggagaagctagagcaggacttcgtctcccgggtgactgaatgtctgaccaccgtgaagtcagtcaacaaaacggacagtcagaccctcctgaccacatttggatctctggaacagctcatcgccgcatcaagagaagatctggccttatgcccaggcctgggccctcagaaagcccggaggctgtttgatgtcctgcacgagcccttcttgaaagtaccctgatgaccccagctgccaaggaaacccccagtgtaataataaatcgtcctcccaggccaggctcctgctggctgcgctggtgcagtctctggggagggattctgggggtgtcaccttctggtggcccaggtgggcaccttcagctttctttagttcctcagtttcccgggggcagactacacaggctgctgctgctgctgcttccgcttcttgtcccggcctgtgggagcctcctccccagactctgaattcagtggcggccctggcatctcctcttggggcactgtctctggcatccggctttcctgactctgcttcttcctcttcttggtggatcccggagttgccctggcttcaggctgtccctcccctggcagttcaggctctagtggctgaattggctcagtcactgtgtgacctctctctttcttcttcttcttcttcttggtggatgtgggagctgcctgaggctcaaggtcatccggcagctcaggccccaccacctctgtctctggctccactgtggcatcttgctgtttttctttcttcgtcttctttttgggagctgccagagctgcctgggcctgaggcttcgctccttctggctgttgaggcgccatggtcccccctggggactccagaggcttcatctccggctccactggctccatcgcctccgtccctggctccatcattgccatctgtcccttttcttttttcctcttcttcgtagggggcagagggatggcttcctccagtggctccaccttcacctgtggctgagactcaactgtcaccccctcctctggctccatcccttccgtccccttttgcctctttctctttttggtcggggacaggactgtgtcttctagaggctcagtgttaatctgttcctgcttcactgtcttgtcttctggctcgaaggtttctttccctttgggcttcttcctcttcttggtggtggacgggaacagcactcccagaggctccagtgtctccactgtgggctctgtccccacaggccctgctgcctctggttctttcagctgctgattttttttcttcttcttcttccgcacatccatttctggcgaccccaaagccatgtccacctccagggccccgtgcccattcactgcctcctgagtgactggggcctctgtcacctgcatctcctttttcttcttccctgaggtgagcaggttgggggccaaggctgacctaggccctgtgactggtgggttgcccccaaaggcacagaaccgaggcctcaggccaggagggatctgtggtgggggacttgctgggatgggctgcagagggctccctgacagggattgctggggaccctcaaggatccttagggtgccctggggggctgaggcacaggtgagtccacctcctgcctccgttgagggggccagcagggtcgcttctccagcttggggacagctgctgaggactcgatagcggtgccgcttgcctgccaatttgcccttgacgatctgggagccagagagaggcacatgccgcccattgaagctacagagagaaacagggagggcagaggcttaagtggaacaggagagggaaggttttttgattttttttttgtttttttttgagagagtcttgctctgttgcctaggctggagtgcagtggcatgatctcggctcactgcaatgtccacctcctgggttcaagcgattctcctgcctcagcctctcaagtagctgggattacaggcacctgccaccacgcccagccaatttttgtatttttagtagagacaatttcactatgttggccaggctggtcttgaactcctgacctcaagtgatctgctcgcctcggcctcccaaaggatgggattacaggcaccagccactgcgcctggctggcctctggtttttaataaaacatgactagagtgactccatcttaaagtgagtagctaggcacttacaaggttcatgcttatggcctgaaaataaccacatcccaggctgaccaccaattataattacagaatatttatggccatacagaacatgttccaccaagcctgcagaatgtccaaatgtcctaagaatgcagcccccattacttaaatataacataaatgagcaagcttaggttgcaggattaatggtcgtggataacaccaatagcccctacctttagtgagcttatctgcacactccaagtttaactatagttccttatagtttcttataagtagaaatactaacaaagggctgtgggtttctccccctgctttctgaggacactctactctgtaaaggagtagtttccaataaacttgtttctttcactgtgc

SEQ ID NO: 131440 - DNA, 949 bp, Homo sapiens
  Payload ID: 5651
  Gene Symbol: ERCC1
  Gene Name: excision repair cross-complementation group 1
  Uniprot ID: P07992
  ENST ID: ENST00000340192
  CDS Start-End: 67-888
ggctccaagaccagcaggtgaggcctcgcggcgctgaaaccgtgaggcccggaccacaggctccagatggaccctgggaaggacaaagagggggtgccccagccctcagggccgccagcaaggaagaaatttgtgatacccctcgacgaggatgaggtccctcctggagtggccaagcccttattccgatctacacagagccttcccactgtggacacctcggcccaggcggcccctcagacctacgccgaatatgccatctcacagcctctggaaggggctggggccacgtgccccacagggtcagagcccctggcaggagagacgcccaaccaggccctgaaacccggggcaaaatccaacagcatcattgtgagccctcggcagaggggcaatcccgtactgaagttcgtgcgcaatgtgccctgggaatttggcgacgtaattcccgactatgtgctgggccagagcacctgtgccctgttcctcagcctccgctaccacaacctgcacccagactacatccatgggcggctgcagagcctggggaagaacttcgccttgcgggtcctgcttgtccaggtggatgtgaaagatccccagcaggccctcaaggagctggctaagatgtgtatcctggccgactgcacattgatcctcgcctggagccccgaggaagctgggcggtacctggagacctacaaggcctatgagcagaaaccagcggacctcctgatggagaagctagagcaggacttcgtctcccggtctctggaacagctcatcgccgcatcaagagaagatctggccttatgcccaggcctgggccctcagaaagcccggaggctgtttgatgtcctgcacgagcccttcttgaaagtaccctgatgaccccagctgccaaggaaacccccagtgtaataataaatcgtcctcccaggccaggctc

SEQ ID NO: 131441 - DNA, 3119 bp, Homo sapiens
  Payload ID: 5651
  Gene Symbol: ERCC1
  Gene Name: excision repair cross-complementation group 1
  Uniprot ID: P07992
  ENST ID: ENST00000423698
  CDS Start-End: 101-778
acatctctcacgataaatgagtggggagaacttatagcccttgaagtcaaccatctcacacctttccaaaggacgcgaccataactctaaaaggctccagatggaccctgggaaggacaaagagggggtgccccagccctcagggccgccagcaaggaagaaatttgtgatacccctcgacgaggatgaggtccctcctggagtgaggggcaatcccgtactgaagttcgtgcgcaatgtgccctgggaatttggcgacgtaattcccgactatgtgctgggccagagcacctgtgccctgttcctcagcctccgctaccacaacctgcacccagactacatccatgggcggctgcagagcctggggaagaacttcgccttgcgggtcctgcttgtccaggtggatgtgaaagatccccagcaggccctcaaggagctggctaagatgtgtatcctggccgactgcacattgatcctcgcctggagccccgaggaagctgggcggtacctggagacctacaaggcctatgagcagaaaccagcggacctcctgatggagaagctagagcaggacttcgtctcccgggtgactgaatgtctgaccaccgtgaagtcagtcaacaaaacggacagtcagaccctcctgaccacatttggatctctggaacagctcatcgccgcatcaagagaagatctggccttatgcccaggcctgggccctcagaaagcccggaggctgtttgatgtcctgcacgagcccttcttgaaagtaccctgatgaccccagctgccaaggaaacccccagtgtaataataaatcgtcctcccaggccaggctcctgctggctgcgctggtgcagtctctggggagggattctgggggtgtcaccttctggtggcccaggtgggcaccttcagctttctttagttcctcagtttcccgggggcagactacacaggctgctgctgctgctgcttccgcttcttgtcccggcctgtgggagcctcctccccagactctgaattcagtggcggccctggcatctcctcttggggcactgtctctggcatccggctttcctgactctgcttcttcctcttcttggtggatcccggagttgccctggcttcaggctgtccctcccctggcagttcaggctctagtggctgaattggctcagtcactgtgtgacctctctctttcttcttcttcttcttcttggtggatgtgggagctgcctgaggctcaaggtcatccggcagctcaggccccaccacctctgtctctggctccactgtggcatcttgctgtttttctttcttcgtcttctttttgggagctgccagagctgcctgggcctgaggcttcgctccttctggctgttgaggcgccatggtcccccctggggactccagaggcttcatctccggctccactggctccatcgcctccgtccctggctccatcattgccatctgtcccttttcttttttcctcttcttcgtagggggcagagggatggcttcctccagtggctccaccttcacctgtggctgagactcaactgtcaccccctcctctggctccatcccttccgtccccttttgcctctttctctttttggtcggggacaggactgtgtcttctagaggctcagtgttaatctgttcctgcttcactgtcttgtcttctggctcgaaggtttctttccctttgggcttcttcctcttcttggtggtggacgggaacagcactcccagaggctccagtgtctccactgtgggctctgtccccacaggccctgctgcctctggttctttcagctgctgattttttttcttcttcttcttccgcacatccatttctggcgaccccaaagccatgtccacctccagggccccgtgcccattcactgcctcctgagtgactggggcctctgtcacctgcatctcctttttcttcttccctgaggtgagcaggttgggggccaaggctgacctaggccctgtgactggtgggttgcccccaaaggcacagaaccgaggcctcaggccaggagggatctgtggtgggggacttgctgggatgggctgcagagggctccctgacagggattgctggggaccctcaaggatccttagggtgccctggggggctgaggcacaggtgagtccacctcctgcctccgttgagggggccagcagggtcgcttctccagcttggggacagctgctgaggactcgatagcggtgccgcttgcctgccaatttgcccttgacgatctgggagccagagagaggcacatgccgcccattgaagctacagagagaaacagggagggcagaggcttaagtggaacaggagagggaaggttttttgattttttttttgtttttttttgagagagtcttgctctgttgcctaggctggagtgcagtggcatgatctcggctcactgcaatgtccacctcctgggttcaagcgattctcctgcctcagcctctcaagtagctgggattacaggcacctgccaccacgcccagccaatttttgtatttttagtagagacaatttcactatgttggccaggctggtcttgaactcctgacctcaagtgatctgctcgcctcggcctcccaaaggatgggattacaggcaccagccactgcgcctggctggcctctggtttttaataaaacatgactagagtgactccatcttaaagtgagtagctaggcacttacaaggttcatgcttatggcctgaaaataaccacatcccaggctgaccaccaattataattacagaatatttatggccatacagaacatgttccaccaagcctgcagaatgtccaaatgtcctaagaatgcagcccccattacttaaatataacataaatgagcaagcttaggttgcaggattaatggtcgtggataacaccaatagcccctacctttagtgagcttatctgcacactccaagtttaactatagttccttatagtttcttataagtagaaatactaacaaagggctgtgggtttctccccctgctttctgaggacactctactctgtaaaggagtagtttccaataaacttgtttctttcactgtg

SEQ ID NO: 131442 - DNA, 556 bp, Homo sapiens
  Payload ID: 5651
  Gene Symbol: ERCC1
  Gene Name: excision repair cross-complementation group 1
  ENST ID: ENST00000587888
  CDS Start-End: 1-138
tttggcgacgtaattcccgactatgtgctgggccagagcacctgtgccctgttcctcagggcccctggcacctgttctccccttgaagcccaagtctcttcccctcttcatgaagaagccaggggtctggtcttctagcctccgctaccacaacctgcacccagactacatccatgggcggctgcagagcctggggaagaacttcgccttgcgggtcctgcttgtccaggtggatgtgaaagatccccagcaggccctcaaggagctggctaagatgtgtatcctggccgactgcacattgatcctcgcctggagccccgaggaagctgggcggtacctggagacctacaaggcctatgagcagaaaccagcggacctcctgatggagaagctagagcaggacttcgtctcccgggtgactgaatgtctgaccaccgtgaagtcagtcaacaaaacggacagtcagaccctcctgaccacatttggatctctggaacagctcatcgccgcatcaagagaagatctggccttatgcccaggcctgggccctcagaaa

SEQ ID NO: 131443 - DNA, 449 bp, Homo sapiens
  Payload ID: 5651
  Gene Symbol: ERCC1
  Gene Name: excision repair cross-complementation group 1
  ENST ID: ENST00000592444
  CDS Start-End: 1-337
gtgtatcctggccgactgcacattgatcctcgcctggagccccgaggaagctgggcggtacctggagacctacaaggcctatgagcagaaaccagcggacctcctgatggagaagctagagcaggacttcgtctcccggtctctggaacagctcatcgccgcatcaagagaagatctggccttatgcccaggcctgggccctcagaaagtaagagctctgggaaagaacccaaggagttgggggaaggagagagccccaaataaacacaacctgagaccccaaagttttaaggtgaaaaaagaaccaaagaccagacacagtggcttccgcctgtaatcccaacattttgggaggccaaggcgggaggactgcttgaggccagaagttggagaccagcctgggcaagtggacacctcatttttactaaaaataaaaaaaactagctggg

SEQ ID NO: 131444 - DNA, 674 bp, Homo sapiens
  Payload ID: 5651
  Gene Symbol: ERCC1
  Gene Name: excision repair cross-complementation group 1
  ENST ID: ENST00000589214
  CDS Start-End: 250-674
gagattacaggcgggagccaccgcgcccggcccagttctggggttttttgtgtgtgtggaagtcccacttctgatccaacctcagtctctcatgctgcagatctttcctttgctgtacatccatccacagcctctccagcggagacttgggatgtcccaccaaaaaaggtgcccgggaggacgcggagtaggggctaggcgcctccactgccccccatccgggggcctccgcttggggccgggctccagatggaccctgggaaggacaaagagggggtgccccagccctcagggccgccagcaaggaagaaatttgtgatacccctcgacgaggatgaggtccctcctggagtggccaagcccttattccgatctacacagagccttcccactgtggacacctcggcccaggcggcccctcagacctacgccgaatatgccatctcacagcctctggaaggggctggggccacgtgccccacagggtcagagcccctggcaggagagacgcccaaccaggccctgaaacccggggcaaaatccaacagcatcattgtgagccctcggcagaggggcaatcccgtactgaagttcgtgcgcaatgtgccctgggaatttggcgacgtaattcccgactatgtgctgggccagagcacctgtgccctgttcctcag

SEQ ID NO: 131445 - DNA, 345 bp, Homo sapiens
  Payload ID: 5651
  Gene Symbol: ERCC1
  Gene Name: excision repair cross-complementation group 1
  ENST ID: ENST00000590701
  CDS Start-End: 1-275
acaacctgcacccagactacatccatgggcggctgcagagcctggggaagaacttcgccttgcgggtcctgcttgtccaggtggatgtgaaagatccccagcaggccctcaaggagctggctaagatgtgtatcctggccgactgcacattgatcctcgcctggagtctctggaacagctcatcgccgcatcaagagaagatctggccttatgcccaggcctgggccctcagaaagcccggaggctgtttgatgtcctgcacgagcccttcttgaaagtaccctgatgaccccagctgccaaggaaacccccagtgtaataataaatcgtcctcccaggccaggc

SEQ ID NO: 131446 - DNA, 938 bp, Homo sapiens
  Payload ID: 5651
  Gene Symbol: ERCC1
  Gene Name: excision repair cross-complementation group 1
  ENST ID: ENST00000592083
  CDS Start-End: 165-938
ggcgcgatctcggctcactgcaacctctgcctcccgggttcaagcgattctcctgcctcagcctccacagtagttgggattacaggatcacgtgataaggcactagcagatgtggttggaatccttgctgtgctgaatcctggctgtgtgaccccaagctccagatggaccctgggaaggacaaagagggggtgccccagccctcagggccgccagcaaggaagaaatttgtgatacccctcgacgaggatgaggtccctcctggagtggccaagcccttattccgatctacacagagccttcccactgtggacacctcggcccaggcggcccctcagacctacgccgaatatgccatctcacagcctctggaaggggctggggccacgtgccccacagggtcagagcccctggcaggagagacgcccaaccaggccctgaaacccggggcaaaatccaacagcatcattgtgagccctcggcagaggggcaatcccgtactgaagttcgtgcgcaatgtgccctgggaatttggcgacgtaattcccgactatgtgctgggccagagcacctgtgccctgttcctcagcctccgctaccacaacctgcacccagactacatccatgggcggctgcagagcctggggaagaacttcgccttgcgggtcctgcttgtccaggtggatgtgaaagatccccagcaggccctcaaggagctggctaagatgtgtatcctggccgactgcacattgatcctcgcctggagccccgaggaagctgggcggtacctggagacctacaaggcctatgagcagaaaccagcggacctcctgatggagaagctagagcaggacttcgtctcccgggtgactgaatgtctgaccaccgtgaagtcagtcaacaaaacggacagtcagaccctcctgaccacatttgga

SEQ ID NO: 131447 - DNA, 1453 bp, Homo sapiens
  Payload ID: 5651
  Gene Symbol: ERCC1
  Gene Name: excision repair cross-complementation group 1
  Uniprot ID: P07992
  ENST ID: ENST00000589165
  CDS Start-End: 553-1446
ctgggaacgtgtctgtgtcccttactgaaccgtaagctccgggaggacaacacggggctgtcgttggtcactgctgtgtcaccagcacggactcgcacaggaccgggaagagaggaagcgcgtggggggaataggtgtggaataaatgaatgaatgaggaaactgaagccaagtcaatgtctgagttggattcaaacttaagtctctccttactgagaggagggaccaagttggatctcctgcgatctgttctccactgagccctgccaggattctgggcacacagaagcgctcagtaagggctttgaaacttaacagtttgggagccagatcctcaggccacatctctctcctcccacgacctccgcggtcctccagaaccatagagagttgtacagagatcgccctgctctatgctctactctcctggggagcggggccagagaggccggaagtgctgcgagccctgggccacgctggccgtgctggcagtgggccgcctcgatccctctgcagtctttcccttgaggctccaagaccagcaggctccagatggaccctgggaaggacaaagagggggtgccccagccctcagggccgccagcaaggaagaaatttgtgatacccctcgacgaggatgaggtccctcctggagtggccaagcccttattccgatctacacagagccttcccactgtggacacctcggcccaggcggcccctcagacctacgccgaatatgccatctcacagcctctggaaggggctggggccacgtgccccacagggtcagagcccctggcaggagagacgcccaaccaggccctgaaacccggggcaaaatccaacagcatcattgtgagccctcggcagaggggcaatcccgtactgaagttcgtgcgcaatgtgccctgggaatttggcgacgtaattcccgactatgtgctgggccagagcacctgtgccctgttcctcagcctccgctaccacaacctgcacccagactacatccatgggcggctgcagagcctggggaagaacttcgccttgcgggtcctgcttgtccaggtggatgtgaaagatccccagcaggccctcaaggagctggctaagatgtgtatcctggccgactgcacattgatcctcgcctggagccccgaggaagctgggcggtacctggagacctacaaggcctatgagcagaaaccagcggacctcctgatggagaagctagagcaggacttcgtctcccgggtgactgaatgtctgaccaccgtgaagtcagtcaacaaaacggacagtcagaccctcctgaccacatttggatctctggaacagctcatcgccgcatcaagagaagatctggccttatgcccaggcctgggccctcagaaagcccggaggctgtttgatgtcctgcacgagcccttcttgaaagtaccctgatgacccc

SEQ ID NO: 131448 - DNA, 836 bp, Homo sapiens
  Payload ID: 5651
  Gene Symbol: ERCC1
  Gene Name: excision repair cross-complementation group 1
  ENST ID: ENST00000591636
  CDS Start-End: 128-769
gacctgacgctatggagctctcggagttttgtgggggacggctgtgagtggggggttcctgctgcgggatgagaacgtagacgccagtggctcactcgctcctggcaccttccctttcaggctccagatggaccctgggaaggacaaagagggggtgccccagccctcagggccgccagcaaggaagaaatttgtgatacccctcgacgaggatgaggtccctcctggagtggccaagcccttattccgatctacacagagccttcccactgtggacacctcggcccaggcggcccctcagacctacgccgaatatgccatctcacagcctctggaaggggctggggccacgtgccccacagggtcagagcccctggcaggagagacgcccaaccaggccctgaaacccggggcaaaatccaacagcatcattgtgagccctcggcagaggggcaatcccgtactgaagttcgtgcgcaatgtgccctgggaatttggcgacgtaattcccgactatgtgctgggccagagcacctgtgccctgttcctcagcctccgctaccacaacctgcacccagactacatccatgggcggctgcagagcctggggaagaacttcgccttgcgggtcctgcttgtccaggtggatgtgaaagatccccagcaggccctcaaggagctggctaagatgtgtatcctggccgactgcacattgatcctcgcctggaggcccggaggctgtttgatgtcctgcacgagcccttcttgaaagtaccctgatgaccccagctgccaaggaaacccccagtgtaataataaatcgtcctcccaggcca

SEQ ID NO: 131449 - DNA, 738 bp, Homo sapiens
  Payload ID: 5651
  Gene Symbol: ERCC1
  Gene Name: excision repair cross-complementation group 1
  ENST ID: ENST00000592023
  CDS Start-End: 37-738
aggggcggagcgatgggacttgtggacctgctccagatggaccctgggaaggacaaagagggggtgccccagccctcagggccgccagcaaggaagaaatttgtgatacccctcgacgaggatgaggtccctcctggagtggccaagcccttattccgatctacacagagccttcccactgtggacacctcggcccaggcggcccctcagacctacgccgaatatgccatctcacagcctctggaaggggctggggccacgtgccccacagggtcagagcccctggcaggagagacgcccaaccaggccctgaaacccggggcaaaatccaacagcatcattgtgagccctcggcagaggggcaatcccgtactgaagttcgtgcgcaatgtgccctgggaatttggcgacgtaattcccgactatgtgctgggccagagcacctgtgccctgttcctcagcctccgctaccacaacctgcacccagactacatccatgggcggctgcagagcctggggaagaacttcgccttgcgggtcctgcttgtccaggtggatgtgaaagatccccagcaggccctcaaggagctggctaagatgtgtatcctggccgactgcacattgatcctcgcctggagccccgaggaagctgggcggtacctggagacctacaaggcctatgagcagaaaccagcggacctcctgatggagaagctagagcaggacttcgtctcccgg

SEQ ID NO: 131450 - DNA, 738 bp, Homo sapiens
  Payload ID: 5651
  Gene Symbol: ERCC1
  Gene Name: excision repair cross-complementation group 1
  ENST ID: ENST00000589381
  CDS Start-End: 112-738
gctctcggagttttgtgggggacggctgtgagtggggggttcctgctgcgggatgagaacgtagacgccagtggctcactcgctcctggcaccttccctttcaggctccagatggaccctgggaaggacaaagagggggtgccccagccctcagggccgccagcaaggaagaaatttgtgatacccctcgacgaggatgaggtccctcctggagtgaggggcaatcccgtactgaagttcgtgcgcaatgtgccctgggaatttggcgacgtaattcccgactatgtgctgggccagagcacctgtgccctgttcctcagcctccgctaccacaacctgcacccagactacatccatgggcggctgcagagcctggggaagaacttcgccttgcgggtcctgcttgtccaggtggatgtgaaagatccccagcaggccctcaaggagctggctaagatgtgtatcctggccgactgcacattgatcctcgcctggagccccgaggaagctgggcggtacctggagacctacaaggcctatgagcagaaaccagcggacctcctgatggagaagctagagcaggacttcgtctcccgggtgactgaatgtctgaccaccgtgaagtcagtcaacaaaacggacagtcagaccctcctgaccacatttggatctctggaacagctcatcgccgcatcaagagaagatctggccttatgcccaggcctgggccctcagaaa

SEQ ID NO: 131451 - DNA, 2871 bp, Homo sapiens
  Payload ID: 5652
  Gene Symbol: ERCC2
  Gene Name: excision repair cross-complementation group 2
  ENST ID: ENST00000391941
  CDS Start-End: 754-2871
gctatcttgctcaagctgatctcgaactcctgggttcgatcaatactcagacaatcttggcaggcgcaggaggaccaaattctagtgaatgagatcgagtctctcggctctttcccttccatgttttctttttgattggccctcgacgatcctcagtgacgcctcccgcaccgcctcacccgagagtcagccgccctcgcttttccgtgcgcacgcgcagtatcccgattggctctgccctagcggattgacgggcaggttagccaatggtctcgtaatataggtggagcgagccctcgaggatgtccacgacccggcctctcgctgaatattcatgagggaggcgggtcgaccccgctgcacagtccggccggcgccatgaagtgagaagggggctgggggtcgcgctcgctagcgggcgcggggggtcttgaagatggggtcatcggtgggcgcgcctgggtccccaagggggcgaggggagggtgaaggggtgggacgggggcagccgcagggagcagcagtgatagcgaggagacactgagggggccccgaggctcctgaggacctgagggttaccgggggcgccgggcccgtcacccttctctgggctcgacgaccgggcactgtggaggcgggagaggggctgaggggacgggaactgacccagcagcccctgccgccaggctcaacgtggacgggctcctggtctacttcccgtacgactacatctaccccgagcagttctcctacatgcgggagctcaaacgcacgctggacgccaagggtcatggagtcctggagatgccctcaggcaccgggaagacagtatccctgttggccctgatcatggcataccagagagcatatccgctggaggtgaccaaactcatctactgctcaagaactgtgccagagattgagaaggtgattgaagagcttcgaaagttgctcaacttctatgagaagcaggagggcgagaagctgccgtttctgggactggctctgagctcccgcaaaaacttgtgtattcaccctgaggtgacacccctgcgctttgggaaggacgtcgatgggaaatgccacagcctcacagcctcctatgtgcgggcgcagtaccagcatgacaccagcctgccccactgccgattctatgaggaatttgatgcccatgggcgtgaggtgcccctccccgctggcatctacaacctggatgacctgaaggccctggggcggcgccagggctggtgcccatacttccttgctcgatactcaatcctgcatgccaatgtggtggtttatagctaccactacctcctggaccccaagattgcagacctggtgtccaaggaactggcccgcaaggccgtcgtggtcttcgacgaggcccacaacattgacaacgtctgcatcgactccatgagcgtcaacctcacccgccggacccttgaccggtgccagggcaacctggagaccctgcagaagacggtgctcaggatcaaagagacagacgagcagcgcctgcgggacgagtaccggcgtctggtggaggggctgcgggaggccagcgccgcccgggagacggacgcccacctggccaaccccgtgctgcccgacgaagtgctgcaggaggcagtgcctggctccatccgcacggccgagcatttcctgggcttcctgaggcggctgctggagtacgtgaagtggcggctgcgtgtgcagcatgtggtgcaggagagcccgcccgccttcctgagcggcctggcccagcgcgtgtgcatccagcgcaagcccctcagattctgtgctgaacgcctccggtccctgctgcatactctggagatcaccgaccttgctgacttctccccgctcaccctccttgctaactttgccacccttgtcagcacctacgccaaaggcttcaccatcatcatcgagccctttgacgacagaaccccgaccattgccaaccccatcctgcacttcagctgcatggacgcctcgctggccatcaaacccgtatttgagcgtttccagtctgtcatcatcacatctgggacactgtccccgctggacatctaccccaagatcctggacttccaccccgtcaccatggcaaccttcaccatgacgctggcacgggtctgcctctgccctatgatcatcggccgtggcaatgaccaggtggccatcagctccaaatttgagacccgggaggatattgctgtgatccggaactatgggaacctcctgctggagatgtccgctgtggtccctgatggcatcgtggccttcttcaccagctaccagtacatggagagcaccgtggcctcctggtatgagcaggggatccttgagaacatccagaggaacaagctgctctttattgagacccaggatggtgccgaaaccagtgtcgccctggagaagtaccaggaggcctgcgagaatggccgcggggccatcctgctgtcagtggcccggggcaaagtgtccgagggaatcgactttgtgcaccactacgggcgggccgtcatcatgtttggcgtcccctacgtctacacacagagccgcattctcaaggcgcggctggaatacctgcgggaccagttccagattcgtgagaatgactttcttaccttcgatgccatgcgccacgcggcccagtgtgtgggtcgggccatcaggggcaagacggactacggcctcatggtctttgccgacaagcggtttgcccgtggggacaagcgggggaagctgccccgctggatccaggagcacctcacagatgccaacctcaacctgaccgtggacgagggtgtccaggtggccaagtacttcctgcggcagatggcacagcccttccaccgg

SEQ ID NO: 131452 - DNA, 2334 bp, Homo sapiens
  Payload ID: 5652
  Gene Symbol: ERCC2
  Gene Name: excision repair cross-complementation group 2
  ENST ID: ENST00000391944
  CDS Start-End: 48-2096
ttcatgagggaggcgggtcgaccccgctgcacagtccggccggcgccatgaagctcaacgtggacgggctcctggtctacttcccgtacgactacatctaccccgagcagttctcctacatgcgggagctcaaacgcacgctggacgccaagggtcatggagtcctggagatgccctcaggcaccgggaagacagtatccctgttggccctgatcatggcataccagagagcatatccgctggaggtgaccaaactcatctactgctcaagaactgtgccagagattgagaaggtgattgaagagcttcgaaagttgctcaacttctatgagaagcaggagggcgagaagctgccgtttctgggactggctctgagctcccgcaaaaacttgtgtattcaccctgagatcctgcatgccaatgtggtggtttatagctaccactacctcctggaccccaagattgcagacctggtgtccaaggaactggcccgcaaggccgtcgtggtcttcgacgaggcccacaacattgacaacgtctgcatcgactccatgagcgtcaacctcacccgccggacccttgaccggtgccagggcaacctggagaccctgcagaagacggtgctcaggatcaaagagacagacgagcagcgcctgcgggacgagtaccggcgtctggtggaggggctgcgggaggccagcgccgcccgggagacggacgcccacctggccaaccccgtgctgcccgacgaagtgctgcaggaggcagtgcctggctccatccgcacggccgagcatttcctgggcttcctgaggcggctgctggagtacgtgaagtggcggctgcgtgtgcagcatgtggtgcaggagagcccgcccgccttcctgagcggcctggcccagcgcgtgtgcatccagcgcaagcccctcagattctgtgctgaacgcctccggtccctgctgcatactctggagatcaccgaccttgctgacttctccccgctcaccctccttgctaactttgccacccttgtcagcacctacgccaaaggcttcaccatcatcatcgagccctttgacgacagaaccccgaccattgccaaccccatcctgcacttcagctgcatggacgcctcgctggccatcaaacccgtatttgagcgtttccagtctgtcatcatcacatctgggacactgtccccgctggacatctaccccaagatcctggacttccaccccgtcaccatggcaaccttcaccatgacgctggcacgggtctgcctctgccctatgatcatcggccgtggcaatgaccaggtggccatcagctccaaatttgagacccgggaggatattgctgtgatccggaactatgggaacctcctgctggagatgtccgctgtggtccctgatggcatcgtggccttcttcaccagctaccagtacatggagagcaccgtggcctcctggtatgagcaggggatccttgagaacatccagaggaacaagctgctctttattgagacccaggatggtgccgaaaccagtgtcgccctggagaagtaccaggaggcctgcgagaatggccgcggggccatcctgctgtcagtggcccggggcaaagtgtccgagggaatcgactttgtgcaccactacgggcgggccgtcatcatgtttggcgtcccctacgtctacacacagagccgcattctcaaggcgcggctggaatacctgcgggaccagttccagattcgtgagaatgactttcttaccttcgatgccatgcgccacgcggcccagtgtgtgggtcgggccatcaggggcaagacggactacggcctcatggtctttgccgacaagcggtttgcccgtggggacaagcgggggaagctgccccgctggatccaggagcacctcacagatgccaacctcaacctgaccgtggacgagggtgtccaggtggccaagtacttcctgcggcagatggcacagcccttccaccgggaggatcagctgggcctgtccctgctcagcctggagcagctagaatcagaggagacgctgaagaggatagagcagattgctcagcagctctgagtggggcgggtggggccataaacggttcctggtgactcctgagtcttgcctggccctggttcccagcggcggtggtgctagaaggtcttatgaagtcaggtgacatttctcactgtcacgtccacagcctttaatcgcaggagaaggcagctatccaccaggtacccagaggcaagggggggccaggagatgatagaccccctctcaccccaccagcccatccctcctgcactgttcc

SEQ ID NO: 131453 - DNA, 4153 bp, Homo sapiens
  Payload ID: 5652
  Gene Symbol: ERCC2
  Gene Name: excision repair cross-complementation group 2
  Uniprot ID: P18074
  ENST ID: ENST00000391945
  CDS Start-End: 79-2361
ggatgtccacgacccggcctctcgctgaatattcatgagggaggcgggtcgaccccgctgcacagtccggccggcgccatgaagctcaacgtggacgggctcctggtctacttcccgtacgactacatctaccccgagcagttctcctacatgcgggagctcaaacgcacgctggacgccaagggtcatggagtcctggagatgccctcaggcaccgggaagacagtatccctgttggccctgatcatggcataccagagagcatatccgctggaggtgaccaaactcatctactgctcaagaactgtgccagagattgagaaggtgattgaagagcttcgaaagttgctcaacttctatgagaagcaggagggcgagaagctgccgtttctgggactggctctgagctcccgcaaaaacttgtgtattcaccctgaggtgacacccctgcgctttgggaaggacgtcgatgggaaatgccacagcctcacagcctcctatgtgcgggcgcagtaccagcatgacaccagcctgccccactgccgattctatgaggaatttgatgcccatgggcgtgaggtgcccctccccgctggcatctacaacctggatgacctgaaggccctggggcggcgccagggctggtgcccatacttccttgctcgatactcaatcctgcatgccaatgtggtggtttatagctaccactacctcctggaccccaagattgcagacctggtgtccaaggaactggcccgcaaggccgtcgtggtcttcgacgaggcccacaacattgacaacgtctgcatcgactccatgagcgtcaacctcacccgccggacccttgaccggtgccagggcaacctggagaccctgcagaagacggtgctcaggatcaaagagacagacgagcagcgcctgcgggacgagtaccggcgtctggtggaggggctgcgggaggccagcgccgcccgggagacggacgcccacctggccaaccccgtgctgcccgacgaagtgctgcaggaggcagtgcctggctccatccgcacggccgagcatttcctgggcttcctgaggcggctgctggagtacgtgaagtggcggctgcgtgtgcagcatgtggtgcaggagagcccgcccgccttcctgagcggcctggcccagcgcgtgtgcatccagcgcaagcccctcagattctgtgctgaacgcctccggtccctgctgcatactctggagatcaccgaccttgctgacttctccccgctcaccctccttgctaactttgccacccttgtcagcacctacgccaaaggcttcaccatcatcatcgagccctttgacgacagaaccccgaccattgccaaccccatcctgcacttcagctgcatggacgcctcgctggccatcaaacccgtatttgagcgtttccagtctgtcatcatcacatctgggacactgtccccgctggacatctaccccaagatcctggacttccaccccgtcaccatggcaaccttcaccatgacgctggcacgggtctgcctctgccctatgatcatcggccgtggcaatgaccaggtggccatcagctccaaatttgagacccgggaggatattgctgtgatccggaactatgggaacctcctgctggagatgtccgctgtggtccctgatggcatcgtggccttcttcaccagctaccagtacatggagagcaccgtggcctcctggtatgagcaggggatccttgagaacatccagaggaacaagctgctctttattgagacccaggatggtgccgaaaccagtgtcgccctggagaagtaccaggaggcctgcgagaatggccgcggggccatcctgctgtcagtggcccggggcaaagtgtccgagggaatcgactttgtgcaccactacgggcgggccgtcatcatgtttggcgtcccctacgtctacacacagagccgcattctcaaggcgcggctggaatacctgcgggaccagttccagattcgtgagaatgactttcttaccttcgatgccatgcgccacgcggcccagtgtgtgggtcgggccatcaggggcaagacggactacggcctcatggtctttgccgacaagcggtttgcccgtggggacaagcgggggaagctgccccgctggatccaggagcacctcacagatgccaacctcaacctgaccgtggacgagggtgtccaggtggccaagtacttcctgcggcagatggcacagcccttccaccgggaggatcagctgggcctgtccctgctcagcctggagcagctagaatcagaggagacgctgaagaggatagagcagattgctcagcagctctgagtggggcgggtggggccataaacggttcctggtgactcctgagtcttgcctggccctggttcccagcggcggtggtgctagaaggtcttatgaagtcaggtgacatttctcactgtcacgtccacagcctttaatcgcaggagaaggcagctatccaccaggtacccagaggcaagggggggccaggagatgatagaccccctctcaccccaccagcccatccctcctgcactgttcccaagaagctgcggccagcgcagttcactggacgttagtgggggctcaggtcctgggtgctggcgctgagggtccgaggggccttgtccaggtgccagctgggaaactggagacaggcacaggggatggttggaggggaggtgaggggcaagtgttacatccaccctccagctccaggtccagcctggcagccaactatccaaccccctcgcctctaccccaagtaaaacccatctttgctcctgtcctgggtctcttctgacaccaacccaccacctgctgactccaccactggcccgaccgccctgcctttgcctcatctctgcacctacccacatggcctcctctatttttgacccagatgtccccctcacctgagtcccaggagcccttggagcatccacgttcagtgtgttgagtgacatggctctcttcattctgcaaagagggcagcagggaggaaatgagtgaatccaggagtggcccccctccacgagggacctttccagcacagggtttgatctgtgtgtatcacaggggagatgggagccatggaaggttcttgagcaagatgggggtgggggtggggtgggctgtggattctgctgatgtcagggctctttgccgacctgatcaacactcacccggctgctcctgccgccgcctcgcctcggagccgggagaccagcttctcacttcctcgcctgatagactcacggatcttggagagtgagctgctgcggcgaagggcctggggaggggccggggatgctgctcagtcccccaggcccatgcagtccccacgcccaccccaggagccgaagcacagcccatcctcacctgttctgcgtcaccagctgtgcctgtgttgggggcacctagggggaaagatgggggacactgagatggggacatagagaagccaccaggagggaagacagacaggggctaggggctcaccgagaggggcgggtaggtcctccttgtggaggatttctttgtacagctcttccgcttgttgatacttgttctgtttcaggtaggctgaggcctgcggagaagggagtgtctgggaacttttcggaccccagttcccaacactgcatccagtcccgcctttttttttttttttgtagagacaggggtcttggtatgttgcccaggctggtcttgaactcctagcctcaagtgatcctcctgccttggcctcccaaagtgttggggttacaagcgtgaaccaccacgtctggccccactttctaatgtgctgacctggccgtatccttcccctgcctaaagccttgccctggggcagagtgggtttggagctcggccttacttcctgccctggggatggaggacaggcagcctcctgtttctgagcctgtctgctgtactttgggctggtggcatggcctcggtgcctcagtcttcccacacgcaaagtggagcgacagctcccacctcatagggacgctataagaactagcgatgtggggaccgggctaagaggggagccggccacagtgagctcaataaatgtctgctgctgcca

SEQ ID NO: 131454 - DNA, 1538 bp, Homo sapiens
  Payload ID: 5652
  Gene Symbol: ERCC2
  Gene Name: excision repair cross-complementation group 2
  Uniprot ID: P18074
  ENST ID: ENST00000485403
  CDS Start-End: 220-1437
gagacactgagggggccccgaggctcctgaggacctgagggttaccgggggcgccgggcccgtcacccttctctgggctcgacgaccgggcactgtggaggcgggagaggggctgaggggacgggaactgacccagcagcccctgccgccaggctcaacgtggacgggctcctggtctacttcccgtacgactacatctaccccgagcagttctcctacatgcgggagctcaaacgcacgctggacgccaagggtcatggagtcctggagatgccctcaggcaccgggaagacagtatccctgttggccctgatcatggcataccagagagcatatccgctggaggtgaccaaactcatctactgctcaagaactgtgccagagattgagaaggtgattgaagagcttcgaaagttgctcaacttctatgagaagcaggagggcgagaagctgccgtttctgggactggctctgagctcccgcaaaaacttgtgtattcaccctgaggtgacacccctgcgctttgggaaggacgtcgatgggaaatgccacagcctcacagcctcctatgtgcgggcgcagtaccagcatgacaccagcctgccccactgccgattctatgaggaatttgatgcccatgggcgtgaggtgcccctccccgctggcatctacaacctggatgacctgaaggccctggggcggcgccagggctggtgcccatacttccttgctcgatactcaatcctgcatgccaatgtggtggtttatagctaccactacctcctggaccccaagattgcagacctggtgtccaaggaactggcccgcaaggccgtcgtggtcttcgacgaggcccacaacattgacaacgtctgcatcgactccatgagcgtcaacctcacccgccggacccttgaccggtgccagggcaacctggagaccctgcagaagacggtgctcaggatcaaagagacagacgagcagcgcctgcgggacgagtaccggcgtctggtggaggggctgcgggaggccagcgccgcccgggagacggacgcccacctggccaaccccgtgctgcccgacgaagtgctgcaggaggcagtgcctggctccatccgcacggccgagcatttcctgggcttcctgaggcggctgctggagtacgtgaagtggcggctgcgtgtgcagcatgtggtgcaggagagcccgcccgccttcctgagcggcctggcccagcgcgtgtgcatccagcgcaagcccctcagattctgtgctgaacgcctccggtccctgctgcatactctggagatcaccgaccttgctgacttctccccgctcaccctccttgctaactttgccacccttgtcagcacctacgccaaaggccaggctcagcactgtggaagcagcaggaaccaaaaaagatctcatccctaaccccccagaacttatattccagatgggaaaaccagtagcaaagatgcagccaaataaacaaggaaataattccagaaagtgacagttatcatgaaaaaaaa

SEQ ID NO: 131455 - DNA, 1007 bp, Homo sapiens
  Payload ID: 5652
  Gene Symbol: ERCC2
  Gene Name: excision repair cross-complementation group 2
  ENST ID: ENST00000586131
  CDS Start-End: 131-1007
gagaagggggctgggggtcgcgctcgctagcgggcgcggggggtcttgaagatggggtcatcggctcaacgtggacgggctcctggtctacttcccgtacgactacatctaccccgagcagttctcctacatgcgggagctcaaacgcacgctggacgccaagggtcatggagtcctggagatgccctcaggcaccgggaagacagtatccctgttggccctgatcatggcataccagagagcatatccgctggaggtgaccaaactcatctactgctcaagaactgtgccagagattgagaaggtgattgaagagcttcgaaagttgctcaacttctatgagaagcaggagggcgagaagctgccgtttctgggactggctctgagctcccgcaaaaacttgtgtattcaccctgaggtgacacccctgcgctttgggaaggacgtcgatgggaaatgccacagcctcacagcctcctatgtgcgggcgcagtaccagcatgacaccagcctgccccactgccgattctatgaggaatttgatgcccatgggcgtgaggtgcccctccccgctggcatctacaacctggatgacctgaaggccctggggcggcgccagggctggtgcccatacttccttgctcgatactcaatcctgcatgccaatgtggtggtttatagctaccactacctcctggaccccaagattgcagacctggtgtccaaggaactggcccgcaaggccgtcgtggtcttcgacgaggcccacaacattgacaacgtctgcatcgactccatgagcgtcaacctcacccgccggacccttgaccggtgccagggcaacctggagaccctgcagaagacggtgctcaggatcaaagagacagacgagcagcgcctgcgggacgagtaccggcgtctggtggaggggctgcgggaggccagcgccgcccgggagacggacgcccacctggccaaccccgtgctgcccgacgaagtgctgcagg

SEQ ID NO: 131456 - DNA, 557 bp, Homo sapiens
  Payload ID: 5652
  Gene Symbol: ERCC2
  Gene Name: excision repair cross-complementation group 2
  ENST ID: ENST00000591309
  CDS Start-End: 18-401
acagtccggccggcgccatgaagctcaacgtggacgggctcctggtctacttcccgtacgactacatctaccccgagcagttctcctacatgcgggagctcaaacgcacgctggacgccaagggtcatggagtcctggagatgccctcaggcaccgggaagacagtatccctgttggccctgatcatggcataccagagagcatatccgctggaggtgaccaaactcatctactgctcaagaactgtgccagagattgagaaggtgattgaagagcttcgaaagttgctcaacttctatgagaagcaggagggcgagaagctgccgtttctgggactggctctgagctcccgcaaaaacttgtgtattcaccctgagacaacgtctgcatcgactccatgagcgtcaacctcacccgccggacccttgaccggtgccagggcaacctggagaccctgcagaagacggtgctcaggatcaaagagacagacgagcagcgcctgcgggacgagtaccggcgtctggtggaggggctgcgggaggccagcgccgcccggg

SEQ ID NO: 131457 - DNA, 817 bp, Homo sapiens
  Payload ID: 5652
  Gene Symbol: ERCC2
  Gene Name: excision repair cross-complementation group 2
  ENST ID: ENST00000587376
  CDS Start-End: 1-608
gggaggccagcgccgcccgggagacggacgcccacctggccaaccccgtgctgcccgacgaagtgctgcaggaggcagtgcctggctccatccgcacggccgagcatttcctgggcttcctgaggcggctgctggagtacgtgaagtggcggctgcgtgtgcagcatgtggtgcaggagagcccgcccgccttcctgagcggcctggcccagcgcgtgtgcatccagcgcaagcccctcagattctgtgctgaacgcctccggtccctgctgcatactctggagatcaccgaccttgctgacttctccccgctcaccctccttgctaactttgccacccttgtcagcacctacgccaaaggcttcaccatcatcatcgagccctttgacgacagaaccccgaccattgccaaccccatcctgcacttcagctgcatggacgcctcgctggccatcaaacccgtatttgagcgtttccagtctgtcatcatcacatctgggacactgtccccgctggacatctaccccaagatcctggacttccaccccgtcaccatggcaaccttcaccatgacgctggcacgggtctgcctctgccctatgctgtgatccggaactatgggaacctcctgctggagatgtccgctgtggtccctgatggcatcgtggccttcttcaccagctaccagtacatggagagcaccgtggcctcctggtatgagcaggggatccttgagaacatccagaggaacaagctgctctttattgagacccaggatggtgccgaaaccagtgtcgccctggagaagtaccaggag

SEQ ID NO: 131458 - DNA, 690 bp, Homo sapiens
  Payload ID: 5652
  Gene Symbol: ERCC2
  Gene Name: excision repair cross-complementation group 2
  ENST ID: ENST00000586856
  CDS Start-End: 364-690
gggggctgggggtcgcgctcgctagcgggcgcggggggtcttgaagatggggtcatcggtgggcgcgcctgggtccccaagggggcgaggggagggtgaaggggtgggacgggggcagccgcagggagcagcagtgatagcgaggagacactgagggggccccgaggctcctgaggacctgagggttaccgggggcgccgggcccgtcacccttctctgggctcgacgaccgggcactgtggaggcgggagaggggctgaggggacgggaactgacccagcagcccctgccgccaggctcaacgtggacgggctcctggtctacttcccgtacgactacatctaccccgagcagttctcctacatgcgggagctcaaacgcacgctggacgccaaggcatatccgctggaggtgaccaaactcatctactgctcaagaactgtgccagagattgagaaggtgattgaagagcttcgaaagttgctcaacttctatgagaagcaggagggcgagaagctgccgtttctgggactggctctgagctcccgcaaaaacttgtgtattcaccctgaggtgacacccctgcgctttgggaaggacgtcgatgggaaatgccacagcctcacagcctcctatgtgcgggcgcagtaccagcatgacaccagcctgccccactgccgattctatgag

SEQ ID NO: 131459 - DNA, 2750 bp, Homo sapiens
  Payload ID: 5653
  Gene Symbol: ERCC3
  Gene Name: excision repair cross-complementation group 3
  Uniprot ID: P19447
  ENST ID: ENST00000285398
  CDS Start-End: 96-2444
gggagcttccggattgagccggaagtccccccagagcggatgccgcggcgggcctgtgggagcggggtcatcttctctctgctgctgtagctgccatgggcaaaagagaccgagcggaccgcgacaagaagaaatccaggaagcggcactatgaggatgaagaggatgatgaagaggacgccccggggaacgaccctcaggaagcggttccctcggcggcggggaagcaggtggatgagtcaggcaccaaagtggatgaatatggagccaaggactacaggctgcaaatgccgctgaaggacgaccacacctccaggcccctctgggtggctcccgatggccatatcttcttggaagccttctctccagtttacaaatatgcccaagacttcttggtggctattgcagagccagtgtgccgaccaacccatgtgcatgagtacaaactaactgcctactccttgtatgcagctgtcagcgttgggctgcaaaccagtgacatcaccgagtacctcaggaagctcagcaagactggagtccctgatggaattatgcagtttattaagttgtgtactgtcagctatggaaaagtcaagctggtcttgaagcacaacagatacttcgttgaaagttgccaccctgatgtaatccagcatcttctccaggaccccgtgatccgagaatgccgcttaagaaactctgaaggggaggccactgagctcatcacagagactttcacaagcaaatctgccatttctaagactgctgaaagcagtggtgggccctccacttcccgagtgacagatccacagggtaaatctgacatccccatggacctgtttgacttctatgagcaaatggacaaggatgaagaagaagaagaagagacacagacagtgtcttttgaagtcaagcaggaaatgattgaggaactccagaaacgttgcatccacctggagtaccctctgttggcagaatatgacttccggaatgattctgtcaaccctgatatcaacattgacctaaagcccacagctgtcctcagaccctatcaggagaagagcttgcgaaagatgtttggaaacgggcgtgcacgttcgggggtcattgttcttccctgcggtgctggaaagtccctggttggtgtgactgctgcatgcactgtcagaaaacgctgtctggtgctgggcaactcagctgtttctgtggagcagtggaaagcccagttcaagatgtggtccaccattgacgacagccagatctgccggttcacctccgatgccaaggacaagcccatcggctgctccgttgccattagcacctactccatgctgggccacaccaccaaaaggtcctgggaggccgagcgagtcatggagtggctcaagacccaggagtggggcctcatgatcctggatgaagtgcacaccataccagccaagatgttccgaagggtgctcaccatcgtgcaggcccactgtaagctgggtttgactgcgaccctcgtccgcgaagatgacaaaattgtggatttaaattttctgattgggcctaagctctacgaagccaactggatggagctgcagaataatggctacatcgccaaagtccagtgtgctgaggtctggtgccctatgtctcctgaattttaccgggaatatgtggcaatcaaaaccaagaaacgaatcttgctgtacaccatgaaccccaacaaatttagagcttgccagtttctgatcaagtttcatgaaaggaggaatgacaagattattgtctttgctgacaatgtgtttgccctaaaggaatatgccattcgactgaacaaaccctatatctacggacctacgtctcagggggaaaggatgcaaattctccagaatttcaagcacaaccccaaaattaacaccatcttcatatccaaggtaggtgacacttcgtttgatctgccggaagcaaatgtcctcattcagatctcatcccatggtggctccaggcgtcaggaagcccaaaggctagggcgggtgcttcgagctaaaaaagggatggttgcagaagagtacaatgcctttttctactcactggtatcccaggacacacaggaaatggcttactcaaccaagcggcagagattcttggtagatcaaggttatagcttcaaggtgatcacgaaactcgctggcatggaggaggaagacttggcgttttcgacaaaagaagagcaacagcagctcttacagaaagtcctggcagccactgacctggatgccgaggaggaggtggtggctggggaatttggctccagatccagccaggcatctcggcgctttggcaccatgagttctatgtctggggccgacgacactgtgtacatggagtaccactcatcgcggagcaaggcgcccagcaaacatgtacacccgctcttcaagcgctttaggaaatgatgcttaggcagggtacttcgttcaagaccggcgcttggcacccttgttggaaagggattttcagcataacattttccttccacctctttgaccttccctccagcgttggccaaattgtgctgaggaagatgcatcaagggcttggctgtgccttcataggtcatctagggttttataaaggaggaggagacaatattttttcaaactttttggggagtggggtcatttctgtatataaaaaatgttaatatttaaggtgtatttatgttaccgttctgaataaacagaatggaccattgaaccagt

SEQ ID NO: 131460 - DNA, 2920 bp, Homo sapiens
  Payload ID: 5653
  Gene Symbol: ERCC3
  Gene Name: excision repair cross-complementation group 3
  ENST ID: ENST00000445889
  CDS Start-End: 14-229
tgctgtagctgccatgggcaaaagagaccgagcggaccgcggtgagacgttgcgcgggcacgctcagccacgactgcccttgccggccctgccccccgctctgcctcggagctgctccgggcctctgcgccggccgaccctgctggccctcccgcgcgcaccccgttgggacaggcctttgggcgggagagatgctggacctgggcgcagcccagcgaactcggcctaggggagacgggtgaggggcgcaacgcctgcgggatgcaggtggctcttagctaggagtttgcggcggcgcagacaagaagaaatccaggaagcggcactatgaggatgaagaggatgatgaagaggacgccccggggaacgaccctcaggaagcggttccctcggcggcggggaagcaggtggatgagtcaggcaccaaagtggatgaatatggagccaaggactacaggctgcaaatgccgctgaaggacgaccacacctccaggcccctctgggtggctcccgatggccatatcttcttggaagccttctctccagtttacaaatatgcccaagacttcttggtggctattgcagagccagtgtgccgaccaacccatgtgcatgagtacaaactaactgcctactccttgtatgcagctgtcagcgttgggctgcaaaccagtgacatcaccgagtacctcaggaagctcagcaagactggagtccctgatggaattatgcagtttattaagttgtgtactgtcagctatggaaaagtcaagctggtcttgaagcacaacagatacttcgttgaaagttgccaccctgatgtaatccagcatcttctccaggaccccgtgatccgagaatgccgcttaagaaactctgaaggggaggccactgagctcatcacagagactttcacaagcaaatctgccatttctaagactgctgaaagcagtggtgggccctccacttcccgagtgacagatccacagggtaaatctgacatccccatggacctgtttgacttctatgagcaaatggacaaggatgaagaagaagaagaagagacacagacagtgtcttttgaagtcaagcaggaaatgattgaggaactccagaaacgttgcatccacctggagtaccctctgttggcagaatatgacttccggaatgattctgtcaaccctgatatcaacattgacctaaagcccacagctgtcctcagaccctatcaggagaagagcttgcgaaagatgtttggaaacgggcgtgcacgttcgggggtcattgttcttccctgcggtgctggaaagtccctggttggtgtgactgctgcatgcactgtcagaaaacgctgtctggtgctgggcaactcagctgtttctgtggagcagtggaaagcccagttcaagatgtggtccaccattgacgacagccagatctgccggttcacctccgatgccaaggacaagcccatcggctgctccgttgccattagcacctactccatgctgggccacaccaccaaaaggtcctgggaggccgagcgagtcatggagtggctcaagacccaggagtggggcctcatgatcctggatgaagtgcacaccataccagccaagatgttccgaagggtgctcaccatcgtgcaggcccactgtaagctgggtttgactgcgaccctcgtccgcgaagatgacaaaattgtggatttaaattttctgattgggcctaagctctacgaagccaactggatggagctgcagaataatggctacatcgccaaagtccagtgtgctgaggtctggtgccctatgtctcctgaattttaccgggaatatgtggcaatcaaaaccaagaaacgaatcttgctgtacaccatgaaccccaacaaatttagagcttgccagtttctgatcaagtttcatgaaaggaggaatgacaagattattgtctttgctgacaatgtgtttgccctaaaggaatatgccattcgactgaacaaaccctatatctacggacctacgtctcagggggaaaggatgcaaattctccagaatttcaagcacaaccccaaaattaacaccatcttcatatccaaggtaggtgacacttcgtttgatctgccggaagcaaatgtcctcattcagatctcatcccatggtggctccaggcgtcaggaagcccaaaggctagggcgggtgcttcgagctaaaaaagggatggttgcagaagagtacaatgcctttttctactcactggtatcccaggacacacaggaaatggcttactcaaccaagcggcagagattcttggtagatcaaggttatagcttcaaggtgatcacgaaactcgctggcatggaggaggaagacttggcgttttcgacaaaagaagagcaacagcagctcttacagaaagtcctggcagccactgacctggatgccgaggaggaggtggtggctggggaatttggctccagatccagccaggcatctcggcgctttggcaccatgagttctatgtctggggccgacgacactgtgtacatggagtaccactcatcgcggagcaaggcgcccagcaaacatgtacacccgctcttcaagcgctttaggaaatgatgcttaggcagggtacttcgttcaagaccggcgcttggcacccttgttggaaagggattttcagcataacattttccttccacctctttgaccttccctccagcgttggccaaattgtgctgaggaagatgcatcaagggcttggctgtgccttcataggtcatctagggttttataaaggaggaggagacaatattttttcaaactttttggggagtggggtcatttctgtatataaaaaatgttaatatttaaggtgtatttatgttaccgttctgaataaacagaatggaccattg

SEQ ID NO: 131461 - DNA, 563 bp, Homo sapiens
  Payload ID: 5653
  Gene Symbol: ERCC3
  Gene Name: excision repair cross-complementation group 3
  ENST ID: ENST00000456257
  CDS Start-End: 1-563
agttgtgtactgtcagctatggaaaagtcaagctggtcttgaagcacaacagatacttcgttgaaagttgccaccctgatgtaatccagcatcttctccaggaccccgtgatccgagaatgccgcttaagaaactctgaaggggaggccactgagctcatcacagagactttcacaagcaaatctgcccacctacctctctcacagatttctaagactgctgaaagcagtggtgggccctccacttcccgagtgacagatccacagggtaaatctgacatccccatggacctgtttgacttctatgagcaaatggacaaggatgaagaagaagaagaagagacacagacagtgtcttttgaagtcaagcaggaaatgattgaggaactccagaaacgttgcatccacctggagtaccctctgttggcagaatatgacttccggaatgattctgtcaaccctgatatcaacattgacctaaagcccacagctgtcctcagaccctatcaggagaagagcttgcgaaagatgtttggaaacgggcgtgcacgttcgggggtcatt

SEQ ID NO: 131462 - DNA, 2916 bp, Homo sapiens
  Payload ID: 5653
  Gene Symbol: ERCC3
  Gene Name: excision repair cross-complementation group 3
  ENST ID: ENST00000426778
  CDS Start-End: 65-280
cagagcggatgccgcggcgggcctgtgggagcggggtcatcttctctctgctgctgtagctgccatgggcaaaagagaccgagcggaccgcggtgagacgttgcgcgggcacgctcagccacgactgcccttgccggccctgccccccgctctgcctcggagctgctccgggcctctgcgccggccgaccctgctggccctcccgcgcgcaccccgttgggacaggcctttgggcgggagagatgctggacctgggcgcagcccagcgaactcggcctaggggagacggacaagaagaaatccaggaagcggcactatgaggatgaagaggatgatgaagaggacgccccggggaacgaccctcaggaagcggttccctcggcggcggggaagcaggtggatgagtcaggcaccaaagtggatgaatatggagccaaggactacaggctgcaaatgccgctgaaggacgaccacacctccaggcccctctgggtggctcccgatggccatatcttcttggaagccttctctccagtttacaaatatgcccaagacttcttggtggctattgcagagccagtgtgccgaccaacccatgtgcatgagtacaaactaactgcctactccttgtatgcagctgtcagcgttgggctgcaaaccagtgacatcaccgagtacctcaggaagctcagcaagactggagtccctgatggaattatgcagtttattaagttgtgtactgtcagctatggaaaagtcaagctggtcttgaagcacaacagatacttcgttgaaagttgccaccctgatgtaatccagcatcttctccaggaccccgtgatccgagaatgccgcttaagaaactctgaaggggaggccactgagctcatcacagagactttcacaagcaaatctgccatttctaagactgctgaaagcagtggtgggccctccacttcccgagtgacagatccacagggtaaatctgacatccccatggacctgtttgacttctatgagcaaatggacaaggatgaagaagaagaagaagagacacagacagtgtcttttgaagtcaagcaggaaatgattgaggaactccagaaacgttgcatccacctggagtaccctctgttggcagaatatgacttccggaatgattctgtcaaccctgatatcaacattgacctaaagcccacagctgtcctcagaccctatcaggagaagagcttgcgaaagatgtttggaaacgggcgtgcacgttcgggggtcattgttcttccctgcggtgctggaaagtccctggttggtgtgactgctgcatgcactgtcagaaaacgctgtctggtgctgggcaactcagctgtttctgtggagcagtggaaagcccagttcaagatgtggtccaccattgacgacagccagatctgccggttcacctccgatgccaaggacaagcccatcggctgctccgttgccattagcacctactccatgctgggccacaccaccaaaaggtcctgggaggccgagcgagtcatggagtggctcaagacccaggagtggggcctcatgatcctggatgaagtgcacaccataccagccaagatgttccgaagggtgctcaccatcgtgcaggcccactgtaagctgggtttgactgcgaccctcgtccgcgaagatgacaaaattgtggatttaaattttctgattgggcctaagctctacgaagccaactggatggagctgcagaataatggctacatcgccaaagtccagtgtgctgaggtctggtgccctatgtctcctgaattttaccgggaatatgtggcaatcaaaaccaagaaacgaatcttgctgtacaccatgaaccccaacaaatttagagcttgccagtttctgatcaagtttcatgaaaggaggaatgacaagattattgtctttgctgacaatgtgtttgccctaaaggaatatgccattcgactgaacaaaccctatatctacggacctacgtctcagggggaaaggatgcaaattctccagaatttcaagcacaaccccaaaattaacaccatcttcatatccaaggtaggtgacacttcgtttgatctgccggaagcaaatgtcctcattcagatctcatcccatggtggctccaggcgtcaggaagcccaaaggctagggcgggtgcttcgagctaaaaaagggatggttgcagaagagtacaatgcctttttctactcactggtatcccaggacacacaggaaatggcttactcaaccaagcggcagagattcttggtagatcaaggttatagcttcaaggtgatcacgaaactcgctggcatggaggaggaagacttggcgttttcgacaaaagaagagcaacagcagctcttacagaaagtcctggcagccactgacctggatgccgaggaggaggtggtggctggggaatttggctccagatccagccaggcatctcggcgctttggcaccatgagttctatgtctggggccgacgacactgtgtacatggagtaccactcatcgcggagcaaggcgcccagcaaacatgtacacccgctcttcaagcgctttaggaaatgatgcttaggcagggtacttcgttcaagaccggcgcttggcacccttgttggaaagggattttcagcataacattttccttccacctctttgaccttccctccagcgttggccaaattgtgctgaggaagatgcatcaagggcttggctgtgccttcataggtcatctagggttttataaaggaggaggagacaatattttttcaaactttttggggagtggggtcatttctgtatataaaaaatgttaatatttaaggtgtatttatgttaccgttctgaataaacagaatggaccattgaaccagt

SEQ ID NO: 131463 - DNA, 6758 bp, Homo sapiens
  Payload ID: 5654
  Gene Symbol: ERCC4
  Gene Name: excision repair cross-complementation group 4
  Uniprot ID: Q92889
  ENST ID: ENST00000311895
  CDS Start-End: 10-2760
agagcttccatggagtcagggcagccggctcgacggattgccatggcgccgctgctggagtacgagcgacagctggtgctggaactgctcgacactgacgggctagtagtgtgcgcccgcgggctcggcgcggaccggctcctctaccactttctccagctgcactgccacccagcctgcctggtgctggtgctcaacacgcagccggccgaggaggagtattttatcaatcagctgaagatagaaggagttgaacacctccctcgccgtgtaacaaatgaaatcacaagcaacagtcgctatgaagtttacacacaaggtggtgttatatttgcgacaagtaggatacttgtggttgacttcttgactgatagaataccttcagatttaattactggcatcttggtgtatagagcccacagaataatcgagtcttgtcaagaagcattcatcttgcgcctctttcgccagaaaaacaaacgtggttttattaaagctttcacagacaatgctgttgcctttgatactggtttttgtcatgtggaaagagtgatgagaaatctttttgtgaggaaactgtatctgtggccaaggttccatgtagcagtaaactcatttttagaacagcacaaacctgaagttgtagaaatccatgtttctatgacacctaccatgcttgctatacagactgctatactggacattttaaatgcatgtctaaaggaactaaaatgccataacccatcgcttgaagtggaagatttatctttagaaaatgctattggaaaaccttttgacaagacaatccgccattatctggatcctttgtggcaccagcttggagccaagactaaatccttagttcaggatttgaagatattacgaactttgctgcagtatctctctcagtatgattgtgtcacatttcttaatcttctggaatctctgagagcaacggaaaaagcttttggtcagaattcaggttggctgtttcttgactccagcacctcgatgtttataaatgctcgagcaagggtttatcatcttccagatgccaaaatgagtaaaaaagaaaaaatatctgaaaaaatggaaattaaagaaggggaagaaacaaaaaaggaactggtcctagaaagcaacccaaagtgggaggcactgactgaagtattaaaagaaattgaggcagaaaataaggagagtgaagctcttggtggtccaggtcaagtactgatttgtgcaagtgatgaccgaacatgttcccagctgagagactatatcactcttggagcggaggccttcttattgaggctctacaggaaaacctttgagaaggatagcaaagctgaagaagtctggatgaaatttaggaaggaagacagttcaaagagaattaggaaatctcacaaaagacctaaagacccccaaaacaaagaacgggcttctaccaaagaaagaaccctcaaaaagaaaaaacggaagttgaccttaactcaaatggtaggaaaacctgaagaactggaagaggaaggagatgtcgaggaaggatatcgtcgagaaataagcagtagcccagaaagctgcccggaagaaattaagcatgaagaatttgatgtaaatttgtcatcggatgctgctttcggaatcctgaaagaacccctcactatcatccatccgcttctgggttgcagcgacccctatgctctgacaagggtactacatgaagtggagccaagatacgtggttctttatgacgcagagctaacctttgttcggcagcttgaaatttacagggcgagtaggcctgggaaacctctgagggtttactttcttatatacggaggttcaactgaggaacaacgctatctcactgctttgcggaaagaaaaggaagcttttgaaaaactcataagggaaaaagcaagcatggttgtccctgaagaaagagaaggcagagatgaaacaaacttagacctagtaagaggcacagcatctgcagatgtttccactgacactcggaaagccggtggccaggaacagaatggtacacagcaaagcatagttgtggatatgcgtgaatttcgaagtgagcttccatctctgatccatcgtcggggcattgacattgaacccgtgactttagaggttggagattacatcctcactccagaaatgtgcgtggagcgcaagagtatcagtgatttaatcggctctttaaataacggccgcctctacagccagtgcatctccatgtcccgctactacaagcgtcccgtgcttctgattgagtttgaccctagcaagcctttctctctcacttcccgaggtgccttgtttcaggagatctccagcaatgacattagttccaaactcactcttcttacacttcacttccccagactacggattctctggtgcccctctcctcatgcaacggcggagttgtttgaggagctgaaacaaagcaagccacagcctgatgcggcgacagcactggccattacagcagattctgaaacccttcccgagtcagagaagtataatcctggtccccaagacttcttgttaaaaatgccaggggtgaatgccaaaaactgccgctccttgatgcaccacgttaagaacatcgcagaattagcagccctgtcacaagacgagctcacgagtattctggggaatgctgcaaatgccaaacagctttatgatttcattcacacctcttttgcagaagtcgtatcaaaaggaaaagggaaaaagtgaacagtgatggctgttttcttatcccatgcctgtacttttcagcggctccttgccagacatcataggtcattattaattattggtttgctatttcattcttttccaatgctcttaatgattgtacggtggaccagaagccaggattcctctctgaactctgcagttaggcatcacttgaacttgcctgtgcctgctctttttcctccctgcaccgtctatgccgggcttagcatgtttctttttaaatgaggtttgtcaggatcaggtaaagttcctacaagtgattacagaaggtagaaactttacctgatcctaacagatctcatttagaaaggaatatgctaagcctggcatggacggtgcagggagggaaaagagcaggcacaagaaagctaccatttttaacagtccttgttatctagtgcaacataaataacagtcttaattgcacttatacccatgtcctgtggctctccaaatctggtctttgctgttgtgtctgctggacgcttgaactgatgtttgtgtaggaaatcatgttctgaccctttgtctacaaaggagccttctggaacactgagaagaaacatctctttgccattcctgaccagttctctctaccacattttcttcagctccatacttctgcctgtctgctctaaggaaatttcatggagccttcctactactaattcaagacagtctcctcaaaaactggttgactagtcttctaatgaccctaacatatgtagcatatactataatttcattgttccaaattagtatttttaaagcaaaatgaattacctgtttgcaaaagttaatgatgaaggagctcttagaattctcaatttttgcacatattcagtctcctaatatcagagatccctaagtccagctggctagttacagagttttttcagacttcctcgtttctcagctcttatatcctaagacaccagcatcatatcctctagaaatacaacctaattggcagtgagccgagatcgcaccactgcacccctgcctgggcgacagagtgagactttgtctctattacaaaaagaaaagaaaagaaatacaacctaagctcacctgcctgtgattcctcatttctcaccatcctgtgccagggtggctacttctctctgtgaggactcaaatacaagccaatgagtggcccactaagcttttaagatttgattttcctgccttgagataaaaaggagtgtaggtaaatgaaagatcaatgtatggaatatataaaaatacgaaagaaatatatacgtttaaaaatccataaagaaaaaaatctcattctaaacctgattaagttggctttttacgtaagtgtacaaataggatattcacagcatctttgtgcagtttttaaacttttatatttaaacattattaagttggcttttgttcacatgttgagtaatgggtagtaaattttctacctcaggagctgatatagacatcagttctgctagccatatcacatattttaatgtttcatcaacatcagctgtttttttgtttgctacactatttgaactaatagacagtggatcatgtaacacaaaattgtcttcaactttaacaaaattgtcattgttatttttttttgagacagagtctccctctgttgcccaggctggagtgcagtggcgcaatctcggctcactgcaacctcgcctgctgggttcaagcagttctcccacctcagcctcccaagtagctgggattataggtgtgcaccaccagacccggctaatttttgtatttttagtagagacggggtttcaccatgttggccaggctggtctcaaactactgacctcaggtgatccacccaccttggcctcccaaagtgctgagataacaggcgtgagccaccgcacccacccaacaaaattatttttaactgtcgtttctgaactgaacctctcacattggcatcttgatttattggtacttaacagtatatatggattttgaactctacacaagggtataaccagaatgaattgaggggtatcaagaaccagattggttacagtagaactctgtaagatgatgtggagagtaaggaaaaggagaagaaataaaaattagtttaagatggaataaagatttgggctgctaattttttcccaggattcaaaatatacccgctagaatggaaaacaaaaatttgaatgattacaacattatcgttaacattcaattttgtatttattgttttattgaatatagttcagagtatattaaaatagacctaccacttcaaatgataatgattattataatgtctcttcaccctattctagcacttctgcttgcagtatgtggtttctatttttttcctcttgtataattccacttgcttttaattgttgtttcattatataaaaggaacatcttcccatagcatattctatgaaaggggtttcattccaagttgagttttcaaaaaaaaggtcttcctaaagctaccattttcaaccgtccttgttatctagtacaacataaataacagtcttaaaaattgcactaataccagtgcccccctggctctccaaatctgttctttgctcttgtatctgctggacgcttgaagacaggtgcactgtctcgtatgtatttgaattatgaacagtaatttctaatgaattctaaaatggtcattgtaagtgaaagcctctcgctaccacttcctcttccaactacataaatatatttcaatgtatttccagttttggaaagttttcaatacatacatcaagtgtttacttagatttttataaaaattttttttacaatctaataatctttggtaaaggaactagagatgcatgcagttgcaaaattaatgtatttattttccagcataattttattaacttcactttttttctctctagtaaatatccagtgtacttatgaactcatgtttggctcttttaaaaccttttctaaaagctagatcagcatttttctattttacaagttttttgtataaaaaggtgaacatatgagatattgtgagaaatcattttaagtttcatttaaatcatggtgcctcttttgatactttcttaaaattgtgcaagaagaaatcatttttagtagtggtcataaatattatccttttggcagtaagctattactaattcagcctgaagctcggtagacaatatgtctacatgtgtttgagtacatcctggatacagtttcccagctcatgagggactgaaaatagtcttattcatcaacccactaggatgtgaagggttaagtctagatttggtcgcattgaaaccccacaatatagaattaataaatggccttcagtaggaaaacctacactaaagcaaatccgaagaagtggggcagggggaaagaggcattactggtctttccttttgttttgcaagcataatttgattttcctttggctcagaaaactcatttggggaaattctcttttgtgttcagtttaacctagaaaggtcctcttgaaaaaccaacattttaggaaagttcttttttcaggatggagtatattaaaattaagccaggctttgacgtgaattatcacttttctttattattttgttttctattttggtttatagctatttctggttcagttctgaacttcagcacttaatcatccttatcaaccaggcttttggtagcctaaaccgctatgctgttgtttttttaatttaaagatgtataagccaaaatttggatgggagtgagacataactgatttatatgaattttaacagagttgtatttgtgtgtgtttaataaaatatatatttattcagtactttcctcagtattttatgggcaaagtaaaaataacaatgcatagtgaaagggcatatattaccagcagtaataattcaaaatcctgaaaatgtttcattttttttgtttttgttatgcagaataaacaaggcagaaatgctctttgaacc

SEQ ID NO: 131464 - DNA, 2073 bp, Homo sapiens
  Payload ID: 5654
  Gene Symbol: ERCC4
  Gene Name: excision repair cross-complementation group 4
  Uniprot ID: Q92889
  ENST ID: ENST00000575156
  CDS Start-End: 10-1128
agagcttccatggagtcagggcagccggctcgacggattgccatggcgccgctgctggagtacgagcgacagctggtgctggaactgctcgacactgacgggctagtagtgtgcgcccgcgggctcggcgcggaccggctcctctaccactttctccagctgcactgccacccagcctgcctggtgctggtgctcaacacgcagccggccgaggaggagtattttatcaatcagctgaagatagaaggagttgaacacctccctcgccgtgtaacaaatgaaatcacaagcaacagtcgctatgaagtttacacacaaggtggtgttatatttgcgacaagtaggatacttgtggttgacttcttgactgatagaataccttcagatttaattactggcatcttggtgtatagagcccacagaataatcgagtcttgtcaagaagcattcatcttgcgcctctttcgccagaaaaacaaacgtggttttattaaagctttcacagacaatgctgttgcctttgatactggtttttgtcatgtggaaagagtgatgagaaatctttttgtgaggaaactgtatctgtggccaaggttccatgtagcagtaaactcatttttagaacagcacaaacctgaagttgtagaaatccatgtttctatgacacctaccatgcttgctatacagactgctatactggacattttaaatgcatgtctaaaggaactaaaatgccataacccatcgcttgaagtggaagatttatctttagaaaatgctattggaaaaccttttgacaagacaatccgccattatctggatcctttgtggcaccagcttggagccaagactaaatccttagttcaggatttgaagatattacgaactttgctgcagtatctctctcagtatgattgtgtcacatttcttaatcttctggaatctctgagagcaacggaaaaagcttttggtcagaattcaggttggctgtttcttgactccagcacctcgatgtttataaatgctcgagcaagggtttatcatcttccagatgccaaaatgagtaaaaaagaaaaaatatctgaaaaaatggaaattaaagaaggggaaggtatcttgtggggttaagtctttaaatgtgttttttatttcggtatttggtatggaaatttaaagtgcaatttaaagtcttctttggccatgtgaaaagtgtgttccttgaagataaatgtatgtatgtttgttatatgtaacatgtaatgtatgttgaaagtatatatgtaaagtatatgtgtaatgtatgtcgaagtatacagcatggcaagtcttgcagtctattgcccagggcttccaaataacagatgtcaaatattgatcaaaagtatgctacatgaggagctatatattgatttttttagaacttcaaagtaattattatttttgagtcagaatgaggttggggcatggtggcacacacctataatcccagccctttgggaggccgaggcaggaggattgcttgagcccgggagttcaagaccatcctgggcaacaaagcaagactccatctctacaaaaaaaattttaaggctgggctcagtggctcacgtctgtaatcccagcactttgggaggctgaggcaggccgatcacctgaggtcaggagtttgagaccagcctggccaatatggtgaaaccccgtctctattaaaaataccaaaaattagccaggcgtggtggcgggcacctgtaatcccagctactcaggaggctgaggcaggagaatcacttgaacccaggaggcggaggttgcagtgagctgagatcacactactgcactccagcctgggcaacagagtgagactcggtctcaaaaaaaaaaaaaaaaaaaaaacacaaaaacttttaaagtagcctggcgaggtgatgtgcacttatcgtctcagctacttgagaggctaaggtgagcccaggagttgaaggtgacaccaagatatgatcacaccactatactccagcctgggtgacagagtacgactgtgtctcaaaactaataaataaagtcaggatggaa

SEQ ID NO: 131465 - DNA, 721 bp, Homo sapiens
  Payload ID: 5654
  Gene Symbol: ERCC4
  Gene Name: excision repair cross-complementation group 4
  ENST ID: ENST00000462862
  CDS Start-End: 1-108
agggtttactttcttatatacggaggttcaactgaggaacaacgctatctcactgctttgcggaaagaaaaggaagcttttgaaaaactcataagatctaccgtataagatatgagccaccttgaagacaggaattcttgcgtgatcacgattatatccaaagtacctagagcaccacgcaggaacactccataaatgtttttcaataaatgcatgaggaaaaagcaagcatggttgtccctgaagaaagagaaggcagagatgaaacaaacttagacctagtaagaggcacagcatctgcagatgtttccactgacactcggaaagccggtggccaggaacagaatggtacacagcaaagcatagttgtggatatgcgtgaatttcgaagtgagcttccatctctgatccatcgtcggggcattgacattgaacccgtgactttagaggttggagattacatcctcactccagaaatgtgcgtggagcgcaagagtatcagtgatttaatcggctctttaaataacggccgcctctacagccagtgcatctccatgtcccgctactacaagcgtcccgtgcttctgattgagtttgaccctagcaagcctttctctctcacttcccgaggtgccttgtttcaggagatctccagcaatgacattagttccaaactcactcttcttacacttcacttccccagactacggattctctggtg

SEQ ID NO: 131466 - DNA, 583 bp, Homo sapiens
  Payload ID: 5654
  Gene Symbol: ERCC4
  Gene Name: excision repair cross-complementation group 4
  ENST ID: ENST00000574194
  CDS Start-End: 1-227
ccccctcaggcatcttggtgtatagagcccacagaataatcgagtcttgtcaagaagcattcatcttgcgcctctttcgccagaaaaacaaacgtggttttattaaagctttcacagacaatgctgttgcctttgatactggtttttgtcatgtggaaagagtgatgagaaatctttttgtgaggaaactgtatctgtggccaagactgctatactggacattttaaatgcatgtctaaaggaactaaaatgccataacccatcgcttgaagtggaagatttatctttagaaaatgctattggaaaaccttttgacaagacaatccgccattatctggatcctttgtggcaccagcttggagccaagactaaatccttagttcaggatttgaagatattacgaactttgctgcagtatctctctcagtatgattgtgtcacatttcttaatcttctggaatctctgagagcaacggaaaaagcttttggtcagaattcaggttggctgtttcttgactccagcacctcgatgtttataaatgctcgagcaagggtttatcatcttccagatgccaaaatgagt

SEQ ID NO: 131467 - DNA, 5082 bp, Homo sapiens
  Payload ID: 5655
  Gene Symbol: ERCC5
  Gene Name: excision repair cross-complementation group 5
  Uniprot ID: P28715
  ENST ID: ENST00000355739
  CDS Start-End: 1424-4984
tttgccaacgttaaggacgcgcagctgtgacacagccccaggaagtccagatgacatgtgcccaaggtggttggggcacagattggttttatacattttagggagacaggagacatcaatcaacatatgtaagtacactggttccttccagaaaggtggggacaactcggaagcaggaagggcttctaggtcacaggtagatgagagacaaaaggctgcatacgagtttctgataagcctttccaaaggagacaatcagaatatgcatctatctcagtgagcagaaggatgactgactagaatgggaggcaggttttgccctgagcagttcccagcttgacttttcccttttgcttagtaattttgggaccctaacattttcacaggctttaaattttattattctttagttactacgtgctagcatataaataaatagtacaaaaccaagaaggcatccaccttttggttgtctcttcacgtgtaaaacaacactttgtgttaagtatcttcacacacggcggcgcaaaggtagaaaccgatactaaaaaagcgtgtagaaaatagttcccagcctgggcaacacagggagacctcatttctacaaaaataattcgccaagcatagtggtgcgcacctgcggtcccagctacttgagaggctgagatgggaaagttgcttgagctcgggcagcaggagttccaggctgcagtgagctaagaatgcgccactggactccagtatgggcgacagcgtgagaccctgtctcaaacaaaaacaaaagcccgttactccaccaagaaggcgcttttgcacattgttttaatgcttaacgccttcaggatgccagcgtgacggaagcaagtaaccaccaaggcatcaccactggcgctaaacttctcacttccggagtgctgcaagcgcagaaaatatacgtcatgtgcggaggcggagcttccgccctgcgcgtcgtattagacggaaaccgagcgggcccatttttcatgggtttgcggacccaccagcgaaggcgggaggtgtcgcagggacatcttctggctgtttccgtcgcctgcgtggcccttgcaccccggtcttccattagcggcgcagacgtttgggcctaagcgctgggcgaggcgaggccctgcccctccccgccaacggccattctctggacctgtctttcttccgggaggcggtgacagctgctgagacgtgttgcagccagagtctctccgctttaatgcgctcccattagtgccgtcccccactggaaaaccgtggcttctgtattatttgccatctttgttgtgtaggagcagggagggcttcctcccggggtcctaggcggcggtgcagtccgtcgtagaagaattagagtagaagttgtcggggtccgctcttaggacgcagccgcctcatgggggtccaggggctctggaagctgctggagtgctccgggcggcaggtcagccccgaagcgctggaagggaagatcctggctgttgatattagcatttggttaaaccaagcacttaaaggagtccgggatcgccatgggaactcaatagaaaatcctcatcttctcactttgtttcatcggctctgcaaactcttattttttcgaattcgtcctatttttgtgtttgatggggatgctccactattgaagaaacagactttggtgaagagaaggcagagaaaggacttagcgtccagtgactccaggaaaacgacagagaagcttctgaaaacatttttgaaaagacaagccatcaaaactgccttcagaagcaaaagagatgaagcactacccagtcttacccaagttcgaagagaaaacgacctctatgttttgcctcctttacaagaggaagaaaaacacagttcagaagaggaagatgaaaaagaatggcaagaaagaatgaatcaaaaacaagcattacaggaagagttctttcataatcctcaagcgatagatattgagtctgaggacttcagcagcctgccccctgaagtaaagcatgaaatcttgactgatatgaaagagttcaccaagcgcagaagaacattatttgaagcaatgccagaggagtctgatgacttttcacagtaccaactcaaaggcttgcttaaaaagaactatctgaaccagcatatagaacatgtccaaaaggaaatgaatcagcaacattcaggacacatccgaaggcagtatgaagatgaagggggctttctgaaggaggtagagtcaaggagagtggtctctgaagacacttcacattacatcttgataaaaggtattcaagctaagacagttgcagaagtggattcagagtctcttccttcttccagcaaaatgcacggcatgtcttttgacgtgaagtcatctccatgtgaaaaactgaagacagagaaagagcctgatgctacccctccttctccaagaactttactagctatgcaagctgccctgctgggaagtagctcagaagaggagctggagagtgaaaatcgaaggcaggcccgtgggaggaacgcacctgctgctgtagacgaaggctccatatcaccccggactctttcagccattaagagagctcttgacgatgacgaagatgtaaaagtgtgtgctggggatgatgtgcagacgggagggccaggagcagaagaaatgcgtataaacagctccaccgagaacagtgatgaaggacttaaagtgagagatggaaaaggaataccgtttactgcaacacttgcgtcatctagtgtgaactctgcagaggagcacgtagccagcactaatgaggggagagagcccacagactcagttccaaaagaacaaatgtcacttgttcacgtggggactgaagcctttccgataagtgatgagtctatgattaaggacagaaaagatcggctgcctctggagagtgcagtggttagacatagtgacgcacctgggctcccgaatggaagggaactgacaccggcatctccaacttgtacaaattctgtgtcaaagaatgaaacacatgctgaagtgcttgagcagcagaacgaactttgcccatatgagagtaaattcgattcttctcttctttcaagtgatgatgaaacaaaatgtaaaccgaattctgcttctgaagtcattggccctgtcagtttgcaagaaacaagtagcatagtaagtgtcccttcagaggcagtagataatgtggaaaatgtggtgtcatttaatgctaaagagcatgagaattttctggaaaccatccaagaacagcagaccactgaatctgcaggccaggatttaatttccattccaaaggccgtggaaccaatggaaattgactcggaagaaagtgaatctgatggaagtttcattgaagtgcaaagtgtgattagtgatgaggaacttcaagcagaattccctgaaacttccaaacctccctcagaacaaggcgaagaggaactggtaggaactagggagggagaagcccctgctgagtccgagagcctcctgagggacaactctgagagggacgacgtggatggtgagccacaggaagctgagaaagatgcggaagattcgctccatgaatggcaagatattaatttggaggagttggaaactctggagagcaacctcttagcacagcagaattcactgaaagctcaaaaacagcagcaagaacggatcgctgctactgtcaccggacagatgttcctggaaagccaggaactcctgcgcctgttcggcattccctacatccaggctcccatggaagcagaggcgcagtgcgccatcctggacctgactgatcagacttccggaaccatcactgatgacagtgatatctggctgtttggagcgcggcatgtctatagaaacttttttaataaaaacaagtttgtagaatattatcaatatgtggactttcacaatcaattgggattggaccggaataagttaataaatttggcttatttgcttggaagtgattataccgaaggaataccaactgtgggttgtgtaaccgccatggaaattctcaatgaattccctgggcatggcctggaacctctcctaaaattctcagaatggtggcatgaagctcaaaaaaatccaaagataagacctaatcctcatgacaccaaagtgaaaaaaaaattacggacattgcaactcacccctggctttcctaacccagctgttgccgaggcctacctcaaacccgtggtggatgactcgaagggatcctttctgtgggggaaacctgatctcgacaaaattagagaattttgtcagcggtatttcggctggaacagaacgaagacagatgaatctctgtttcctgtattaaagcaactcgatgcccagcagacacagctccgaattgattccttctttagattagcacaacaggagaaagaagatgctaaacgtattaagagccagagactaaacagagctgtgacatgtatgctaaggaaagagaaagaagcagcagccagcgaaatagaagcagtttctgttgccatggagaaagaatttgagctacttgataaggcaaaaggaaaaacccagaagagaggcataacaaataccttagaagagtcatcaagcctgaaaagaaagaggctttcagattctaaaggaaagaatacatgcggtggatttttgggggagacctgcctctcagaatcatctgatggatcttcaagtgaagatgctgaaagttcatctttaatgaatgtacaaaggagaacagctgcgaaagagccaaaaaccagtgcttcagattcgcagaactcagtgaaggaagctcccgtgaagaatggaggtgcgaccaccagcagctctagtgatagtgatgacgatggagggaaagagaagatggtcctcgtgaccgccagatctgtgtttgggaagaaaagaaggaaactaagacgtgcgaggggaagaaaaaggaaaacctaattaaaaaatatgtatcctctataattagttatgacagccatttgtaatgaatttgtcgcaaagacgtaataaaattaactggtggcacggtctttgta

SEQ ID NO: 131468 - DNA, 2986 bp, Homo sapiens
  Payload ID: 5655
  Gene Symbol: ERCC5
  Gene Name: excision repair cross-complementation group 5
  Uniprot ID: P28715
  ENST ID: ENST00000375954
  CDS Start-End: 1647-2906
caccacaagctggatgtgagtgtgcttatggatcctgaggtataactgtctcaggccttttcagcaacagtgccaggaagtatatttatgtatacatatacatgcacacacacatctatatttatttctatgtctatctgtactaaaatccatgagtttatactgacatctgcaattccatggggttcagtctagcctcctgcttctttatagtttccctaacaatgagaaacattgctccccttatcctcaatacatttacatctgcttattctccctggatatgtaaccatctccccctcccactggcctcctccttggccctgctctcttctttgcttcagctgtgtccttggtgccagctcccagtccctgagagccccctcctctgttctgattgtctccttaaacccagctggacaggccttgccagccctctccacctacagggaaggaaggcaaccattaaatatattttaaggagaaggaaagacagtaagacagtaagagaggagagaagggaagtggaagaggaagaactatttcttagtcacagctttattctgtgctgtgtaaatagcataaaaacatactgagcaacttccatgattgtttatatactttgataatcctcctttttgaatttttaaaacaatgtcagttaacttagaacatatttatataaagcgaatatacaaatcttaagagagtttcctactttcaaagacagtgccagtttacctaattgaaaaggcttgttttgaagttacaggcatttgtgattacatttatttattaataacgctactattacatgtattctgttatagtcatatctttcctttttaggatgtagcatttttcaggttcctccagaaagctcttgatgattgcaggatcattttaatgttttgattgtagatgaagtgaccttttaattttggtacaggaagtttcattgaagtgcaaagtgtgattagtgatgaggaacttcaagcagaattccctgaaacttccaaacctccctcagaacaaggcgaagaggaactggtaggaactagggagggagaagcccctgctgagtccgagagcctcctgagggacaactctgagagggacgacgtggatggtgagccacaggaagctgagaaagatgcggaagattcgctccatgaatggcaagatattaatttggtaataccgtaacattgtgtttcgacttcttgctgaggaagccaggttaagtaggttttgagttttaaggagttggtggatgagtatttagtagctatttgcagtacatcttgtggttgctgatggcttcatttttgtgtaggttactggctgggatagactccgttttccatgtggtttagtgatgaatctctaaagatattacagagtcttggttagacatccagtggagtacttcctaaggagaaagagcttattggtaatttcagtcagactaaatgcaggctttttgtaaacaaaactcatttggattattaatataaatctataaatgaaaaaacattttataggaggagttggaaactctggagagcaacctcttagcacagcagaattcactgaaagctcaaaaacagcagcaagaacggatcgctgctactgtcaccggacagatgttcctggaaagccaggaactcctgcgcctgttcggcattccctacatccaggctcccatggaagcagaggcgcagtgcgccatcctggacctgactgatcagacttccggaaccatcactgatgacagtgatatctggctgtttggagcgcggcatgtctatagaaacttttttaataaaaacaagtttgtagaatattatcaatatgtggactttcacaatcaattgggattggaccggaataagttaataaatttggcttatttgcttggaagtgattataccgaaggaataccaactgtgggttgtgtaaccgccatggaaattctcaatgaattccctgggcatggcctggaacctctcctaaaattctcagaatggtggcatgaagctcaaaaaaatccaaagataagacctaatcctcatgacaccaaagtgaaaaaaaaattacggacattgcaactcacccctggctttcctaacccagctgttgccgaggcctacctcaaacccgtggtggatgactcgaagggatcctttctgtgggggaaacctgatctcgacaaaattagagaattttgtcagcggtatttcggctggaacagaacgaagacagatgaatctctgtttcctgtattaaagcaactcgatgcccagcagacacagctccgaattgattccttctttagattagcacaacaggagaaagaagatgctaaacgtattaagagccagagactaaacagagctgtgacatgtatgctaaggaaagagaaagaagcagcagccagcgaaatagaagcagtttctgttgccatggagaaagaatttgagctacttgataaggcaaaaggaaaaacccagaagagaggcataacaaataccttagaagagtcatcaagcctgaaaagaaagaggctttcagattctaaaggaaagaatacatgcggtggatttttgggggagacctgcctctcagaatcatctgatggatcttcaagtgaagatgctgaaagttcatctttaatgaatgtacaaaggagaacagctgcgaaagagccaaaaaccagtgcttcagattcgcagaactcagtgaaggaagctcccgtgaagaatggaggtgcgaccaccagcagctctagtgatagtgatgacgatggagggaaagagaagatggtcctcgtgaccgccagatctgtgtttgggaagaaaagaaggaaactaagacgtgcgaggggaagaaaaaggaaaacctaattaaaaaatatgtatcctctataattagttatgacagccatttgtaatgaatttgtcgcaaagacgtaataaaattaact

SEQ ID NO: 131469 - DNA, 635 bp, Homo sapiens
  Payload ID: 5655
  Gene Symbol: ERCC5
  Gene Name: excision repair cross-complementation group 5
  ENST ID: ENST00000472151
  CDS Start-End: 219-350
cagctgctgagacgtgttgcagccagagtctctccgctttaatgcgctcccattagtgccgtcccccactggaaaaccgtggcttctgtattatttgccatctttgttgtgtaggagcagggagggcttcctcccggggtcctaggcggcggtgcagtccgtcgtagaagaattagagtagaagttgtcggggtccgctcttaggacgcagccgcctcatgggggtccaggggctctggaagctgctggagtgctccgggcggcagactatacttgtagcaagcagaaacatcgatctaatacaagacagatgcacatcaacaccaagttctacctctgagatatattagcatttggttaaaccaagcacttaaaggagtccgggatcgccatgggaactcaatagaaaatcctcatcttctcactttgtttcatcggctctgcaaactcttattttttcgaattcgtcctatttttgtgtttgatggggatgctccactattgaagaaacagactttggtgaagagaaggcagagaaaggacttagcgtccagtgactccaggaaaacgacagagaagcttctgaaaacatttttgaaaagacaagccatcaaaactgccttcagaagcaaaag

SEQ ID NO: 131470 - DNA, 1125 bp, Homo sapiens
  Payload ID: 5655
  Gene Symbol: ERCC5
  Gene Name: excision repair cross-complementation group 5
  Uniprot ID: P28715
  ENST ID: ENST00000535557
  CDS Start-End: 427-1125
atttttcatgggtttgcggacccaccagcgaaggcgggaggtgtcgcagggacatcttctggctgtttccgtcgcctgcgtggcccttgcaccccggtcttccattagcggcgcagacgtttgggcctaagcgctgggcgaggcgaggccctgcccctccccgccaacggccattctctggacctgtctttcttccgggaggcggtgacagctgctgagacgtgttgcagccagagtctctccgctttaatgcgctcccattagtgccgtcccccactggaaaaccgtggcttctgtattatttgccatctttgttgtgtaggagcagggagggcttcctcccggggtcctaggcggcggtgcagtccgtcgtagaagaattagagtagaagttgtcggggtccgctcttaggacgcagccgcctcatgggggtccaggggctctggaagctgctggagtgctccgggcggcaggtcagccccgaagcgctggaagggaagatcctggctgttgatattagcatttggttaaaccaagcacttaaaggagtccgggatcgccatgggaactcaatagaaaatcctcatcttctcactttgtttcatcggctctgcaaactcttattttttcgaattcgtcctatttttgtgtttgatggggatgctccactattgaagaaacagactttggtgaagagaaggcagagaaaggacttagcgtccagtgactccaggaaaacgacagagaagcttctgaaaacatttttgaaaagacaagccatcaaaactgccttcagaagcaaaagagatgaagcactacccagtcttacccaagttcgaagagaaaacgacctctatgttttgcctcctttacaagaggaagaaaaacacagttcagaagaggaagatgaaaaagaatggcaagaaagaatgaatcaaaaacaagcattacaggaagagttctttcataatcctcaagcgatagatattgagtctgaggacttcagcagcctgccccctgaagtaaagcatgaaatcttgactgatatgaaagagttcaccaagcgcagaagaacattatttgaagcaatgccagaggtatatcttcctctgctgcagccctag

SEQ ID NO: 131471 - DNA, 3660 bp, Homo sapiens
  Payload ID: 5655
  Gene Symbol: ERCC5
  Gene Name: excision repair cross-complementation group 5
  ENST ID: ENST00000610537
  CDS Start-End: 11-3568
cagccgcctcatgggggtccaggggctctggaagctgctggagtgctccgggcggcaggtcagccccgaagcgctggaagggaagatcctggctgttgatattagcatttggttaaaccaagcacttaaaggagtccgggatcgccatgggaactcaatagaaaatcctcatcttctcactttgtttcatcggctctgcaaactcttattttttcgaattcgtcctatttttgtgtttgatggggatgctccactattgaagaaacagactttggtgaagagaaggcagagaaaggacttagcgtccagtgactccaggaaaacgacagagaagcttctgaaaacatttttgaaaagacaagccatcaaaactgccttcagaagcaaaagagatgaagcactacccagtcttacccaagttcgaagagaaaacgacctctatgttttgcctcctttacaagaggaagaaaaacacagttcagaagaggaagatgaaaaagaatggcaagaaagaatgaatcaaaaacaagcattacaggaagagttctttcataatcctcaagcgatagatattgagtctgaggacttcagcagcctgccccctgaagtaaagcatgaaatcttgactgatatgaaagagttcaccaagcgcagaagaacattatttgaagcaatgccagaggagtctgatgacttttcacagtaccaactcaaaggcttgcttaaaaagaactatctgaaccagcatatagaacatgtccaaaaggaaatgaatcagcaacattcaggacacatccgaaggcagtatgaagatgaagggggctttctgaaggaggtagagtcaaggagagtggtctctgaagacacttcacattacatcttgataaaaggtattcaagctaagacagttgcagaagtggattcagagtctcttccttcttccagcaaaatgcacggcatgtcttttgacgtgaagtcatctccatgtgaaaaactgaagacagagaaagagcctgatgctacccctccttctccaagaactttactagctatgcaagctgccctgctgggaagtagctcagaagaggagctggagagtgaaaatcgaaggcaggcccgtgggaggaacgcacctgctgctgtagacgaaggctccatatcaccccggactctttcagccattaagagagctcttgacgatgacgaagatgtaaaagtgtgtgctggggatgatgtgcagacgggagggccaggagcagaagaaatgcgtataaacagctccaccgagaacagtgatgaaggacttaaagtgagagatggaaaaggaataccgtttactgcaacacttgcgtcatctagtgtgaactctgcagaggagcacgtagccagcactaatgaggggagagagcccacagactcagttccaaaagaacaaatgtcacttgttcacgtggggactgaagcctttccgataagtgatgagtctatgattaaggacagaaaagatcggctgcctctggagagtgcagtggttagacatagtgacgcacctgggctcccgaatggaagggaactgacaccggcatctccaacttgtacaaattctgtgtcaaagaatgaaacacatgctgaagtgcttgagcagcagaacgaactttgcccatatgagagtaaattcgattcttctcttctttcaagtgatgatgaaacaaaatgtaaaccgaattctgcttctgaagtcattggccctgtcagtttgcaagaaacaagtagcatagtaagtgtcccttcagaggcagtagataatgtggaaaatgtggtgtcatttaatgctaaagagcatgagaattttctggaaaccatccaagaacagcagaccactgaatctgcaggccaggatttaatttccattccaaaggccgtggaaccaatggaaattgactcggaagaaagtgaatctgatggaagtttcattgaagtgcaaagtgtgattagtgatgaggaacttcaagcagaattccctgaaacttccaaacctccctcagaacaaggcgaagaggaactggtaggaactagggagggagaagcccctgctgagtccgagagcctcctgagggacaactctgagagggacgacgtggatggtgagccacaggaagctgagaaagatgcggaagattcgctccatgaatggcaagatattaatttggaggagttggaaactctggagagcaacctcttagcacagcagaattcactgaaagctcaaaaacagcagcaagaacggatcgctgctactgtcaccggacagatgttcctggaaagccaggaactcctgcgcctgttcggcattccctacatccaggctcccatggaagcagaggcgcagtgcgccatcctggacctgactgatcagacttccggaaccatcactgatgacagtgatatctggctgtttggagcgcggcatgtctatagaaacttttttaataaaaacaagtttgtagaatattatcaatatgtggactttcacaatcaattgggattggaccggaataagttaataaatttggcttatttgcttggaagtgattataccaggaataccaactgtgggttgtgtaccgccatggaaattctcaatgaattccctgggcatggcctggaacctctcctaaaattctcagaatggtggcatgaagctcaaaaaaatccaaagataagacctaatcctcatgacaccaaagtgaaaaaaaaattacggacattgcaactcacccctggctttcctaacccagctgttgccgaggcctacctcaaacccgtggtggatgactcgaagggatcctttctgtgggggaaacctgatctcgacaaaattagagaattttgtcagcggtatttcggctggaacagaacgaagacagatgaatctctgtttcctgtattaaagcaactcgatgcccagcagacacagctccgaattgattccttctttagattagcacaacaggagaaagaagatgctaaacgtattaagagccagagactaaacagagctgtgacatgtatgctaaggaaagagaaagaagcagcagccagcgaaatagaagcagtttctgttgccatggagaaagaatttgagctacttgataaggcaaaaggaaaaacccagaagagaggcataacaaataccttagaagagtcatcaagcctgaaaagaaagaggctttcagattctaaaggaaagaatacatgcggtggatttttgggggagacctgcctctcagaatcatctgatggatcttcaagtgaagatgctgaaagttcatctttaatgaatgtacaaaggagaacagctgcgaaagagccaaaaaccagtgcttcagattcgcagaactcagtgaaggaagctcccgtgaagaatggaggtgcgaccaccagcagctctagtgatagtgatgacgatggagggaaagagaagatggtcctcgtgaccgccagatctgtgtttgggaagaaaagaaggaaactaagacgtgcgaggggaagaaaaaggaaaacctaattaaaaaatatgtatcctctataattagttatgacagccatttgtaatgaatttgtcgcaaagacgtaataaaattaactggtggcacggtc

SEQ ID NO: 131472 - DNA, 8008 bp, Homo sapiens
  Payload ID: 5656
  Gene Symbol: ERCC6
  Gene Name: excision repair cross-complementation group 6
  Uniprot ID: Q03468
  ENST ID: ENST00000355832
  CDS Start-End: 80-4561
tgggttccaaggcggctggcggcggtagcgtctctgtttccttgtgggcgctcgcgcggccctgggtagtctgtagagaatgccaaatgagggaatcccccactcaagtcaaactcaggagcaagactgtttacagagtcaacctgtcagtaataatgaagaaatggcaatcaagcaagaaagtggtggtgatggggaggtggaggagtacctctcctttcgttctgtgggtgacgggctgtccacctctgctgtggggtgcgcatcagcagctccgaggagagggccagccctgctgcacatcgaccgacatcagatccaggcagtagagcctagcgcccaggcccttgagctgcagggtttgggtgtggacgtctatgaccaggacgtgctggaacagggagtgcttcagcaggtggacaatgccatccatgaggccagccgtgcctcccagctcgttgacgtggagaaggagtatcggtcggtcctggatgacctcacgtcatgtacgacatccctaaggcaaatcaataaaattattgaacagcttagccctcaagctgccaccagcagagacatcaacaggaaactagattctgtaaaacgacagaagtataataaggaacaacagctaaaaaagatcactgcaaaacaaaagcatctccaggccatccttggaggagcagaggtgaaaattgaactagatcacgccagtctggaggaggatgcagagccggggccatccagtcttggcagcatgctcatgcctgtccaggagactgcctgggaagagctcatccgcactggccagatgacaccttttggtacccagatccctcagaaacaggagaaaaagcccagaaaaatcatgcttaatgaagcatcaggcttcgaaaagtatttggcagatcaagcaaaactgtcttttgaaaggaagaagcaaggttgtaataaaagagcagctagaaaagctccagccccagtcacgcctccagccccagtgcaaaataaaaacaaaccaaacaagaaagccagagttctgtccaaaaaagaggagcgtttgaaaaagcacatcaagaaactccagaagagggctttgcagttccaggggaaagtgggattgccaaaggcaaggagaccttgggagtcagacatgaggccagaggcagagggagactctgagggtgaagagtctgagtatttccccacagaggaggaggaagaggaggaagatgacgaggtggagggggcagaggcggacctgtctggagatggtactgactatgagctgaagcctctgcccaagggcgggaaacggcagaagaaagtgccagtgcaggagattgatgatgactttttcccaagttctggggaagaagctgaagctgcttctgtaggagaaggaggaggaggaggtcggaaagtgggaagataccgagatgatggagatgaagattattataagcagcggttaaggagatggaataaactgagactgcaggacaaagagaaacgtctgaagctggaggacgattctgaggaaagtgatgctgaatttgacgaaggttttaaagtgccaggttttctgttcaaaaagctttttaagtaccagcagacaggtgttaggtggctgtgggaattgcactgccagcaggcaggaggaattctgggagatgaaatgggattgggcaagaccatccagataattgccttcttggcaggtctgagctacagcaagatcaggactcgtggttcaaattacaggtttgaggggttgggtccaactgtaattgtctgtccaacaacagtgatgcatcagtgggtgaaggaatttcacacgtggtggcctccgttcagagtggcaattctacatgaaaccggttcctatacccacaaaaaggagaaactaattcgagatgttgctcattgtcatggaattttgatcacatcttactcctacattcgattgatgcaggatgacattagcaggtatgactggcactatgtgatcttggacgaaggacacaaaattcgaaatccaaatgctgctgtcacccttgcttgcaaacagtttcgcacccctcatcggatcattctgtctggctcaccgatgcaaaataacctccgagagctgtggtcgctctttgacttcatcttcccgggaaagttaggcacgttgcctgtgtttatggagcagttctccgtccccatcaccatggggggatattcaaatgcttccccagtacaggtcaaaactgcttacaagtgtgcatgtgtcttacgagataccataaatccatacctactgcggagaatgaagtcagatgtcaagatgagcctttctttgccagataaaaatgaacaggtcttattttgccgtcttacagatgagcagcataaagtctaccaaaatttcgttgattccaaagaagtttacaggattctcaatggagagatgcagattttctccggacttatagccctaagaaaaatttgcaaccaccctgatctcttttctggaggtcccaagaatctcaaaggtcttcctgatgatgaactagaagaagatcagtttgggtactggaaacgttctgggaaaatgattgttgttgagtctttgttgaaaatatggcacaagcagggtcagcgagtattgctgttttctcagtcaaggcagatgctggacatacttgaagtattccttagagcccaaaagtatacctatctcaagatggatggtaccactacaatagcttcaagacagccactgattacgagatacaatgaggacacatccatatttgtgtttcttctgaccacgcgggtgggcggcttaggtgtcaacctgacgggggcaaacagagttgtcatctatgacccagactggaacccaagcacggacacgcaggcccgggagcgagcatggagaataggccagaagaagcaagtgactgtgtacaggctcctgactgcgggcaccattgaagaaaagatctaccaccgacaaatcttcaagcagtttttgacaaatagagtgctaaaagacccaaaacaaaggcggtttttcaaatccaatgatctctatgagctatttactctgactagtcctgatgcatcccagagcactgaaacaagtgcaatttttgcaggaactggatcagatgttcagacacccaaatgccatctaaaaagaaggattcaaccagcctttggagcagaccatgatgttccaaaacgcaagaagttccctgcttctaacatatctgtaaatgatgccacatcatctgaagagaaatctgaggctaaaggagctgaagtaaatgcagtaacttctaatcgaagtgatcctttgaaagatgaccctcacatgagtagtaatgtaactagcaatgataggcttggagaagagacaaatgcagtatctggaccagaagagttgtcagtgattagtggaaatggggaatgttcaaattcttcaggaacaggcaaaacttctatgccatctggtgatgaaagcattgatgaaaagttaggtctttcttacaaaagagaaagacccagccaggctcaaacagaagctttttgggagaataaacaaatggaaaataatttttataagcacaagtcaaaaacaaaacatcatagtgtggcagaagaagagaccctggagaaacatctgagaccaaagcaaaagcctaagaactctaagcattgcagagacgccaagtttgaaggaactcgaattccacacctggtgaagaaaaggcgttaccagaagcaagacagtgaaaacaagagtgaggccaaggaacagagcaatgacgattatgttttggaaaagcttttcaaaaaatcagttggcgtgcacagtgtcatgaagcacgatgccatcatggatggagccagcccagattatgtactggtggaggcagaagccaaccgagtggcccaggatgccctgaaagcactgaggctctctcgtcagcggtgtctgggagcagtgtctggtgttcccacctggactggccacagggggatttctggtgcaccagcaggaaaaaagagtagatttggtaagaaaaggaattctaacttctctgtgcagcatccttcatcaacatctccaacagagaagtgccaggatggcatcatgaaaaaggagggaaaagataatgtccctgagcattttagtggaagagcagaagatgcagactcttcatccgggcccctcgcttcctcctcactcttggctaaaatgagagctagaaaccacctgattctgccagagcgtttagaaagtgaaagcgggcacctgcaggaagcttctgccctgctgcccaccacagaacacgatgaccttctggtggagatgagaaacttcatcgctttccaggcccacactgatggccaggccagcaccagggagatactgcaggagtttgaatccaagttatctgcatcacagtcttgtgtcttccgagaactattgagaaatctgtgcactttccatagaacttctggtggtgaaggaatttggaaactcaagccagaatactgctaaacaacattgcttcctaaactttcaagtccctttttctaacgggcatttctgattattaatttattattaataatcatgtttgtcaatggaagttggctgcacttgatgtttgtttgcatgatgtctacctcagaattaaaactttaaggaagaagaaactcttctctgaaagttaaaagttttaataatgctagctaaaggagaaaatacttggattgatttttttttttttggcaatctaattatattgtaaatcaggtacctaacagttactccttggagcacatttgttcctttacccaaaagatgctgtcagggagcacagttagaagtttgcagaacagaaatctcaatatttttttttattggtgctaaaaacaggtcttacattcagtcagacctgttcaataagttcatcaatatctgataacagcattattttgatgcttaaactttaaacatttatatttaccatttgccacccacaaaggtcaggtttgttatttgttgtttgataattatattaattttcttggaaagatcctcttttcaaggtactggtaaattggtgagtatttttattagtaaagcatgaaatagtatggtaataaatgataagacatgtatttgtggaaagctgtagggtattcagtttaccctggctttcctttaagcagagggcatctttttctctcctacagtcacaaaatgtgttatcattaaaaaaaatcaaattaaagccaaaagtaggtacataaaaaccacacacatgcatgcacacaaacatcactgcagcccacagcagacccagccgttgttaccatgaagtgacaccactccaggcctctcttgtctgcaggctggcaggctgtcttctctccagttgccttcgtcttgcgcctgcctttgcattccttgcgacgggctttcttgtttctgcggtttggattccagccaaggctgtttgtatctcactactgtttatgtgtttgtggttctgtgatggtgttgctttgatcctcagtttattttcttacccatgtttttcttgtttccttctcaggatgattttatcatctcatctttgaagtgttgttttccgaaattcatcgtattcctgaaatttcttcttagctgtcttagtgcagtttgtttcttggatttgtattctctggcatgctcttttcctctctctcatttttctgtagtatgcctgccctcctaccctgctatttctttacatctctctcatgcttaacatggatagctgtgtccagatcttctgtctgctcatccatgtgactcagagaggagggttctgggcaggggggccttgccggactgcatgagaggacatgagttttgctttctctgctctaatattttgcttaagccaagaatccttttcttagagatgttctatatgattcctgtcaggattttctagttttttttggattatagcttgttcatttcttttgtttttagtttggtttatatataatgagggaagaagatgattacattatttttgtcactttgccatcattgtttagaagtcatagaaagaatttttaaataggccaataagtcttaaacttgagtacttggcttagaagaaagtcaaaactccttcctttttgactaagtggtttgtttctggggagctcttaatttctatttttataatcattagcctataaggaaattgtgtcttccttgttctcagggtgatctgctgaccttgttcactcatgaagcatttgggtatcatacttatagtgtctgaaacataaactgtattgagctagacaaggtatagcctcctcttcaagtagcaaatactatcaaaagctataatgcagtaggagcaaggtggtccttgttccagtttttgtctcagttctgctgctgatgtaccatgatcttgggaaggtggtgtctcagtgtggagatctgacacattgttaccgtgcctcctggctggagggacttggagaacaatgcagttaagtagaatggttttaacaatacagagaaatttattcatttagataaaaatctgatttttagaactttaaaagctttgtacagtgtaaatagatttaatgtatttaacatgctttatcagcacaaataaaggattttaaaattttgtcaaaaaattaaatgttaatactatcaccattaaaaatgttcaagcaatagtctgcctccccacccccacaccatcttgcacctgttccacagctaagtacagccctaggtttggtgtgtattctccatgcatttagagaatcacatgacacagactgctgctataatgtcattttcccattcttcctttactaataaaatttttgagttttacctggacgtctggctgctcagcttaagactacttctcagcctctcttatagttaattgtggccatatgactaagttttaaacttcccaattggccctttaaagaagcagggtatgcactctccttgacattcccctttcttgctggctgggaggccaatgggagcttcagtagtgacctggcatctcaagagatggaagtgatgtgttgaggaaggagaagttggcctgccagtcttgaactgctctcctttgacctgttatttaagagtaaaataaaatactgacttgcttaagctactgtcttttgaagtctattatagcaattagtttgctttaaatatgtaatttatattaatggccttataccatccttattttgcaactaacttttcatttaatattatatgcaagacatttctattcctgtaagtatagctctgcctgcacagaattgttggattaatgatgtagattttaaatgtcagtggatgtagcagaattgcttgcatcaattcaccctccataaaaggacccatttctccaaacccttgccaacagtaagtggtatcaatatcgataggttgttttgttttgttttaaccagtctcgtgattgaaagtaccttgttttcacttgaatttccctgattacgtacaaaatcaaacatttccatgtttattggccatttgtagatctctaccgtacattgcctattagtgttatgttggcctagttttcctgtgggttgtttatcttttaggattgctcccctaaacaaaaacaaaaaggcagttattccaatgatcaacaaatattcttttctccaccagtttaaaatgtcagctttcaactcatcacatgctaagttgtctatttctgtcctgtggatccaggtgttggttctaccaaccacactcctcacgctgtcatttggtgctttgcattgtgttttgccattcatgggcaagttccttttcctttctccccctcttcagtgtcttatacttgggtgttttctgttccagctgaatcaagaattagtttattaaattccagtaaaattgtggtgttctttt

SEQ ID NO: 131473 - DNA, 660 bp, Homo sapiens
  Payload ID: 5656
  Gene Symbol: ERCC6
  Gene Name: excision repair cross-complementation group 6
  ENST ID: ENST00000462247
  CDS Start-End: 122-660
aggtgcgcgcgtggcggagggggaacagagaagcaggacagctctccatccttcccgtgttcagtcgtgggagacaacaagagaggtcacagcctggcgaccaaaaagtagtctgtagagaatgccaaatgagggaatcccccactcaagtcaaactcaggagcaagactgtttacagagtcaacctgtcagtaataatgaagaaatggcaatcaagcaagaaagtggtggtgatggggaggtggaggagtacctctcctttcgttctgtgggtgacgggctgtccacctctgctgtggggtgcgcatcagcagctccgaggagagggccagccctgctgcacatcgaccgacatcagatccaggcagtagagcctagcgcccaggcccttgagctgcagggtttgggtgtggacgtctatgaccaggacgtgctggaacagggagtgcttcagcaggtggacaatgccatccatgaggccagccgtgcctcccagctcgttgacgtggagaaggagtatcggtcggtcctggatgacctcacgtcatgtacgacatccctaaggcaaatcaataaaattattgaacagcttagccctcaagctgccaccagcagagacatcaacaggaaactagattctgtaaaacgacagaagtataa

SEQ ID NO: 131474 - DNA, 5761 bp, Homo sapiens
  Payload ID: 5656
  Gene Symbol: ERCC6
  Gene Name: excision repair cross-complementation group 6
  ENST ID: ENST00000624341
  CDS Start-End: 1-233
ttgattccaaagaagtttacaggattctcaatggagagatgcaggaggttcttcagtcattcacatctattcatctccatgaatctccccttaacttcttcaggtctttccaagttagggggtctagatcacactatccaggaaagggaatgcaaactacacttggaattgtaaattttctagtagtcacattaaaaaggaaaaagagaaacagattttctccggacttatagccctaagaaaaatttgcaaccaccctgatctcttttctggaggtcccaagaatctcaaaggtcttcctgatgatgaactagaagaagatcagtttgggtactggaaacgttctgggaaaatgattgttgttgagtctttgttgaaaatatggcacaagcagggtcagcgagtattgctgttttctcagtcaaggcagatgctggacatacttgaagtattccttagagcccaaaagtatacctatctcaagatggatggtaccactacaatagcttcaagacagccactgattacgagatacaatgaggacacatccatatttgtgtttcttctgaccacgcgggtgggcggcttaggtgtcaacctgacgggggcaaacagagttgtcatctatgacccagactggaacccaagcacggacacgcaggcccgggagcgagcatggagaataggccagaagaagcaagtgactgtgtacaggctcctgactgcgggcaccattgaagaaaagatctaccaccgacaaatcttcaagcagtttttgacaaatagagtgctaaaagacccaaaacaaaggcggtttttcaaatccaatgatctctatgagctatttactctgactagtcctgatgcatcccagagcactgaaacaagtgcaatttttgcaggaactggatcagatgttcagacacccaaatgccatctaaaaagaaggattcaaccagcctttggagcagaccatgatgttccaaaacgcaagaagttccctgcttctaacatatctgtaaatgatgccacatcatctgaagagaaatctgaggctaaaggagctgaagtaaatgcagtaacttctaatcgaagtgatcctttgaaagatgaccctcacatgagtagtaatgtaactagcaatgataggcttggagaagagacaaatgcagtatctggaccagaagagttgtcagtgattagtggaaatggggaatgttcaaattcttcaggaacaggcaaaacttctatgccatctggtgatgaaagcattgatgaaaagttaggtctttcttacaaaagagaaagacccagccaggctcaaacagaagctttttgggagaataaacaaatggaaaataatttttataagcacaagtcaaaaacaaaacatcatagtgtggcagaagaagagaccctggagaaacatctgagaccaaagcaaaagcctaagaactctaagcattgcagagacgccaagtttgaaggaactcgaattccacacctggtgaagaaaaggcgttaccagaagcaagacagtgaaaacaagagtgaggccaaggaacagagcaatgacgattatgttttggaaaagcttttcaaaaaatcagttggcgtgcacagtgtcatgaagcacgatgccatcatggatggagccagcccagattatgtactggtggaggcagaagccaaccgagtggcccaggatgccctgaaagcactgaggctctctcgtcagcggtgtctgggagcagtgtctggtgttcccacctggactggccacagggggatttctggtgcaccagcaggaaaaaagagtagatttggtaagaaaaggaattctaacttctctgtgcagcatccttcatcaacatctccaacagagaagtgccaggatggcatcatgaaaaaggagggaaaagataatgtccctgagcattttagtggaagagcagaagatgcagactcttcatccgggcccctcgcttcctcctcactcttggctaaaatgagagctagaaaccacctgattctgccagagcgtttagaaagtgaaagcgggcacctgcaggaagcttctgccctgctgcccaccacagaacacgatgaccttctggtggagatgagaaacttcatcgctttccaggcccacactgatggccaggccagcaccagggagatactgcaggagtttgaatccaagttatctgcatcacagtcttgtgtcttccgagaactattgagaaatctgtgcactttccatagaacttctggtggtgaaggaatttggaaactcaagccagaatactgctaaacaacattgcttcctaaactttcaagtccctttttctaacgggcatttctgattattaatttattattaataatcatgtttgtcaatggaagttggctgcacttgatgtttgtttgcatgatgtctacctcagaattaaaactttaaggaagaagaaactcttctctgaaagttaaaagttttaataatgctagctaaaggagaaaatacttggattgatttttttttttttggcaatctaattatattgtaaatcaggtacctaacagttactccttggagcacatttgttcctttacccaaaagatgctgtcagggagcacagttagaagtttgcagaacagaaatctcaatatttttttttattggtgctaaaaacaggtcttacattcagtcagacctgttcaataagttcatcaatatctgataacagcattattttgatgcttaaactttaaacatttatatttaccatttgccacccacaaaggtcaggtttgttatttgttgtttgataattatattaattttcttggaaagatcctcttttcaaggtactggtaaattggtgagtatttttattagtaaagcatgaaatagtatggtaataaatgataagacatgtatttgtggaaagctgtagggtattcagtttaccctggctttcctttaagcagagggcatctttttctctcctacagtcacaaaatgtgttatcattaaaaaaaatcaaattaaagccaaaagtaggtacataaaaaccacacacatgcatgcacacaaacatcactgcagcccacagcagacccagccgttgttaccatgaagtgacaccactccaggcctctcttgtctgcaggctggcaggctgtcttctctccagttgccttcgtcttgcgcctgcctttgcattccttgcgacgggctttcttgtttctgcggtttggattccagccaaggctgtttgtatctcactactgtttatgtgtttgtggttctgtgatggtgttgctttgatcctcagtttattttcttacccatgtttttcttgtttccttctcaggatgattttatcatctcatctttgaagtgttgttttccgaaattcatcgtattcctgaaatttcttcttagctgtcttagtgcagtttgtttcttggatttgtattctctggcatgctcttttcctctctctcatttttctgtagtatgcctgccctcctaccctgctatttctttacatctctctcatgcttaacatggatagctgtgtccagatcttctgtctgctcatccatgtgactcagagaggagggttctgggcaggggggccttgccggactgcatgagaggacatgagttttgctttctctgctctaatattttgcttaagccaagaatccttttcttagagatgttctatatgattcctgtcaggattttctagttttttttggattatagcttgttcatttcttttgtttttagtttggtttatatataatgagggaagaagatgattacattatttttgtcactttgccatcattgtttagaagtcatagaaagaatttttaaataggccaataagtcttaaacttgagtacttggcttagaagaaagtcaaaactccttcctttttgactaagtggtttgtttctggggagctcttaatttctatttttataatcattagcctataaggaaattgtgtcttccttgttctcagggtgatctgctgaccttgttcactcatgaagcatttgggtatcatacttatagtgtctgaaacataaactgtattgagctagacaaggtatagcctcctcttcaagtagcaaatactatcaaaagctataatgcagtaggagcaaggtggtccttgttccagtttttgtctcagttctgctgctgatgtaccatgatcttgggaaggtggtgtctcagtgtggagatctgacacattgttaccgtgcctcctggctggagggacttggagaacaatgcagttaagtagaatggttttaacaatacagagaaatttattcatttagataaaaatctgatttttagaactttaaaagctttgtacagtgtaaatagatttaatgtatttaacatgctttatcagcacaaataaaggattttaaaattttgtcaaaaaattaaatgttaatactatcaccattaaaaatgttcaagcaatagtctgcctccccacccccacaccatcttgcacctgttccacagctaagtacagccctaggtttggtgtgtattctccatgcatttagagaatcacatgacacagactgctgctataatgtcattttcccattcttcctttactaataaaatttttgagttttacctggacgtctggctgctcagcttaagactacttctcagcctctcttatagttaattgtggccatatgactaagttttaaacttcccaattggccctttaaagaagcagggtatgcactctccttgacattcccctttcttgctggctgggaggccaatgggagcttcagtagtgacctggcatctcaagagatggaagtgatgtgttgaggaaggagaagttggcctgccagtcttgaactgctctcctttgacctgttatttaagagtaaaataaaatactgacttgcttaagctactgtcttttgaagtctattatagcaattagtttgctttaaatatgtaatttatattaatggccttataccatccttattttgcaactaacttttcatttaatattatatgcaagacatttctattcctgtaagtatagctctgcctgcacagaattgttggattaatgatgtagattttaaatgtcagtggatgtagcagaattgcttgcatcaattcaccctccataaaaggacccatttctccaaacccttgccaacagtaagtggtatcaatatcgataggttgttttgttttgttttaaccagtctcgtgattgaaagtaccttgttttcacttgaatttccctgattacgtacaaaatcaaacatttccatgtttattggccatttgtagatctctaccgtacattgcctattagtgttatgttggcctagttttcctgtgggttgtttatcttttaggattgctcccctaaacaaaaacaaaaaggcagttattccaatgatcaacaaatattcttttctccaccagtttaaaatgtcagctttcaactcatcacatgctaagttgtctatttctgtcctgtggatccaggtgttggttctaccaaccacactcctcacgctgtcatttggtgctttgcattgtgttttgccattcatgggcaagttccttttcctttctccccctcttcagtgtcttatacttgggtgttttctgttccagctgaatcaagaattagtttattaaattccagtaaaattgtggtgttctttt

SEQ ID NO: 131475 - DNA, 2932 bp, Homo sapiens
  Payload ID: 5656
  Gene Symbol: ERCC6
  Gene Name: excision repair cross-complementation group 6
  ENST ID: ENST00000623115
  CDS Start-End: 314-2905
aaaatgagattttaggtagacatacctataggtaccagatagtaagtatttggacagcaaaacaacaaaactatcttcttttaaggtaccagcagacaggtgttaggtggctgtgggaattgcactgccagcaggcaggaggaattctgggagatgaaatgggattgggcaagaccatccagataattgccttcttggcaggtctgagctacagcaagatcaggactcgtggttcaaattacaggagaaactaattcgagatgttgctcattgtcatggaattttgatcacatcttactcctacattcgattgatgcaggatgacattagcaggtatgactggcactatgtgatcttggacgaaggacacaaaattcgaaatccaaatgctgctgtcacccttgcttgcaaacagtttcgcacccctcatcggatcattctgtctggctcaccgatgcaaaataacctccgagagctgtggtcgctctttgacttcatcttcccgggaaagttaggcacgttgcctgtgtttatggagcagttctccgtccccatcaccatggggggatattcaaatgcttccccagtacaggtcaaaactgcttacaagtgtgcatgtgtcttacgagataccataaatccatacctactgcggagaatgaagtcagatgtcaagatgagcctttctttgccagataaaaatgaacaggtcttattttgccgtcttacagatgagcagcataaagtctaccaaaatttcgttgattccaaagaagtttacaggattctcaatggagagatgcagattttctccggacttatagccctaagaaaaatttgcaaccaccctgatctcttttctggaggtcccaagaatctcaaaggtcttcctgatgatgaactagaagaagatcagtttgggtactggaaacgttctgggaaaatgattgttgttgagtctttgttgaaaatatggcacaagcagggtcagcgagtattgctgttttctcagtcaaggcagatgctggacatacttgaagtattccttagagcccaaaagtatacctatctcaagatggatggtaccactacaatagcttcaagacagccactgattacgagatacaatgaggacacatccatatttgtgtttcttctgaccacgcgggtgggcggcttaggtgtcaacctgacgggggcaaacagagttgtcatctatgacccagactggaacccaagcacggacacgcaggcccgggagcgagcatggagaataggccagaagaagcaagtgactgtgtacaggctcctgactgcgggcaccattgaagaaaagatctaccaccgacaaatcttcaagcagtttttgacaaatagagtgctaaaagacccaaaacaaaggcggtttttcaaatccaatgatctctatgagctatttactctgactagtcctgatgcatcccagagcactgaaacaagtgcaatttttgcaggaactggatcagatgttcagacacccaaatgccatctaaaaagaaggattcaaccagcctttggagcagaccatgatgttccaaaacgcaagaagttccctgcttctaacatatctgtaaatgatgccacatcatctgaagagaaatctgaggctaaaggagctgaagtaaatgcagtaacttctaatcgaagtgatcctttgaaagatgaccctcacatgagtagtaatgtaactagcaatgataggcttggagaagagacaaatgcagtatctggaccagaagagttgtcagtgattagtggaaatggggaatgttcaaattcttcaggaacaggcaaaacttctatgccatctggtgatgaaagcattgatgaaaagttaggtctttcttacaaaagagaaagacccagccaggctcaaacagaagctttttgggagaataaacaaatggaaaataatttttataagcacaagtcaaaaacaaaacatcatagtgtggcagaagaagagaccctggagaaacatctgagaccaaagcaaaagcctaagaactctaagcattgcagagacgccaagtttgaaggaactcgaattccacacctggtgaagaaaaggcgttaccagaagcaagacagtgaaaacaagagtgaggccaaggaacagagcaatgacgattatgttttggaaaagcttttcaaaaaatcagttggcgtgcacagtgtcatgaagcacgatgccatcatggatggagccagcccagattatgtactggtggaggcagaagccaaccgagtggcccaggatgccctgaaagcactgaggctctctcgtcagcggtgtctgggagcagtgtctggtgttcccacctggactggccacagggggatttctggtgcaccagcaggaaaaaagagtagatttggtaagaaaaggaattctaacttctctgtgcagcatccttcatcaacatctccaacagagaagtgccaggatggcatcatgaaaaaggagggaaaagataatgtccctgagcattttagtggaagagcagaagatgcagactcttcatccgggcccctcgcttcctcctcactcttggctaaaatgagagctagaaaccacctgattctgccagagcgtttagaaagtgaaagcgggcacctgcaggaagcttctgccctgctgcccaccacagaacacgatgaccttctggtggagatgagaaacttcatcgctttccaggcccacactgatggccaggccagcaccagggagatactgcaggagtttgaatccaagttatctgcatcacagtcttgtgtcttccgagaactattgagaaatctgtgcactttccatagaacttctggtggtgaaggaatttggaaactcaagccagaatactgctaaacaacattgcttcctaaactttcaagt

SEQ ID NO: 131476 - DNA, 546 bp, Homo sapiens
  Payload ID: 5656
  Gene Symbol: ERCC6
  Gene Name: excision repair cross-complementation group 6
  ENST ID: ENST00000623318
  CDS Start-End: 194-546
agattaaataaaaccagttaaatgagctgaagtccaaaatgagattttaggtagacatacctataggtaccagatagtaagtatttggacagcaaaacaacaaaactatcttcttttaaggtaccagcagacaggtgttaggtggctgtgggaattgcactgccagcaggcaggaggaattctgggagatgaaatgggattgggcaagaccatccagataattgccttcttggcaggtctgagctacagcaagatcaggactcgtggttcaaattacaggtttgaggggttgggtccaactgtaattgtctgtccaacaacagtgatgcatcagtgggtgaaggaatttcacacgtggtggcctccgttcagagtggcaattctacatgaaaccggttcctatacccacaaaaaggagaaactaattcgagatgttgctcattgtcatggaattttgatcacatcttactcctacattcgattgatgcaggatgacattagcaggtatgactggcactatgtgatcttggacgaaggacacaaaat

SEQ ID NO: 131477 - DNA, 11026 bp, Homo sapiens
  Payload ID: 5656
  Gene Symbol: ERCC6
  Gene Name: excision repair cross-complementation group 6
  ENST ID: ENST00000623073
  CDS Start-End: 5858-6088
gtttaaggggctttgttgttttatgctgtgactatcatatctttagaacagaaatagtaattataaatctattttttgttacatagtattgcggttgtgaagacactcaattatattgaaatttttactgaatcttttctaggactaatttcatgtcttacgaaccagcagagaaattttcccttagggtatgccagaagaggagcaagtagttttgataatgaaatgagaccttaaagaaatatttctagagcagctataataatttacataagaaatgaattgagatggctggagaagagaattgtttttcctctttgaatatcagtgttttgggtaataatggcagcattaacctaagagaccgttctaatttgcctgttttttcttgtacattatcaggagctatctttttaaatctgtcttgtgatcaaaataatggaaatgtgatttttattttcatggtaggagatggaataaactgagactgcaggacaaagagaaacgtctgaagctggaggacgattctgaggaaagtgatgctgaatttgacgaaggttttaaagtgccaggttttctgttcaaaaagctttttaagtatgtaccatatgttctttcctttctatttgctatcaagccattatgtacaaattaacattttaggaattacatagtagttacctgtgggccctgaaggtacttgcagcaatttgttgcaaaaacagatactgtcaaatgaaattatagccacgtgctgttcattaaaattggatgataataagttgactaaaatgtgcattgggtatgtttgtaaactgatgaatctatatggacctgcctcagcagactaaaagcaacacatttaaaagccatttatgttgaataatttttttgttcttagtaattttaaggtgccaaactcctaatttcttaaataagattaataggaagagttgcatattaaaatcaatattgggaaggattttttttcttctatgtggaaataaaaaacttttgacattttttttgagtgtcttatattgtacctgagggtataatatttttgagctgaccaaatgtgcatctaaatattttatgtaggatgtcattctaatgtcaaaagagaagatatgggcaacaccttgatgattaagttgctatttgaagccaggtttcatgtgtaagtggccaagcattggagatgaccggatgctgcctgatagatgtgttcatgttgtctctaagggctggccagtctcccgtgatgaatgtaaatactgaggaacattttcagtctcgtcactcctgggatttacttaacaagatactttaggaaggcttcttagatgcatataggaagttaaaccattacatagcttctttctgtctcttttgtataatcaatttgtagttgggagcaggatgcaaagttctttgttcgagatgattaagtttggtctcctttatagattcagctgtcagccatgccctaaacttgtggaagaagtctacttaaaaacagcatgctctttatattttctctcaaagagcttatattatagttttaatttttctctccattggggtaggggagagtgaagagtagtttttttatcccactaaacattatagaaagccaaactctaaagatgtgaagtgacttgatgtgattgctttaactggacagaggaacagccgtgtagaagttgaaatctgaatctgtagtaatatttacagaggtggttgctttgtttattgcttctcccaaatgagaattaactatggaaaggtaaataaaggccacttttattggcaactctttttgttttctctacagtgattctttgttaagaaacaagccaaataccatcagtgttgtactagcaaaaggaatacccaaattatagattaaattgatttaaaaaagacaggatacttctgtgtatttgtagtaagtgatttggcagatatcctcaaggatcaagttgagtctgcatttttgtataaatgtcagattttctagcaaagatatttcacaattaatagtactaaactttgcttactaaaagtatttaggattcagtgtattaacaaaactctatagtagttaatataaataatattcgttttttaaaaattagtcttaattgcacattcctggaaagtattgtgtttttttaatctctgcaaaaacaggattttaaatattttatgtcataaaacttctgttcattttcttttgctgtatgaaaaaaattaataggattgatagagtctccatttttcttttatgattgcgttttagcggggccaatttaattttaaactgtagatatatttttttactgtatttgctgcattctgtggaattgaattgacagggtatagagttgtacacaagggagtcagaaggtacaattagccatttaagtacattttctgcaagatagtgtttaacttttaaatttctgttttgaaagtttgcccagcaagtatatttgtctatctaatttagcagtcaaatgacaaacttcaatcttttgaccttattttcagccacactagtaaatgcaatcttgggttagtgtggcaatgccaatgtacaccaattatttgtggtcacattgtgatgcctcagtctcaagggatagcagaataaatttttttatgttgtatattcataaaaatctttaactgtccctaaagagtaatttttatatgcttttcaaaaattttgaaaactagattctataatatgtttttatttaaactatgtaattggtttacactgtttattattaggaaggtaaagcaataaaaccaaagtcagttagtggcacagctgaaacctgagctcaggcccttatattcctcatctagcaacaccagctatgtatatcatctaccagctgtgtggctagtgcttttaatctgcaagtgaatttcctttaaataccatctgagggccttcgtgtattgtgtggaaagaaagagccactctttgctatctttgtaactatccctagtttttggggatcctgctagagatatgacttacatgctgcctagtaagattttttttaatgtcattttcttagtgctgttcatcttcttgtaaacacactcacatgctgtttgaaagccgtcgaagattagatttgtagatgaggaaacacccagcacattgtatgctgcctttcctgggccacacagaatctagttgtcttaaccccctctcaggttccttttgggatcctatgctgtttaccatttctttaataatttctcaactgctcctttccgcactctccctactttagttaagttgatgagccccaagcaaaaagagttgttggacccatgtaggatggaggcagtgtggtgtaggagtaatacactagaataatcactgggagattttgttccccgactggaggagctggtccagttgttctgtatctcagcaaaaagaggtcaactgactagaatgtagtgattctggaaactaattgcacatcagtttttttggagagctttttgcagtgtgtctttttcaaaagttgagattattctagtgtagccagttcatgaaccagcttttgttctaaatgagggtttctcgaccttgacacaattgacacttagggctaaataatttgttgctgtggggactgtcctgtgcagtatcagatattgaacagcttctctggcctctactattgcacttctctggttgtaacaaaaatgtctttagacattgccaaatgtcccatagggagaagaattacccctggctgagaactattggtctagatcatttccagaatcactttggaaacatacagttctggatttcagctctggcttgctcatttttttctagcgatgtcacctttggcaagttacctaaccattctgagcttttgtttcctaattataaagtgtgctgataatctcctttgtgcaagttgattgtgaggctgtgtccaaaccacctggcctggtgcctcctcagcagttggttccttaagtggtagccattattctctgattacataccacatattttcggaatttgtccttcttcccaaattaaatgatcttgtatctgtactacacttcatcgtgttttgatttttagttcttttctccaaggtgcatatccagtgtgtgtattataattagcaaacttaataagcagcaaagttctcatttagagttttccttatgtaataggtaataatggaacagctagagtcaaacttctagaattgctttgcaaaatactgggagaaagttaattatgacgtatttactgagaggagattaaataaaaccagttaaatgagctgaagtccaaaatgagattttaggtagacatacctataggtaccagatagtaagtatttggacagcaaaacaacaaaactatcttcttttaaggtgggtagcccatcagccttgatattttctttgaaaaaaaaatgccttatcttgcatcatctttttatttatttattagagatggggtctcactctgttgcccagtttggaatccggtggtgcaatcatggttcattgcagcctcaacctccatggctcaagcaatcctctcaccttagcctcccaagtagctaggactacaggcacgtgccaccactcctggctaaattttttttttttttcttgtagagatgaggtcttactatgttgcccatgctggtcttgaactcctgggcttaaatgatcctcctgcctcggcttcccaaagtgctgggatttacaggcatgagccacctcatctaacctatcatcttttaattcaagtggtttttgctttagattttgtaacttgggatataatcttcataccattccctgttgttaagtgtttcttccactctccgaaaatttttttgtatttttccttttttaactttatttttaggttatagattaaacatatcattgatggagaaagaaaaatatcaacttctgttttttgcagggggaggggttaaggttaaattatttctctttgacccatattccttatttaaaatcttaatagctatgatcttttcgtacctttggtaaactccctgaatcaatttctgctttgaaatattaaaaagaccttttgtattgttgagtctttaaactgtgcttttttttgcatctgctagtaatatgacagaatcatctgttatgttctaattttgagagcagacctattattcagacttgtttatggccttaaaatttaattttttctattaaaagataatatgatcaccaagtgacttttcaacagtataagctataggttgtggtgttctctgtcctgcttttttgatgctattcagattgaaaaaataaacattagtgccccttttttatagaaaaattaatggaactttatatatgaaaaatatttgggattttttcccccagaaagtgagtaaaaaatagtaagtttatgcttgtttagcaagctatttctaatgttgaaaagaaaggaaatagtctctaattaccccatctatcagtttaattagaaatgtgttaatgttttgtaaagaaaaatttgtgatttttatgcctaggtgatcaaaaatgtatgaccttataaatataatactcatgtaaaacacacatcccgcatgtttctctgactggtactagaacctagccaaatgattaattcatgagtactttctgttatgatctgtattatccaccatttgccattttctcttttcttgttggtgtttgttgtcataggtaccagcagacaggtgttaggtggctgtgggaattgcactgccagcaggcaggaggaattctgggagatgaaatgggattgggcaagaccatccagataattgccttcttggcaggtctgagctacagcaagatcaggactcgtggttcaaattacaggtttgaggggttgggtccaactgtaattgtctgtccaacaacagtgatgcatcagtgggtgaaggaatttcacacgtggtggcctccgttcagagtggcaattctacatgaaaccggttcctatacccacaaaaaggtgcagtaaatcctgcctaggaagcggctgtactgtgtttcctgtgaatggccttcatgtgcctgtgcttcgctcctctccccgccgcctgacagtgtgatttatggctgttgttttccaccagtccactgtttgccctctaggagggattggtctcttgagcctccataataacagcagccctttcacagacatcttctaatgacaacagcactgcattcagagaaactaattcgagatgttgctcattgtcatggaattttgatcacatcttactcctacattcgattgatgcaggatgacattagcaggtatgactggcactatgtgatcttggacgaaggacacaaaattcgaaatccaaatgctgctgtcacccttgcttgcaaacagtttcgcacccctcatcggatcattctgtctggctcaccgatgcaaaataacctccgagagctgtggtcgctctttgacttcatcttcccgggaaagttaggcacgttgcctgtgtttatggagcagttctccgtccccatcaccatggggggatattcaaatgcttccccagtacaggtcaaaactgcttacaagtgtgcatgtgtcttacgagataccataaatccatacctactgcggagaatgaagtcagatgtcaagatgagcctttctttgccagataaaaatgaacagattttctccggacttatagccctaagaaaaatttgcaaccaccctgatctcttttctggaggtcccaagaatctcaaaggtcttcctgatgatgaactagaagaagatcagtttgggtactggaaacgttctgggaaaatgattgttgttgagtctttgttgaaaatatggcacaagcagggtcagcgagtattgctgttttctcagtcaaggcagatgctggacatacttgaagtattccttagagcccaaaagtatacctatctcaagatggatggtaccactacaatagcttcaagacagccactgattacgagatacaatgaggacacatccatatttgtgtttcttctgaccacgcgggtgggcggcttaggtgtcaacctgacgggggcaaacagagttgtcatctatgacccagactggaacccaagcacggacacgcaggcccgggagcgagcatggagaataggccagaagaagcaagtgactgtgtacaggctcctgactgcgggcaccattgaagaaaagatctaccaccgacaaatcttcaagcagtttttgacaaatagagtgctaaaagacccaaaacaaaggcggtttttcaaatccaatgatctctatgagctatttactctgactagtcctgatgcatcccagagcactgaaacaagtgcaatttttgcaggaactggatcagatgttcagacacccaaatgccatctaaaaagaaggattcaaccagcctttggagcagaccatgatgttccaaaacgcaagaagttccctgcttctaacatatctgtaaatgatgccacatcatctgaagagaaatctgaggctaaaggagctgaagtaaatgcagtaacttctaatcgaagtgatcctttgaaagatgaccctcacatgagtagtaatgtaactagcaatgataggcttggagaagagacaaatgcagtatctggaccagaagagttgtcagtgattagtggaaatggggaatgttcaaattcttcaggaacaggcaaaacttctatgccatctggtgatgaaagcattgatgaaaagttaggtctttcttacaaaagagaaagacccagccaggctcaaacagaagctttttgggagaataaacaaatggaaaataatttttataagcacaagtcaaaaacaaaacatcatagtgtggcagaagaagagaccctggagaaacatctgagaccaaagcaaaagcctaagaactctaagcattgcagagacgccaagtttgaaggaactcgaattccacacctggtgaagaaaaggcgttaccagaagcaagacagtgaaaacaagagtgaggccaaggaacagagcaatgacgattatgttttggaaaagcttttcaaaaaatcagttggcgtgcacagtgtcatgaagcacgatgccatcatggatggagccagcccagattatgtactggtggaggcagaagccaaccgagtggcccaggatgccctgaaagcactgaggctctctcgtcagcggtgtctgggagcagtgtctggtgttcccacctggactggccacagggggatttctggtgcaccagcaggaaaaaagagtagatttggtaagaaaaggaattctaacttctctgtgcagcatccttcatcaacatctccaacagagaagtgccaggatggcatcatgaaaaaggagggaaaagataatgtccctgagcattttagtggaagagcagaagatgcagactcttcatccgggcccctcgcttcctcctcactcttggctaaaatgagagctagaaaccacctgattctgccagagcgtttagaaagtgaaagcgggcacctgcaggaagcttctgccctgctgcccaccacagaacacgatgaccttctggtggagatgagaaacttcatcgctttccaggcccacactgatggccaggccagcaccagggagatactgcaggagtttgaatccaagttatctgcatcacagtcttgtgtcttccgagaactattgagaaatctgtgcactttccatagaacttctggtggtgaaggaatttggaaactcaagccagaatactgctaaacaacattgcttcctaaactttcaagtccctttttctaacgggcatttctgattattaatttattattaataatcatgtttgtcaatggaagttggctgcacttgatgtttgtttgcatgatgtctacctcagaattaaaactttaaggaagaagaaactcttctctgaaagttaaaagttttaataatgctagctaaaggagaaaatacttggattgatttttttttttttggcaatctaattatattgtaaatcaggtacctaacagttactccttggagcacatttgttcctttacccaaaagatgctgtcagggagcacagttagaagtttgcagaacagaaatctcaatatttttttttattggtgctaaaaacaggtcttacattcagtcagacctgttcaataagttcatcaatatctgataacagcattattttgatgcttaaactttaaacatttatatttaccatttgccacccacaaaggtcaggtttgttatttgttgtttgataattatattaattttcttggaaagatcctcttttcaaggtactggtaaattggtgagtatttttattagtaaagcatgaaatagtatggtaataaatgataagacatgtatttgtggaaagctgtagggtattcagtttaccctggctttcctttaagcagagggcatctttttctctcctacagtcacaaaatgtgttatcattaaaaaaaatcaaattaaagccaaaagtaggtacataaaaaccacacacatgcatgcacacaaacatcactgcagcccacagcagacccagccgttgttaccatgaagtgacaccactccaggcctctcttgtctgcaggctggcaggctgtcttctctccagttgccttcgtcttgcgcctgcctttgcattccttgcgacgggctttcttgtttctgcggtttggattccagccaaggctgtttgtatctcactactgtttatgtgtttgtggttctgtgatggtgttgctttgatcctcagtttattttcttacccatgtttttcttgtttccttctcaggatgattttatcatctcatctttgaagtgttgttttccgaaattcatcgtattcctgaaatttcttcttagctgtcttagtgcagtttgtttcttggatttgtattctctggcatgctcttttcctctctctcatttttctgtagtatgcctgccctcctaccctgctatttctttacatctctctcatgcttaacatggatagctgtgtccagatcttctgtctgctcatccatgtgactcagagaggagggttctgggcaggggggccttgccggactgcatgagaggacatgagttttgctttctctgctctaatattttgcttaagccaagaatccttttcttagagatgttctatatgattcctgtcaggattttctagttttttttggattatagcttgttcatttcttttgtttttagtttggtttatatataatgagggaagaagatgattacattatttttgtcactttgccatcattgtttagaagtcatagaaagaatttttaaataggccaataagtcttaaacttgagtacttggcttagaagaaagtcaaaactccttcctttttgactaagtggtttgtttctggggagctcttaatttctatttttataatcattagcctataaggaaattgtgtcttccttgttctcagggtgatctgctgaccttgttcactcatgaagcatttgggtatcatacttatagtgtctgaaacataaactgtattgagctagacaaggtatagcctcctcttcaagtagcaaatactatcaaaagctataatgcagtaggagcaaggtggtccttgttccagtttttgtctcagttctgctgctgatgtaccatgatcttgggaaggtggtgtctcagtgtggagatctgacacattgttaccgtgcctcctggctggagggacttggagaacaatgcagttaagtagaatggttttaacaatacagagaaatttattcatttagataaaaatctgatttttagaactttaaaagctttgtacagtgtaaatagatttaatgtatttaacatgctttatcagcacaaataaaggattttaaaattttgtca

SEQ ID NO: 131478 - DNA, 4243 bp, Homo sapiens
  Payload ID: 5657
  Gene Symbol: ERCC6L
  Gene Name: excision repair cross-complementation group 6-like
  Uniprot ID: Q2NKX8
  ENST ID: ENST00000334463
  CDS Start-End: 137-3889
ctctccacggcgcacagagcatgcgcggggcgggagtgagcgaaattcaagctccaaactctaagctccaagctccaagctccaagctccaagctccaaactcccgccggggtaactggaacccaatccgagggtcatggaggcatcccgaaggtttccggaagccgaggccttgagcccagagcaggctgctcattacctaagatatgtgaaagaggccaaagaagcaactaagaatggagacctggaagaagcatttaaacttttcaatttggcaaaggacatttttcccaatgaaaaagtgctgagcagaatccaaaaaatacaggaagccttggaggagttggcagaacagggagatgatgaatttacagatgtgtgcaactctggcttgctactttatcgagaactgcacaaccaactctttgagcaccagaaggaaggcatagctttcctctatagcctgtatagggatggaagaaaaggtggtatattggctgatgatatgggattagggaagactgttcaaatcattgctttcctttccggtatgtttgatgcatcacttgtgaatcatgtgctgctgatcatgccaaccaatcttattaacacatgggtaaaagaattcatcaagtggactccaggaatgagagtcaaaacctttcatggtcctagcaaggatgaacggaccagaaacctcaatcggattcagcaaaggaatggtgttattatcactacataccaaatgttaatcaataactggcagcaactttcaagctttaggggccaagagtttgtgtgggactatgtcatcctcgatgaagcacataaaataaaaacctcatctactaagtcagcaatatgtgctcgtgctattcctgcaagtaatcgcctcctcctcacaggaaccccaatccagaataatttacaagaactatggtccctatttgattttgcttgtcaagggtccctgctgggaacattaaaaacttttaagatggagtatgaaaatcctattactagagcaagagagaaggatgctaccccaggagaaaaagccttgggatttaaaatatctgaaaacttaatggcaatcataaaaccctattttctcaggaggactaaagaagacgtacagaagaaaaagtcaagcaacccagaggccagacttaatgaaaagaatccagatgttgatgccatttgtgaaatgccttccctttccaggaaaaatgatttaattatttggatacgacttgtgcctttacaagaagaaatatacaggaaatttgtgtctttagatcatatcaaggagttgctaatggagacgcgctcacctttggctgagctaggtgtcttaaagaagctgtgtgatcatcctaggctgctgtctgcacgggcttgttgtttgctaaatcttgggacattctctgctcaagatggaaatgagggggaagattccccagatgtggaccatattgatcaagtaactgatgacacattgatggaagaatctggaaaaatgatattcctaatggacctacttaagaggctgcgagatgagggacatcaaactctggtgttttctcaatcgaggcaaattctaaacatcattgaacgcctcttaaagaataggcactttaagacattgcgaatcgatgggacagttactcatcttttggaacgagaaaaaagaattaacttattccagcaaaataaagattactctgtttttctgcttaccactcaagtaggtggtgtcggtttaacattaactgcagcaactagagtggtcatttttgaccctagctggaatcctgcaactgatgctcaagctgtggatagagtttaccgaattggacaaaaagagaatgttgtggtttataggctaatcacttgtgggactgtagaggaaaaaatatacagaagacaggttttcaaggactcattaataagacaaactactggtgaaaaaaagaaccctttccgatattttagtaaacaagaattaagagagctctttacaatcgaggatcttcagaactctgtaacccagctgcagcttcagtctttgcatgctgctcagaggaaatctgatataaaactagatgaacatattgcctacctgcagtctttggggatagctggaatctcagaccatgatttgatgtacacatgtgatctgtctgttaaagaagagcttgatgtggtagaagaatctcactatattcaacaaagggttcagaaagctcaattcctcgttgaattcgagtctcaaaataaagagttcctgatggaacaacaaagaactagaaatgagggggcctggctaagagaacctgtatttccttcttcaacaaagaagaaatgccctaaattgaataaaccacagcctcagccttcacctcttctaagtactcatcatactcaggaagaagatatcagttccaaaatggcaagtgtagtcattgatgatctgcccaaagagggtgagaaacaagatctctccagtataaaggtgaatgttaccaccttgcaagatggtaaaggtacaggtagtgctgactctatagctactttaccaaaggggtttggaagtgtagaagaactttgtactaactcttcattgggaatggaaaaaagctttgcaactaaaaatgaagctgtacaaaaagagacattacaagaggggcctaagcaagaggcactgcaagaggatcctctggaaagttttaattatgtacttagcaaatcaaccaaagctgatattgggccaaatttagatcaactaaaggatgatgagattttacgtcattgcaatccttggcccattatttccataacaaatgaaagtcaaaatgcagaatcaaatgtatccattattgaaatagctgatgacctttcagcatcccatagtgcactgcaggatgctcaagcaagtgaggccaagttggaagaggaaccttcagcatcttcaccacagtatgcatgtgatttcaatcttttcttggaagactcagcagacaacagacaaaatttttccagtcagtctttagagcatgttgagaaagaaaatagcttgtgtggctctgcacctaattccagagcagggtttgtgcatagcaaaacatgtctcagttgggagttttctgagaaagacgatgaaccagaagaagtagtagttaaagcaaaaatcagaagtaaagctagaaggattgtttcagatggcgaagatgaagatgattcttttaaagatacctcaagcataaatccattcaacacatctctctttcaattctcatctgtgaaacaatttgatgcttcaactcccaaaaatgacatcagtccaccaggaaggttcttttcatctcaaatacccagtagtgtaaataagtctatgaactctagaagatctctggcttctaggaggtctcttattaatatggttttagaccacgtggaggacatggaggaaagacttgacgacagcagtgaagcaaagggtcctgaagattatccagaagaaggggtggaggaaagcagtggcgaagcctccaagtatacagaagaggatccttccggagaaacactgtcttcagaaaacaagtccagctggttaatgacgtctaagcctagtgctctagctcaagagacctctcttggtgcccctgagcctttgtctggtgaacagttggttggttctccccaggataaggcggcagaggctacaaatgactatgagactcttgtaaagcgtggaaaagaactaaaagagtgtggaaaaatccaggaggccctaaactgcttagttaaagcgcttgacataaaaagtgcagatcctgaagttatgctcttgactttaagtttgtataagcaacttaataacaattgagaatgtaacctgtttattgtattttaaagtgaaactgaatatgagggaatttttgttcccataattggattctttgggaacatgaagcattcaggcttaaggcaagaaagatctcaaaaagcaacttctgccctgcaacgccccccactccatagtctggtattctgagcactagcttaatatttcttcacttgaatattcttatattttaggcatattctataaatttaactgtgttgtttcttggaaagttttgtaaaattattctggtcattcttaattttactctgaaagtgatcatctttgtatataacagttcagataagaaaattaaagttacttttctcaagtgtt

SEQ ID NO: 131479 - DNA, 4344 bp, Homo sapiens
  Payload ID: 5657
  Gene Symbol: ERCC6L
  Gene Name: excision repair cross-complementation group 6-like
  ENST ID: ENST00000373657
  CDS Start-End: 604-3987
atgcgcggggcgggagtgagcgaaattcaagctccaaactctaagctccaagctccaagctccaagctccaagctccaaactcccgccggggtaactggaacccaatccgagggtcatggaggcatcccgaaggtttccggaagccgaggccttgagcccagagcaggctgctcattacctaagggtcttgctgtgtcgcccagactggaattcagtggcctgatcatagttcactgcagcctcgaactcctgggctcaagcagtcctcctgccccagcctccctagtagctgggacttaagatatgtgaaagaggccaaagaagcaactaagaatggagacctggaagaagcatttaaacttttcaatttggcaaaggacatttttcccaatgaaaaagtgctgagcagaatccaaaaaatacaggaagccttggaggagttggcagaacagggagatgatgaatttacagatgtgtgcaactctggcttgctactttatcgagaactgcacaaccaactctttgagcaccagaaggaaggcatagctttcctctatagcctgtatagggatggaagaaaaggtggtatattggctgatgatatgggattagggaagactgttcaaatcattgctttcctttccggtatgtttgatgcatcacttgtgaatcatgtgctgctgatcatgccaaccaatcttattaacacatgggtaaaagaattcatcaagtggactccaggaatgagagtcaaaacctttcatggtcctagcaaggatgaacggaccagaaacctcaatcggattcagcaaaggaatggtgttattatcactacataccaaatgttaatcaataactggcagcaactttcaagctttaggggccaagagtttgtgtgggactatgtcatcctcgatgaagcacataaaataaaaacctcatctactaagtcagcaatatgtgctcgtgctattcctgcaagtaatcgcctcctcctcacaggaaccccaatccagaataatttacaagaactatggtccctatttgattttgcttgtcaagggtccctgctgggaacattaaaaacttttaagatggagtatgaaaatcctattactagagcaagagagaaggatgctaccccaggagaaaaagccttgggatttaaaatatctgaaaacttaatggcaatcataaaaccctattttctcaggaggactaaagaagacgtacagaagaaaaagtcaagcaacccagaggccagacttaatgaaaagaatccagatgttgatgccatttgtgaaatgccttccctttccaggaaaaatgatttaattatttggatacgacttgtgcctttacaagaagaaatatacaggaaatttgtgtctttagatcatatcaaggagttgctaatggagacgcgctcacctttggctgagctaggtgtcttaaagaagctgtgtgatcatcctaggctgctgtctgcacgggcttgttgtttgctaaatcttgggacattctctgctcaagatggaaatgagggggaagattccccagatgtggaccatattgatcaagtaactgatgacacattgatggaagaatctggaaaaatgatattcctaatggacctacttaagaggctgcgagatgagggacatcaaactctggtgttttctcaatcgaggcaaattctaaacatcattgaacgcctcttaaagaataggcactttaagacattgcgaatcgatgggacagttactcatcttttggaacgagaaaaaagaattaacttattccagcaaaataaagattactctgtttttctgcttaccactcaagtaggtggtgtcggtttaacattaactgcagcaactagagtggtcatttttgaccctagctggaatcctgcaactgatgctcaagctgtggatagagtttaccgaattggacaaaaagagaatgttgtggtttataggctaatcacttgtgggactgtagaggaaaaaatatacagaagacaggttttcaaggactcattaataagacaaactactggtgaaaaaaagaaccctttccgatattttagtaaacaagaattaagagagctctttacaatcgaggatcttcagaactctgtaacccagctgcagcttcagtctttgcatgctgctcagaggaaatctgatataaaactagatgaacatattgcctacctgcagtctttggggatagctggaatctcagaccatgatttgatgtacacatgtgatctgtctgttaaagaagagcttgatgtggtagaagaatctcactatattcaacaaagggttcagaaagctcaattcctcgttgaattcgagtctcaaaataaagagttcctgatggaacaacaaagaactagaaatgagggggcctggctaagagaacctgtatttccttcttcaacaaagaagaaatgccctaaattgaataaaccacagcctcagccttcacctcttctaagtactcatcatactcaggaagaagatatcagttccaaaatggcaagtgtagtcattgatgatctgcccaaagagggtgagaaacaagatctctccagtataaaggtgaatgttaccaccttgcaagatggtaaaggtacaggtagtgctgactctatagctactttaccaaaggggtttggaagtgtagaagaactttgtactaactcttcattgggaatggaaaaaagctttgcaactaaaaatgaagctgtacaaaaagagacattacaagaggggcctaagcaagaggcactgcaagaggatcctctggaaagttttaattatgtacttagcaaatcaaccaaagctgatattgggccaaatttagatcaactaaaggatgatgagattttacgtcattgcaatccttggcccattatttccataacaaatgaaagtcaaaatgcagaatcaaatgtatccattattgaaatagctgatgacctttcagcatcccatagtgcactgcaggatgctcaagcaagtgaggccaagttggaagaggaaccttcagcatcttcaccacagtatgcatgtgatttcaatcttttcttggaagactcagcagacaacagacaaaatttttccagtcagtctttagagcatgttgagaaagaaaatagcttgtgtggctctgcacctaattccagagcagggtttgtgcatagcaaaacatgtctcagttgggagttttctgagaaagacgatgaaccagaagaagtagtagttaaagcaaaaatcagaagtaaagctagaaggattgtttcagatggcgaagatgaagatgattcttttaaagatacctcaagcataaatccattcaacacatctctctttcaattctcatctgtgaaacaatttgatgcttcaactcccaaaaatgacatcagtccaccaggaaggttcttttcatctcaaatacccagtagtgtaaataagtctatgaactctagaagatctctggcttctaggaggtctcttattaatatggttttagaccacgtggaggacatggaggaaagacttgacgacagcagtgaagcaaagggtcctgaagattatccagaagaaggggtggaggaaagcagtggcgaagcctccaagtatacagaagaggatccttccggagaaacactgtcttcagaaaacaagtccagctggttaatgacgtctaagcctagtgctctagctcaagagacctctcttggtgcccctgagcctttgtctggtgaacagttggttggttctccccaggataaggcggcagaggctacaaatgactatgagactcttgtaaagcgtggaaaagaactaaaagagtgtggaaaaatccaggaggccctaaactgcttagttaaagcgcttgacataaaaagtgcagatcctgaagttatgctcttgactttaagtttgtataagcaacttaataacaattgagaatgtaacctgtttattgtattttaaagtgaaactgaatatgagggaatttttgttcccataattggattctttgggaacatgaagcattcaggcttaaggcaagaaagatctcaaaaagcaacttctgccctgcaacgccccccactccatagtctggtattctgagcactagcttaatatttcttcacttgaatattcttatattttaggcatattctataaatttaactgtgttgtttcttggaaagttttgtaaaattattctggtcattcttaattttactctgaaagtgatcatctttgtatataacagttcagataagaaaattaaagttacttttctcaagtgttttc

SEQ ID NO: 131480 - DNA, 4564 bp, Homo sapiens
  Payload ID: 5658
  Gene Symbol: ERCC6L2
  Gene Name: excision repair cross-complementation group 6-like 2
  Uniprot ID: Q5T890
  ENST ID: ENST00000288985
  CDS Start-End: 306-2444
aagatttgggggtcgccttgccggcctcctgtcctcctccggcggcggcggagcccgagagaactaggtgaacaccgctttgccagcctcacacagcgtcccctggctctgccgccgctccggacgtcgccctcccgttctgcttgggtccccttagtcgctacctttgctgggatccccctcctccatcctgtggcttcgggttgccgaagagcgatgctcggagggcggccggaagtggcgttggccgccattggcctgccggccagccaccttgctgtcctccgccgccttccgggtgttacatgcagccgggctcggcccctccccctggccggatggatccgtcggcgccacagccccgcgcggaaacctcaggcaaagacatatggcatccaggagaaagatgtcttgccccttctccagataatggaaaactttgtgaagcaagcataaaatctatcacagtggatgaaaatggcaagtcatttgcagtcgtcttatatgcagattttcaagaaaggaaaatacctcttaaacagcttcaagaagtgaaatttgttaaagattgccctaggaatcttatatttgatgatgaagatttagaaaaaccttatttcccaaaccgaaaatttccatcatcttctgttgcttttaaattatctgacaatggagactctattccttataccatcaataggtatttgagagactaccaaagagaaggaacccggtttctttatggacactacatccatggaggagggtgcattctgggtgatgacatgggacttggaaaaacagtacaggttatttcatttctggctgcagttttgcataaaaagggaactcgtgaggatattgaaaataacatgccagagtttttactaagaagtatgaaaaaggaacccctttcttctacagcaaaaaagatgttcttaatagttgctcctctttctgtcctctacaactggaaggatgaattggacacctggggatatttcagagtcactgttttacatggaaacagaaaagataatgaattaattcgtgtaaagcagaggaaatgtgaaattgctctaacaacttatgaaacactacgcttatgcctggatgaacttaacagtttggaatggtcagctgtcattgtggatgaagctcatagaatcaagaatccaaaagctagagtaacagaagttatgaaagctttgaaatgtaatgtccgcattggcctcactggaaccatccttcagaacaacatgaaggaactgtggtgtgttatggactgggctgtgccaggccttttagggagtgggacctacttcaagaagcagttttctgacccagtagaacatggtcagagacacacggcaacaaagagagaactagccactggccgaaaggccatgcaaagacttgccaaaaagatgtctggctggtttctcaggcgcaccaagactcttatcaaggatcagttgcctaagaaggaagaccggatggtgtattgttctttgacagatttccagaaagctgtctatcaaacagtgttagaaacagaggacgtgactttgatacttcaatcttctgagccttgtacctgtaggagtggccaaaaaaggagaaattgttgttataagaccaattctcatggtgaaacagtgaaaaccttgtatctcagttaccttacagtccttcagaaggtagctaaccatgtcgcgctactgcaagctgctagtacttccaaacaacaggaaacacttatcaaaaggatatgtgatcaggtattttccagattcccagattttgtgcagaaaagcaaagatgcagcctttgaaacactttctgaccctaaatacagtggaaaaatgaaggtccttcagcagcttttaaatcattgcaggaaaaacagagataaagttcttctcttttctttttccaccaagttgcttgacgtgctacagcagtactgtatggcgtctgggcttgattaccgacgacttgatggaagtacaaaatcagaggaaagactcaagattgtaaaagagttcaacagtacacaagatgttaacatttgccttgtctctacaatggctggtggactaggcctcaattttgtcggtgccaatgttgttgtattatttgatcctacttggaatccagccaatgatcttcaagccattgacagagcatataggattggacaatgtagagatgtcaaagtgcttaggctgatatccttgggaactgtggaggaaatcatgtatttacgacagatatacaagcagcaacttcactgtgtggtggttggaagtgaaaatgccaaacgatattttgaagcagttcaaggatctaaagagcatcaaggagagctttttgggatccataacctcttcaaatttaggtcccaagggtcttgtcttacgaaggacatcctggaggtgtgaacttcttctctgaccttttcaataatattttaaatacagtttttcttcctcaggaaatctgaaatacaattgctgttgccttttcagagaaacttttggttttctttatcaaaaatgccttggaatttttacttttagagaataagaaatgaattattgtacctctaaactaagattttcccatgcataattacaaataatgcacacacacaaatgtatatgctgggtagtatgaactccaaggcaattttaaataggcagagagaagtttatagttttgaaaacagctgctgaagtcaggaactaaaaaaagaggttttcctaaataaacaaaaatataaaatgtgttttaattaaaagttaccaaatactccctgagatgtactctcatgtctcatggagatttttgttttctgttcccaataaaaattccacaccagtattttaaactctccctgttgtgttcatcctcagcatacagatgtttcttattcctcaaacaaaatattttatatccttttttaaaaaaatctttaagttcttttatataccggaatactaaggatattaacctattttctaattgatattcatataggtatcataaaatcctggagtatcatctttttcaacctcctcatggtatagatgaggaaactgagtcttagagaacttcaggatatttctcttgacttccaggactttgtagtaaaatcttaatgtacttcatttattcagtaagtaccataaaggcagttcaaggagcaattggttcctgtccttgaggaacttaaaccatcttgaccggaggtggaagagaacgtttacataataaccatgcaatgtcaggaatcgtatgctgaacaagttaaacagtagaccatggatggctgggggagaggaaggtatatattatttgaatcctataaatgttgttactattatacagtttctgatatatactgctgagtttctattttatagtaactatatttgattctgaattcagtggcccatttggagtcctactttttggggttttttccccttgctttttaaatacgctgtttctttcatgaatttgttctttccagtttcccttttcatatcaataactttgtttgccctccagctcccaaacccagctgctacctccatctcagagtactacttgacatgcctatattgatgttaaagtcaattgtctataaaaatattagcattttattatttatcctgttttctgtcatatatgacatagttacctgtttttatcagaataaccacctatttctttgttaaacaagtgttatataagacatatcaggatgacaggttattaagtagaaaaagttcccttgtttatcgtgccactgcactccagcctggggaacaaagcaagagacttgtctcaaaaacaaaaaacaaaaacaaaaaaaagttctcttgttcactggttattctaagaatatcttgtttcaccttcagaagtgtttattaatgacaggaccatccatgtcttacattttcttttttaaaaatatcttttaagttctttaatataccagaacactaagaatattaacctattttctaattgatattaataaggggtgacaaggccatccatgccctacatttgtcttgctaggcatatcattggcacttgattattaagttaaattttgaattaaaattactcatttgtcatcaatcagaatgtaaatttattcaggattggttagattcatgctgctttgggccaaaaggtgcttctaaatattattattagccccatataatgggagtacctatcataaagtaaaaggagtatttcacttcatgtgagacatttttaatttttaaaggttgtataaaatctcttttaaaatgttttaagatgtaaaaatttgaatatttacacttataatcttatgatttctgggcaatttcattctgttttgcattgactttccattatctatattatggtttctcttcaaagatagatattgagagttcattttacaagtatttgttgagcatctgctaaatgtcaggtactgttcatagagctttgcatacataaaagaacaaaataaacaaaacgatcctgtcta

SEQ ID NO: 131481 - DNA, 2936 bp, Homo sapiens
  Payload ID: 5658
  Gene Symbol: ERCC6L2
  Gene Name: excision repair cross-complementation group 6-like 2
  ENST ID: ENST00000320486
  CDS Start-End: 1-1568
caaatgaggatcataactctcagtttattgatgattattcatcctcagatgagagtttatccgtcagccacttcagtttctctaaacagagccacagaccaagaactataagagacagaactagtttttcttcaaaattgcctagccataataagaaaaatagcacttttattccaagaaaaccaatgaaatgttcaaatgagaaagttgttaatcaagagcagtcgtatgaatcaatggataaatttttagatggcgttcaggaagtggcttatattcactcaaaccagaatgtaattggatcgagcaaagctgaaaatcacatgagccgatgggcagcacatgacgtatttgagttgaagcagttttctcagctgcctgctaacatagctgtttgcagttctaagacatataaagaaaaagtggatgcagatacattgccacacacaaagaaaggccagcaaccgagtgaaggcagcatttcacttcctctttacatttcaaatcctgtaaaccagaagaagaaaaaagtctaccatacaaaccagaccaccttcataattggagaaacaccaaaaggaatccgcagaaaacaatttgaagaaatggcctcttattttaactcgtcttctgtaaacgaatttgctaaacatataaccaatgccacatcagaagaacgacagaaaatgctaagagacttttatgcttctcaatatccagaggtaaaagaattttttgtggattctgtgtcacaattcaacaattcttcctttgagaaaggagagcagcgcacccggaagaaatctgataaaagagaatctcttataaaaccaaggctgtcagattctgaaaccttgtcatttaaagattctaccaacaaaatttctcaagtttgcagcctaaaaacatataaaagaaaatcagttaagtttcagaatcatatttcctatagagaagaggtgttttttaatgatgcagaaactaagaaatcacctgttagttctactcaagagattgacagtgggaaaaacagccaggcatccgaagatactgtgacatcccgttctctgaacagtgagtctgaaacacgtgagagaaggttagaaaataccatgaaagaccaacaggacctcacaagaacgggcatttcaagaaaagaaccccttctcaaattggaaaacaaaaagatagaaaatccagtgctggaaaatacttctgtgataagcttacttggtgatacctctattcttgatgacctttttaaaagtcatgggaacagtcccacacaactgccaaagaaagttctttcagggcccatggaaaaagcaaaacagagaccaaaagatttctgggacatcttgaatgagcagaatgatgagagtcttagtaaactcacagacttggcagtaatagagactctgtgtgaaaaagcacctctagcagcaccctttaaaaggagagaagagccagcaacttctctttggaaatcaaatgagaaatttttatggaagaaatttagcccaagtgatacagatgaaaacgcaaccaatacacagagtaccacataagcatataaatgaattactgcaccagtaaactgctgccatcactgtttacggcactggattccacactgattctattatcttgaacacagttgttgacatatatttttattaaattattgctttaggattttttgaagtctaaagtattgtcatggatctgtttttcttgatatttgatttgatctttcaagaatatgattgtatttatagtataaacctctgttatgaattagaaaagattctaggtttgttaataggagacctgggacatctttcttactatattacataatgatgtgacacttgccccggtgagcattgtttcccagtatgaaagatgaagagtctgtaccgaatcagcatgagtgtccttccagtttaaaaaagctttgcttcgctctcctaatggctcataggctgaatcatgtctgcccctcaaatcaggtgtataccaatgtgttttttactagcacttgggaaagttattaagtattttctttttccctgggcatcatgttctattattattttagaaaaaagtcataattggtactgaatatatggtatatataatattaaaatggtaattttgcaacagctcaaaattaaaaggttaatgttatacactttactatatgagctgtgattactaccattagccacagataccagtgcctcaactttttatgtacctattgtgatttaatgtaaataaaggtttgtatagtacttttgtagttcttaagtatgaagaaatgggtaaactttttattttgttagaaactgttatattttgagtgtaatatttatggtttatagcaaaatgaatgtgcttattgttgaatgcatgtatttagaagcctttactcagcccctgtgttctgtgctaggagcttgagctctacaggtaaggcagagctaccggtgaatgaaaggaaatcatgtcagtgaaaaatcatggtggaaagcccctggcatcacatgtgcatgctgtaggcaggacctgagctgcctccgctgcaggttcagatgcaccgctgcagctgtccttcagttagttcacagggctgcaagaggaggacacatccctccagaaaacagcctgagccgggaactggctgtgctaaagagcactgctatcaagttgaggagagagggcttccgtgtactcaggatgtagagtcattgctcagaagtgaacaaaaaatcaaaaacaaaagtcttctcaagggactgatcggccaagtatgcttttctttagagcaatgttttgccctagagaattgtaaaatttatgtcatgactcagtacatatgtgttcgtacatatatgattggaataaaatgtttatgaaatatttactcataa

SEQ ID NO: 131482 - DNA, 546 bp, Homo sapiens
  Payload ID: 5658
  Gene Symbol: ERCC6L2
  Gene Name: excision repair cross-complementation group 6-like 2
  ENST ID: ENST00000402838
  CDS Start-End: 1-546
ttgggatccataacctcttcaaatttaggtcccaagggtcttgtcttacgaaggacatcctggagagagaaggccaagtagaagcagggatcatgacagccacaacatggttgaaagagggacctccagcacacaaactggaaatgcctagacagcctgactgtcaggaatgcagaggtacagaacaagctgcagagccactggcaaaggaagcatgtgatctctgcagtgacttcagtgatgaagagccagtgggagccacaggaataaagactgccaaaaacaaagcacccgattcaagtaaagcttccagctctccaggacagcttaccttactccagtgtggtttctcgaaattgcttgaaacaaaatgtaaagcagttgaggatagtgatggaaatactgcctctgatgatgaaagttctgatgagcagcccacatgcctttcaacagaagccaaagatgctggttgtgagaaaaatcaggactctcttggtacttcaaaacatcagaaattagataacatcctaaatccaaaagaaaagc

SEQ ID NO: 131483 - DNA, 498 bp, Homo sapiens
  Payload ID: 5658
  Gene Symbol: ERCC6L2
  Gene Name: excision repair cross-complementation group 6-like 2
  ENST ID: ENST00000426805
  CDS Start-End: 1-249
gaccctaaatacagtggaaaaatgaaggtccttcagcagcttttaaatcattgcaggaaaaacagagataaagttcttctcttttctttttccaccaagttgcttgacgtgctacagcagtactgtatggcgtctgggcttgattaccgacgacttgatggaagtacaaaatcagaggaaagactcaagattgtaaaagagttcaacagtacacaagatgttaacatttgccttgtctctacaatgtaagaaaattaaatttaataactagatttttatccaattgtttttgagatttagcataatttttaaaactattactggattaatttttaatggctatgcttatttagaagcagcaaaaatactattatgaccgaaatttcaatgtcttaagttttagctaagcttttctctcatttcctttatcaacattgaattcctcttagaagtctgggtttataaaggtaacaataaaaaaattgatacttcctccta

SEQ ID NO: 131484 - DNA, 1822 bp, Homo sapiens
  Payload ID: 5658
  Gene Symbol: ERCC6L2
  Gene Name: excision repair cross-complementation group 6-like 2
  ENST ID: ENST00000456993
  CDS Start-End: 1-1098
atgaaggaactgtggtgtgttatggactgggctgtgccaggccttttagggagtgggacctacttcaagaagcagttttctgacccagtagaacatggtcagagacacacggcaacaaagagagaactagccactggccgaaaggccatgcaaagacttgccaaaaagatgtctggctggtttctcaggcgcaccaagactcttatcaaggatcagttgcctaagaaggaagaccggatggtgtattgttctttgacagatttccagaaagctgtctatcaaacagtgttagaaacagaggacgtgactttgatacttcaatcttctgagccttgtacctgtaggagtggccaaaaaaggagaaattgttgttataagaccaattctcatggtgaaacagtgaaaaccttgtatctcagttaccttacagtccttcagaaggtagctaaccatgtcgcgctactgcaagctgctagtacttccaaacaacaggaaacacttatcaaaaggatatgtgatcaggtattttccagattcccagattttgtgcagaaaagcaaagatgcagcctttgaaacactttctgaccctaaatacagtggaaaaatgaaggtccttcagcagcttttaaatcattgcaggaaaaacagagataaagttcttctcttttctttttccaccaagttgcttgacgtgctacagcagtactgtatggcgtctgggcttgattaccgacgacttgatggaagtacaaaatcagaggaaagactcaagattgtaaaagagttcaacagtacacaagatgttaacatttgccttgtctctacaatggctggtggactaggcctcaattttgtcggtgccaatgttgttgtattatttgatcctacttggaatccagccaatgatcttcaagccattgacagaacccaaacacattgtaggagagaaagggatgctgagcccctctcctctgctcctgggttgcagaatggaagtgagaatgcagtaccttacccctggtggtgctgtgtcacaggagcctccatttcctgctggagatgtgagatttgcaggatccaagatgtcctcgagtaaaagtccattgtgaggagggacagagcatataggattggacaatgtagagatgtcaaagtgcttaggctgatatccttgggaactgtggaggaaatcatgtatttacgacagatatacaagcagcaacttcactgtgtggtggttggaagtgaaaatgccaaacgatattttgaagcagttcaaggatctaaagagcatcaaggagagctttttgggatccataacctcttcaaatttaggtcccaagggtcttgtcttacgaaggacatcctggaggtgtgaacttcttctctgaccttttcaataatattttaaatacagtttttcttcctcaggaaatctgaaatacaattgctgttgccttttcagagaaacttttggttttctttatcaaaaatgccttggaatttttacttttagagaataagaaatgaattattgtacctctaaactaagattttcccatgcataattacaaataatgcacacacacaaatgtatatgctgggtagtatgaactccaaggcaattttaaataggcagagagaagtttatagttttgaaaacagctgctgaagtcaggaactaaaaaaagaggttttcctaaataaacaaaaatataaaatgtgttttaattaaaagttaccaaatactccctgagatgtactctcatgtctcatggagatttttgttttctgttcccaataaaaattccacaccagta

SEQ ID NO: 131485 - DNA, 2849 bp, Homo sapiens
  Payload ID: 5658
  Gene Symbol: ERCC6L2
  Gene Name: excision repair cross-complementation group 6-like 2
  ENST ID: ENST00000479391
  CDS Start-End: 1-164
gtacttccaaacaacaggaaacacttatcaaaaggatatgtgatcaggtattttccagattcccagattttgtgcagaaaagcaaagatgcagcctttgaaacactttctgaccctaaatacagtggaaaaatgaaggtgagttcatctaaagtatatccttgattggccagcctcaacttttgaggcataaagaataaagcatatgcctacatgacaccttacagccacattttctcttatctacacagtaggaaatagtgagttgcttgacgtgctacagcagtactgtatggcgtctgggcttgattaccgacgacttgatggaagtacaaaatcagaggaaagactcaagattgtaaaagagttcaacagtacacaagatgttaacatttgccttgtctctacaatggctggtggactaggcctcaattttgtcggtgccaatgttgttgtattatttgatcctacttggaatccagccaatgatcttcaagccattgacagaacccaaacacattgtaggagagaaagggatgctgagcccctctcctctgctcctgggttgcagaatggaagtgagaatgcagtaccttacccctggtggtgctgtgtcacaggagcctccatttcctgctggagatgtgagatttgcaggatccaagatgtcctcgagtaaaagtccattgtgaggagggacagagcatataggattggacaatgtagagatgtcaaagtgcttaggctgatatccttgggaactgtggaggaaatcatgtatttacgacagatatacaagcagcaacttcactgtgtggtggttggaagtgaaaatgccaaacgatattttgaagcagttcaaggatctaaagagcatcaaggagagctttttgggatccataacctcttcaaatttaggtcccaagggtcttgtcttacgaaggacatcctggagtaagtaccataaaggcagttcaaggagcaattggttcctgtccttgaggaacttaaaccatcttgaccggaggtggaagagaacgtttacataataaccatgcaatgtcaggaatcgtatgctgaacaagttaaacagtagaccatggatggctgggggagaggaagagagaaggccaagtagaagcagggatcatgacagccacaacatggttgaaagagggacctccagcacacaaactggaaatgcctagacagcctgactgtcaggaatgcagaggtacagaacaagctgcagagccactggcaaaggaagcatgtgatctctgcagtgacttcagtgatgaagagccagtgggagccacaggaataaagactgccaaaaacaaagcacccgattcaagtaaagcttccagctctccaggacagcttaccttactccagtgtggtttctcgaaattgcttgaaacaaaatgtaaagcagttgaggatagtgatggaaatactgcctctgatgatgaaagttctgatgagcagcccacatgcctttcaacagaagccaaagatgctggttgtgagaaaaatcaggactctcttggtacttcaaaacatcagaaattagataacatcctaaatccaaaagaaaagcatattttttataaaagtgagaagattttagaacagaatatttcttccaagtctgacgagaaaaaaattaaaaatacagataaacattgcattttacagaatgtcacagaatcagaagatagtgatgtcatctgtcctacacaatacacaactgagagattccccgacaatagtataaggtttaagccacccttggaaggatctgaggattctgaaacagaacacactgtaaaaacaagaaataatgataatagtcgaaacactgatgacaaaagaaatggaataatttcaaaaaagttaagtcctgagaacacaaccctgaaatctattttgaaaagaaaaggcaccagtgatatcagtgatgaatctgatgacattgaaatttcttccaagtcaagagtaagaaagagagctagttcattgaggtttaagagaataaaagaaaccaaaaaagaacttcacaattctcccaaaacaatgaacaaaacaaaccaagtgtatgcagcaaatgaggatcataactctcagtttattgatgattattcatcctcagatgagagtttatccgtcagccacttcagtttctctaaacagagccacagaccaagaactataagagacagaactagtttttcttcaaaattgcctagccataataagaaaaatagcacttttattccaagaaaaccaatgaaatgttcaaatgagaaagttgttaatcaagagcagtcgtatgaatcaatggataaatttttagatggcgttcaggaagtggcttatattcactcaaaccagaatgtaattggatcgagcaaagctgaaaatcacatgagccgatgggcagcacatgacgtatttgagttgaagcagttttctcagctgcctgctaacatagctgtttgcagttctaagacatataaagaaaaagtggatgcagatacattgccacacacaaagaaaggccagcaaccgagtgaaggcagcatttcacttcctctttacatttcaaatcctgtaaaccagaagaagaaaaaagtctaccatacaaaccagaccaccttcataattggagaaacaccaaaaggaatccgcaggtatattgtctctgacaatactatacttgaagaataattctcaaaggaaatgtagctcattagtaaaatatgtaaatacttgaattataaccataactgacatctgaatatttcagaaaaatctgaatttcaaaaataaactgcaaatgtttta

SEQ ID NO: 131486 - DNA, 2017 bp, Homo sapiens
  Payload ID: 5659
  Gene Symbol: ERCC8
  Gene Name: excision repair cross-complementation group 8
  Uniprot ID: Q13216
  ENST ID: ENST00000265038
  CDS Start-End: 44-1234
gtcatggcgacgtccagtgctccagccggtgtgaggacacgatatgctggggtttttgtccgcacgccaaacgggtttggaggaccctcttcgccttcggagagcagagtcaacacggagagttttgggactggaattaaataaagacagagatgttgaaagaatccacggcggtggaattaacacccttgacattgaacctgttgaagggagatacatgttatcaggtggttcagatggtgtgattgtactttatgaccttgagaactccagcagacaatcttattacacatgtaaagcagtgtgttccattggcagagatcatcctgatgttcacagatacagtgtggagactgtacagtggtatcctcatgacactggcatgttcacatcaagctcatttgataaaactctgaaagtatgggatacaaatacattacaaactgcagatgtatttaattttgaggaaacagtttatagtcatcatatgtctccagtctccaccaagcactgtttggtagcagttggtactagaggacccaaagtacaactttgtgacttgaagtctggatcctgttctcacattctacagggtcacagacaagaaatattagcagtttcctggtctccacgttatgactatatcttggcaacagcaagtgctgacagtagagtaaaattatgggatgtgagaagagcatcaggatgtttgattactcttgatcaacataatgggaaaaagtcacaagctgttgaatcagcaaacactgctcataatgggaaagttaatggcttatgttttacaagtgatggacttcacctcctcactgttggtacagataatcgaatgaggctctggaatagttccaatggagaaaacacacttgtgaactatggaaaagtttgtaataacagtaaaaaaggattgaaattcactgtctcctgtggctgcagttcagaatttgtttttgtaccatatggtagcaccattgctgtttatacagtttactcaggagaacagataactatgcttaagggacattataaaactgttgactgctgtgtatttcagtcaaatttccaggaactttatagtggtagcagagactgcaacattctggcttgggttccatccttatatgaaccagttcctgatgatgatgagactacaacaaaatcacaattaaatccggcctttgaagatgcctggagcagcagtgatgaagaaggatgaatatcatctttagtacctttttgtctctgctgaaactttttaaatgagactgtgtttttttcaactgtatggtctattcctgacagctaaattagccctaaatgtgggtaatatttttcctcatgttttaaaatgaggttaatatttgcataaaatcctaaaacagacttctgtatagtttatttagtcaaaatgtgttccttgatcccagatgttgtggcctgggaaagccctcattgctacagtacaagtaacacaagtcgttgtacctcagttgtgaccttcagcagattttatgaactataagatgcagtctcagaggatcagcaagtggaggccatcagtattgactttctcttacttgctgtactatcagcctgctcgtttccacctttaagaatgattttgccaagaatgattatatcaaaaatagtagttgaaatggtaacatcaaaattattttattctttcttcttcatgtattcacatttttcagtggtttcatttaattaaccatgctttatgttaaacattttggggctcaatgtctcctactatccaaaatgtgcatcacaggaggcttttaactttgtgaaaatcccatgtttgctttattttattttaatgtcagaaggcagtttgcgctaatgcttgaactctttttctgtgaaactcattaaggtatgaccaaatcctgcctcattaattcaagcagaaaatatcctggcagggaatctggcttaaacatgaaatgctgtaataaaatttctatgttattgtctc

SEQ ID NO: 131487 - DNA, 2236 bp, Homo sapiens
  Payload ID: 5659
  Gene Symbol: ERCC8
  Gene Name: excision repair cross-complementation group 8
  ENST ID: ENST00000381118
  CDS Start-End: 44-217
gtcatggcgacgtccagtgctccagccggtgtgaggacacgatatgctggggtttttgtccgcacgccaaacgggtttggaggaccctcttcgccttcggagagcagagtcaacacggagagttttgggactggaattaaataaagacagagatgttgaaagaatccacggcggtggaattaacacccttgacattgaacctgttgaagggagataaaatgaagcttcttatccaagatgctcaaggaaataaaatgtgagtcaaggattttatatccagccaaactgatttcagatacaaaaaggacggataaattgtcaacaacacaagaattcagagactgttgttctcattagccattccttaggaatcaaccagagaatgaaatcattcaaccagaatgacaagagagacagcaacttaaggattgacgcatgttatcaggtggttcagatggtgtgattgtactttatgaccttgagaactccagcagacaatcttattacacatgtaaagcagtgtgttccattggcagagatcatcctgatgttcacagatacagtgtggagactgtacagtggtatcctcatgacactggcatgttcacatcaagctcatttgataaaactctgaaagtatgggatacaaatacattacaaactgcagatgtatttaattttgaggaaacagtttatagtcatcatatgtctccagtctccaccaagcactgtttggtagcagttggtactagaggacccaaagtacaactttgtgacttgaagtctggatcctgttctcacattctacagggtcacagacaagaaatattagcagtttcctggtctccacgttatgactatatcttggcaacagcaagtgctgacagtagagtaaaattatgggatgtgagaagagcatcaggatgtttgattactcttgatcaacataatgggaaaaagtcacaagctgttgaatcagcaaacactgctcataatgggaaagttaatggcttatgttttacaagtgatggacttcacctcctcactgttggtacagataatcgaatgaggctctggaatagttccaatggagaaaacacacttgtgaactatggaaaagtttgtaataacagtaaaaaaggattgaaattcactgtctcctgtggctgcagttcagaatttgtttttgtaccatatggtagcaccattgctgtttatacagtttactcaggagaacagataactatgcttaagggacattataaaactgttgactgctgtgtatttcagtcaaatttccaggaactttatagtggtagcagagactgcaacattctggcttgggttccatccttatatgaaccagttcctgatgatgatgagactacaacaaaatcacaattaaatccggcctttgaagatgcctggagcagcagtgatgaagaaggatgaatatcatctttagtacctttttgtctctgctgaaactttttaaatgagactgtgtttttttcaactgtatggtctattcctgacagctaaattagccctaaatgtgggtaatatttttcctcatgttttaaaatgaggttaatatttgcataaaatcctaaaacagacttctgtatagtttatttagtcaaaatgtgttccttgatcccagatgttgtggcctgggaaagccctcattgctacagtacaagtaacacaagtcgttgtacctcagttgtgaccttcagcagattttatgaactataagatgcagtctcagaggatcagcaagtggaggccatcagtattgactttctcttacttgctgtactatcagcctgctcgtttccacctttaagaatgattttgccaagaatgattatatcaaaaatagtagttgaaatggtaacatcaaaattattttattctttcttcttcatgtattcacatttttcagtggtttcatttaattaaccatgctttatgttaaacattttggggctcaatgtctcctactatccaaaatgtgcatcacaggaggcttttaactttgtgaaaatcccatgtttgctttattttattttaatgtcagaaggcagtttgcgctaatgcttgaactctttttctgtgaaactcattaaggtatgaccaaatcctgcctcattaattcaagcagaaaatatcctggcagggaatctggcttaaacatgaaatgctgtaataaaatttctatgttattgtctcc

SEQ ID NO: 131488 - DNA, 684 bp, Homo sapiens
  Payload ID: 5659
  Gene Symbol: ERCC8
  Gene Name: excision repair cross-complementation group 8
  ENST ID: ENST00000439176
  CDS Start-End: 282-684
tccagtcccgcccctgagctctgtcatggcgacgtccagtgctccagccggtgtgaggacacgatatgctggggtttttgtccgcacgccaaacgggtttggaggaccctcttcgccttcggagagcagagtcaacacggagttcacagacaattcagtcctgaagtcattatgttgggcagagagttttgggactggaattaaataaagacagagatgttgaaagaatccacggcggtggaattaacacccttgacattgaacctgttgaagggagatacatgttatcaggtggttcagatggtgtgattgtactttatgaccttgagaactccagcagacaatcttattacacatgtaaagcagtgtgttccattggcagagatcatcctgatgttcacagatacagtgtggagactgtacagtggtatcctcatgacactggcatgttcacatcaagctcatttgataaaactctgaaagtatgggatacaaatacattacaaactgcagatgtatttaattttgaggaaacagtttatagtcatcatatgtctccagtctccaccaagcactgtttggtagcagttggtactagaggacccaaagtacaactttgtgacttgaagtctggatcctgttctcacattctacagggtcacagacaagaaatattagcagttt

SEQ ID NO: 131489 - DNA, 3357 bp, Homo sapiens
  Payload ID: 5660
  Gene Symbol: EXOC1
  Gene Name: exocyst complex component 1
  Uniprot ID: Q9NV70
  ENST ID: ENST00000346134
  CDS Start-End: 134-2818
agtgttgggggaacggccgcttcccgttcaacgctttattgaggggcgtatcctagtggcccccatccggtctccgttttggaagacccgcctcggcacagccaggctcagtccggccttgcgctgagaaaagatgacagcaatcaagcatgcattacaaagagacatttttacaccaaatgatgaacgcctgctgagcattgtgaatgtctgcaaagcaggaaaaaagaaaaagaactgttttttatgtgccacagtgacaactgaacgccctgtgcaggttaaggtggtcaaagtcaagaaatccgataagggagatttctacaaaaggcagattgcatgggcccttcgagatcttgctgtggtagatgccaaagatgctatcaaagaaaatcctgaatttgatttacactttgaaaaaatatataaatgggttgccagcagcactgctgaaaagaatgcatttatttcatgcatttggaaattgaatcagcgatatctccggaagaaaattgattttgtcaatgttagctcacagcttttggaagaatctgttccaagtggagaaaatcagagtgtgacaggaggtgatgaagaagtagtagatgaataccaagagttaaatgcaagagaagaacaggatatcgaaataatgatggaaggctgtgaatatgcaatctcgaatgcggaagcctttgcagaaaaattgtccagagagctgcaggtgctagatggggctaacatccagtcaatcatggcatctgaaaaacaagtcaacatcctgatgaaattgctagatgaggctctaaaggaggtagatcagattgaattgaaactgagcagttatgaggaaatgctccaaagtgtaaaagaacaaatggatcagatctctgaaagcaaccacctaattcatcttagtaacactaataatgtaaaactcctatctgagatagagttccttgtgaaccacatggacttggccaaaggtcatataaaggcccttcaggaaggagatcttgcttcttccagaggcattgaggcctgcaccaatgctgctgatgcccttctgcagtgcatgaatgtagctcttcgaccaggccatgacttgcttctggcagtcaaacagcaacagcagcgattcagtgatttgcgagagctttttgcccggagactggccagtcacctcaacaatgtttttgttcaacagggtcatgatcagagttcgactcttgcccaacactctgttgaactgactttacccaatcatcatccatttcatagagatttgctccgatatgccaagctgatggagtggctaaagagtacagattatggaaaatatgaaggactaacaaagaattacatggattatttatcccgactatatgaaagagaaatcaaagatttctttgaagttgcaaagatcaagatgactggcacaactaaagaaagcaagaagtttgctacactgcctcgaaaagaaagtgctgtcaaacaggaaacagagagtcttcatggaagttcggggaaattaactggatctacttctagtctaaataagctcagtgttcagagttcagggaatcgcagatctcagtcatcttccctgttggatatgggaaacatgtctgcctctgatctcgatgttgctgacaggaccaaatttgataagatctttgaacaggtactaagtgaactggagcccctatgtctggcagaacaggacttcataagtaaatttttcaaactacagcaacatcaaagtatgcctggaactatggctgaagcagaggacctggatggaggaacattatcacggcaacataattgtggcacaccactgcctgtttcatctgagaaagatatgatccgccaaatgatgattaaaatatttcgctgcattgagccagagctgaacaacctaattgcattaggagacaaaattgatagctttaactctctttatatgttagtcaaaatgagtcatcatgtgtggactgcacaaaatgtggaccctgcttctttcctaagtactacattgggaaatgttttggtgactgtcaaaaggaactttgacaaatgcattagtaaccaaataaggcaaatggaagaagtaaagatctcaaaaaagagtaaagttggaattcttccatttgttgctgaatttgaagaatttgctggacttgcagaatcaatcttcaaaaatgctgagcgtcgtggagacctggataaagcatacaccaaacttatcagaggagtatttgttaatgtggagaaagtagcaaatgaaagccagaagacccccagggatgtggttatgatggaaaactttcaccatatttttgcaactctttctcgattgaaaatctcatgtctagaagcagaaaaaaaagaagccaaacaaaaatacacagatcaccttcagtcttatgtcatttactctttaggacaacctcttgaaaaactaaatcatttctttgaaggtgttgaagctcgcgtggcacagggcataagggaggaggaagtaagttaccaacttgcatttaacaaacaagaacttcgtaaagtcattaaggagtaccctggaaaggaagtaaaaaaaggtctagataacctctacaagaaagttgataaacatttatgtgaagaagagaacttacttcaggtggtgtggcactccatgcaagatgaatttatacgccagtataagcactttgaaggtttgatagctcgctgttatcctggatctggtgttacaatggaattcactattcaggacattctggattattgttccagcattgcacagtcccactaaaccttgtgaaagaagaaaagataactgaatgaagcatttgagtataacagacactataccaaaataccaagcaactgttttgagaacccagacttaaaattttatgtattattaaatgttagataaatgggtagtaccatactacaaatatttaaatgcaaaattaccaacctatatagcagttttatttgccctataggttgcatactaacttaagcattcatgtcaccataaaatgcctttagcatttctcaatgactggatgggaaattttcctttattgcctagctgcttgtgtttgagtggttgtcctatgagcaatgcatttggagttcttcagctttcactacttctctgttgcttgctaatcatgtaactactaaaatactgtacaaaattgttttttcacactaacaaatgtgtatatggagaagagggctcatgtgatgatcatttgtgaacttagatttttgaggattatgtgactagtaataaatgtgaaataaattttcaaaaaagttgacatttgataatatttt

SEQ ID NO: 131490 - DNA, 3248 bp, Homo sapiens
  Payload ID: 5660
  Gene Symbol: EXOC1
  Gene Name: exocyst complex component 1
  Uniprot ID: Q9NV70
  ENST ID: ENST00000349598
  CDS Start-End: 70-2709
atccggtctccgttttggaagacccgcctcggcacagccaggctcagtccggccttgcgctgagaaaagatgacagcaatcaagcatgcattacaaagagacatttttacaccaaatgatgaacgcctgctgagcattgtgaatgtctgcaaagcaggaaaaaagaaaaagaactgttttttatgtgccacagtgacaactgaacgccctgtgcaggttaaggtggtcaaagtcaagaaatccgataagggagatttctacaaaaggcagattgcatgggcccttcgagatcttgctgtggtagatgccaaagatgctatcaaagaaaatcctgaatttgatttacactttgaaaaaatatataaatgggttgccagcagcactgctgaaaagaatgcatttatttcatgcatttggaaattgaatcagcgatatctccggaagaaaattgattttgtcaatgttagctcacagcttttggaagaatctgttccaagtggagaaaatcagagtgtgacaggaggtgatgaagaagtagtagatgaataccaagagttaaatgcaagagaagaacaggatatcgaaataatgatggaaggctgtgaatatgcaatctcgaatgcggaagcctttgcagaaaaattgtccagagagctgcaggtgctagatggggctaacatccagtcaatcatggcatctgaaaaacaagtcaacatcctgatgaaattgctagatgaggctctaaaggaggtagatcagattgaattgaaactgagcagttatgaggaaatgctccaaagtgtaaaagaacaaatggatcagatctctgaaagcaaccacctaattcatcttagtaacactaataatgtaaaactcctatctgagatagagttccttgtgaaccacatggacttggccaaaggtcatataaaggcccttcaggaaggagatcttgcttcttccagaggcattgaggcctgcaccaatgctgctgatgcccttctgcagtgcatgaatgtagctcttcgaccaggccatgacttgcttctggcagtcaaacagcaacagcagcgattcagtgatttgcgagagctttttgcccggagactggccagtcacctcaacaatgtttttgttcaacagggtcatgatcagagttcgactcttgcccaacactctgttgaactgactttacccaatcatcatccatttcatagagatttgctccgatatgccaagctgatggagtggctaaagagtacagattatggaaaatatgaaggactaacaaagaattacatggattatttatcccgactatatgaaagagaaatcaaagatttctttgaagttgcaaagatcaagatgactggcacaactaaagaaagcaagaagtttggtcttcatggaagttcggggaaattaactggatctacttctagtctaaataagctcagtgttcagagttcagggaatcgcagatctcagtcatcttccctgttggatatgggaaacatgtctgcctctgatctcgatgttgctgacaggaccaaatttgataagatctttgaacaggtactaagtgaactggagcccctatgtctggcagaacaggacttcataagtaaatttttcaaactacagcaacatcaaagtatgcctggaactatggctgaagcagaggacctggatggaggaacattatcacggcaacataattgtggcacaccactgcctgtttcatctgagaaagatatgatccgccaaatgatgattaaaatatttcgctgcattgagccagagctgaacaacctaattgcattaggagacaaaattgatagctttaactctctttatatgttagtcaaaatgagtcatcatgtgtggactgcacaaaatgtggaccctgcttctttcctaagtactacattgggaaatgttttggtgactgtcaaaaggaactttgacaaatgcattagtaaccaaataaggcaaatggaagaagtaaagatctcaaaaaagagtaaagttggaattcttccatttgttgctgaatttgaagaatttgctggacttgcagaatcaatcttcaaaaatgctgagcgtcgtggagacctggataaagcatacaccaaacttatcagaggagtatttgttaatgtggagaaagtagcaaatgaaagccagaagacccccagggatgtggttatgatggaaaactttcaccatatttttgcaactctttctcgattgaaaatctcatgtctagaagcagaaaaaaaagaagccaaacaaaaatacacagatcaccttcagtcttatgtcatttactctttaggacaacctcttgaaaaactaaatcatttctttgaaggtgttgaagctcgcgtggcacagggcataagggaggaggaagtaagttaccaacttgcatttaacaaacaagaacttcgtaaagtcattaaggagtaccctggaaaggaagtaaaaaaaggtctagataacctctacaagaaagttgataaacatttatgtgaagaagagaacttacttcaggtggtgtggcactccatgcaagatgaatttatacgccagtataagcactttgaaggtttgatagctcgctgttatcctggatctggtgttacaatggaattcactattcaggacattctggattattgttccagcattgcacagtcccactaaaccttgtgaaagaagaaaagataactgaatgaagcatttgagtataacagacactataccaaaataccaagcaactgttttgagaacccagacttaaaattttatgtattattaaatgttagataaatgggtagtaccatactacaaatatttaaatgcaaaattaccaacctatatagcagttttatttgccctataggttgcatactaacttaagcattcatgtcaccataaaatgcctttagcatttctcaatgactggatgggaaattttcctttattgcctagctgcttgtgtttgagtggttgtcctatgagcaatgcatttggagttcttcagctttcactacttctctgttgcttgctaatcatgtaactactaaaatactgtacaaaattgttttttcacactaacaaatgtgtatatggagaagagggctcatgtgatgatcatttgtgaacttagatttttgaggattatgtgactagtaataaatgtgaaataaattttcaaaaaagttgacatttgataatatttt

SEQ ID NO: 131491 - DNA, 3551 bp, Homo sapiens
  Payload ID: 5660
  Gene Symbol: EXOC1
  Gene Name: exocyst complex component 1
  Uniprot ID: Q9NV70
  ENST ID: ENST00000381295
  CDS Start-End: 349-3033
cttccttctctacgcggtcaacttccggcgcggagtttgtcacgtgcccggatataggaagtgttgggggaacggccgcttcccgttcaacgctttattgaggggcgtatcctagtggcccccatccggtctccgttttggaagacccgcctcggcacagccaggctcagtccggccttgcggtaagccttcggccgcggctgcccggtagtcccggcggcggcggacagacgagctgacaggcaccagggtctaaggcggctcctcagtccggctgctgtctccacgcctggggtcgggcaccgctccttctgaccttcctttccccgtttgtcccgctgagaaaagatgacagcaatcaagcatgcattacaaagagacatttttacaccaaatgatgaacgcctgctgagcattgtgaatgtctgcaaagcaggaaaaaagaaaaagaactgttttttatgtgccacagtgacaactgaacgccctgtgcaggttaaggtggtcaaagtcaagaaatccgataagggagatttctacaaaaggcagattgcatgggcccttcgagatcttgctgtggtagatgccaaagatgctatcaaagaaaatcctgaatttgatttacactttgaaaaaatatataaatgggttgccagcagcactgctgaaaagaatgcatttatttcatgcatttggaaattgaatcagcgatatctccggaagaaaattgattttgtcaatgttagctcacagcttttggaagaatctgttccaagtggagaaaatcagagtgtgacaggaggtgatgaagaagtagtagatgaataccaagagttaaatgcaagagaagaacaggatatcgaaataatgatggaaggctgtgaatatgcaatctcgaatgcggaagcctttgcagaaaaattgtccagagagctgcaggtgctagatggggctaacatccagtcaatcatggcatctgaaaaacaagtcaacatcctgatgaaattgctagatgaggctctaaaggaggtagatcagattgaattgaaactgagcagttatgaggaaatgctccaaagtgtaaaagaacaaatggatcagatctctgaaagcaaccacctaattcatcttagtaacactaataatgtaaaactcctatctgagatagagttccttgtgaaccacatggacttggccaaaggtcatataaaggcccttcaggaaggagatcttgcttcttccagaggcattgaggcctgcaccaatgctgctgatgcccttctgcagtgcatgaatgtagctcttcgaccaggccatgacttgcttctggcagtcaaacagcaacagcagcgattcagtgatttgcgagagctttttgcccggagactggccagtcacctcaacaatgtttttgttcaacagggtcatgatcagagttcgactcttgcccaacactctgttgaactgactttacccaatcatcatccatttcatagagatttgctccgatatgccaagctgatggagtggctaaagagtacagattatggaaaatatgaaggactaacaaagaattacatggattatttatcccgactatatgaaagagaaatcaaagatttctttgaagttgcaaagatcaagatgactggcacaactaaagaaagcaagaagtttgctacactgcctcgaaaagaaagtgctgtcaaacaggaaacagagagtcttcatggaagttcggggaaattaactggatctacttctagtctaaataagctcagtgttcagagttcagggaatcgcagatctcagtcatcttccctgttggatatgggaaacatgtctgcctctgatctcgatgttgctgacaggaccaaatttgataagatctttgaacaggtactaagtgaactggagcccctatgtctggcagaacaggacttcataagtaaatttttcaaactacagcaacatcaaagtatgcctggaactatggctgaagcagaggacctggatggaggaacattatcacggcaacataattgtggcacaccactgcctgtttcatctgagaaagatatgatccgccaaatgatgattaaaatatttcgctgcattgagccagagctgaacaacctaattgcattaggagacaaaattgatagctttaactctctttatatgttagtcaaaatgagtcatcatgtgtggactgcacaaaatgtggaccctgcttctttcctaagtactacattgggaaatgttttggtgactgtcaaaaggaactttgacaaatgcattagtaaccaaataaggcaaatggaagaagtaaagatctcaaaaaagagtaaagttggaattcttccatttgttgctgaatttgaagaatttgctggacttgcagaatcaatcttcaaaaatgctgagcgtcgtggagacctggataaagcatacaccaaacttatcagaggagtatttgttaatgtggagaaagtagcaaatgaaagccagaagacccccagggatgtggttatgatggaaaactttcaccatatttttgcaactctttctcgattgaaaatctcatgtctagaagcagaaaaaaaagaagccaaacaaaaatacacagatcaccttcagtcttatgtcatttactctttaggacaacctcttgaaaaactaaatcatttctttgaaggtgttgaagctcgcgtggcacagggcataagggaggaggaagtaagttaccaacttgcatttaacaaacaagaacttcgtaaagtcattaaggagtaccctggaaaggaagtaaaaaaaggtctagataacctctacaagaaagttgataaacatttatgtgaagaagagaacttacttcaggtggtgtggcactccatgcaagatgaatttatacgccagtataagcactttgaaggtttgatagctcgctgttatcctggatctggtgttacaatggaattcactattcaggacattctggattattgttccagcattgcacagtcccactaaaccttgtgaaagaagaaaagataactgaatgaagcatttgagtataacagacactataccaaaataccaagcaactgttttgagaacccagacttaaaattttatgtattattaaatgttagataaatgggtagtaccatactacaaatatttaaatgcaaaattaccaacctatatagcagttttatttgccctataggttgcatactaacttaagcattcatgtcaccataaaatgcctttagcatttctcaatgactggatgggaaattttcctttattgcctagctgcttgtgtttgagtggttgtcctatgagcaatgcatttggagttcttcagctttcactacttctctgttgcttgctaatcatgtaactactaaaatactgtacaaaattgttttttcacactaacaaatgtgtatatggagaagagggctcatgtgatgatcatttgtgaacttagatttttgaggattatgtgactagtaataaatgtgaaataaattttcaaaaaa

SEQ ID NO: 131492 - DNA, 4449 bp, Homo sapiens
  Payload ID: 5661
  Gene Symbol: EXOC2
  Gene Name: exocyst complex component 2
  Uniprot ID: Q96KP1
  ENST ID: ENST00000230449
  CDS Start-End: 137-2911
gtgaggtgccggcggctggcggccgcggagtcttcggcgagacctaccgggccctgtctgtgccggccgtgagctgcggcaggacggctggagattacttctctaacaggatcaccagtttgctccacaaagcacaatgtctcgatcacgacaacccccccttgtgaccggcatctctccaaatgaagggataccatggacgaaggtcacaatcaggggagaaaatctggggactggccccaccgacctcataggcttgaccatttgtggacataattgcctcctgacggcagaatggatgtctgcaagtaaaatagtatgtcgagtgggacaagccaaaaatgacaaaggagacattattgtcaccactaagtcaggtggcagaggaacctcaacagtctctttcaagctactcaaacctgagaaaataggcattttggatcagtctgctgtgtgggttgatgaaatgaattattatgatatgcgcactgacaggaacaaaggaattccgcccttgtccttacgtcctgctaacccgcttggcattgagattgaaaaaagtaaattttcgcagaaggacttagaaatgctattccatggaatgagtgctgattttacaagtgagaatttctcagcagcctggtatcttatagagaatcactcaaacaccagttttgagcagctcaaaatggcagtcaccaacctaaagagacaggctaacaagaagagtgagggcagcctggcctatgtgaaaggcggtctcagtacattcttcgaagcacaggatgccctctcagccatccatcaaaaactagaagcagatggaacggaaaaagtagaaggatccatgacgcagaaactggagaatgttctgaacagagcaagtaatactgcagacacattgtttcaagaagtattaggtcggaaagacaaggcagattccactagaaatgcactcaatgtgcttcagcgatttaagtttcttttcaaccttcctctaaatattgaaaggaatattcaaaagggtgattatgatgtggttattaatgattatgaaaaggccaagtcactttttgggaaaacggaggtgcaagttttcaagaaatattatgctgaagtagaaacaaggattgaagctttaagagaattacttctggataaattgcttgagacaccatcaactttacatgaccaaaaacgttacataaggtacctgtctgaccttcatgcgtctggtgaccctgcttggcaatgcattggagcccaacacaagtggatccttcagctcatgcacagttgcaaagagggctacgtgaaagatctgaaaggtaacccaggcctgcacagtcccatgttggatcttgataatgatacacgtccctcagtgttgggccatctcagtcagacagcgtccctgaagaggggcagcagctttcagtctggtcgagacgacacgtggagatacaaaactccccacagggtggcctttgttgaaaaattgacaaaactcgtcttgagccagctgcctaacttctggaaactctggatctcctacgttaatggaagcctcttcagtgagactgctgagaagtcaggccagattgaaagatcaaagaatgtaaggcaaagacaaaatgattttaagaaaatgattcaggaagtaatgcactccctggtgaagcttacccgcggagccctgcttcccctcagcatccgggatggggaagccaagcagtacggaggctgggaggtgaagtgcgagctctccggacagtggctcgctcacgccatccagactgtaagacttactcatgaatcgttgactgcccttgaaattcctaatgacctgttacagactatccaggatctcatcttggatctccgagtacgttgcgtaatggccacgttgcagcacacggcggaagaaataaagagattagctgaaaaagaagactggattgttgacaatgaaggactgacttctctaccatgtcagtttgaacagtgcatcgtgtgttctctgcagtcactgaagggggttctggagtgcaagccgggagaggccagtgtcttccaacaacctaaaacacaggaggaggtttgccagctaagcatcaatataatgcaggtttttatatactgtctggaacagttgagcaccaagcctgatgcagatatagatactacacatctctctgttgatgtttcttcccctgacttgtttggaagtatccatgaagacttcagcttgacctcagaacagcgccttttgatagtcctaagtaattgctgctatctagaacgtcacaccttcctaaatatcgcagaacattttgaaaagcacaacttccagggaatagaaaaaatcacacaggttagcatggcctcattgaaagaactagatcaaagactctttgaaaattacatcgagttgaaagcagatcccatcgttggctccttagaacctggaatttatgcaggatattttgattggaaggactgcctgcctccaacaggtgtcagaaactatttaaaagaagcactggtgaatataattgccgtgcatgcagaggtgttcaccatttccaaagaactggtccctcgggtactatccaaggtgatagaagcagtttctgaagagctcagtcgactgatgcagtgtgtttcatccttcagcaaaaatggagctttacaggcgagacttgaaatctgtgctttgagggacactgtggctgtttacctgacacccgaaagcaagtcaagttttaagcaggctttggaagccctgccccagctttccagtggagcagataaaaagttactggaagagctcctgaacaagttcaagagtagcatgcacttgcagctcacctgtttccaagcagcttcttcaaccatgatgaaaacataaatatctgccacataaaagaagtccaggaaaataacacgtaataagactgttcactctctaagtaccctaaaggtatttggtgtattaaacattgggtttgccatttttctcttttttcttcctctgacttcgaaaattgttggtatacatttcaaccaaaatgacctcatttgaaatgcccaggaagtatttgttttgccattcttactagatcagatcctgtatgactttaaaatacattttaaaatatattttgcatctcagcagaaggttgagtgctgcaggaagagctgcttctgcagggagttttctggaatggcgtggcacatattgaagcatttctcagtgtcccgttcacggaagcgcaggcagctcccacgacacacggagagactgactgatacgagatttggaaagctatgtagacatctttggagctcttactgtcctaaactgtacagctgtgcttaaaaccctcatttcatataaatggccttaagttttctaattcaagcgggtttttggaaaaatttatggtctccattaaaatacatattacaactggggtagattatttgtggtccaggtgtctgtgatttaactttgcgttttgctatctgatttttatttttcacagggctaagcatgagctttcattctcactcactcttaatttgtcgtgcgtcactacacatgcacgtgttgcagtccctgaggccctgtgtgttatctgtgatggagtgtgaatgtgtaacgggcactgtgttacactctgaggtgttggcggggcggtcgcagacttcagggtcccctaacggaaaggccaggctccgcgtggacggccaactccctgcccgctccttcagcaggtgactgtctctgccacttcttacctgctgaaggatcttgctcagtagctggaacaatgctgctgtcacacagtctcttctctgaaacttcaggatgctccttggtcaccaggcaatgggagctgtagaccagccgcatgcacttgccccacattcactgctgactggcttcactggaataggttcaggtcaccgggacttctctcagagtcagcggcccacccaactccctcataccgtcgcatctgaaaattttcagagaggaattctctttgtagtcggcttgtcagggttttcaagtttttctatggttatttttaaatctctttttttaaatgctaaaattaatgtcctcattaatgcaagtaattttagagcacagtgtagccatgtacagtttccattatttaaaataaataaatgtgttggttcatttggtgtatggggggacatcatggtaactggaaatgaaagtttaatctttcacaaatgtgcttgataaagctgttaagaattgtctttcctaagtatgttaactgttgtatctaactcaactgtgagctaagtttaaaaactgcaatcatgaatgtttgtgatattttaaatatctactacagcacattcagccaataaagaatctgcctttaatgtaagttgtaatttacttga

SEQ ID NO: 131493 - DNA, 720 bp, Homo sapiens
  Payload ID: 5661
  Gene Symbol: EXOC2
  Gene Name: exocyst complex component 2
  ENST ID: ENST00000443083
  CDS Start-End: 299-720
gtgaggtgccggcggctggcggccgcggagtcttcggcgagacctaccgggccctgtctgtgccggccgtgagctgcggcaggacggctggagtaaatcttggtgccaataatggaacgaacactggacacaggactggggaagactggatttcagcttaggagaagaatactaagaagtttcagcagtggaatgcctactcttcttataaccggagtggaaacggaagcattttgtgagagggctggagggaagattacttctctaacaggatcaccagtttgctccacaaagcacaatgtctcgatcacgacaacccccccttgtgaccggcatctctccaaatgaagggataccatggacgaaggtcacaatcaggggagaaaatctggggactggccccaccgacctcataggcttgaccatttgtggacataattgcctcctgacggcagaatggatgtctgcaagtaaaatagtatgtcgagtgggacaagccaaaaatgacaaaggagacattattgtcaccactaagtcaggtggcagaggaacctcaacagtctctttcaagctactcaaacctgagaaaataggcattttggatcagtctgctgtgtgggttgatgaaatgaattattatgatatgcgcactgacaggaacaaaggaattccgcccttgtccttacgtcctgctaacccgcttggcattgagattgaaaa

SEQ ID NO: 131494 - DNA, 2682 bp, Homo sapiens
  Payload ID: 5662
  Gene Symbol: EXOC3
  Gene Name: exocyst complex component 3
  Uniprot ID: O60645
  ENST ID: ENST00000315013
  CDS Start-End: 58-2295
gtgcacagagaacacccctagcatgaacagtgtgaggattccaccagctttttcaccatgaaggagacagaccgggaggccgttgcgacagcagtgcaaagggttgctgggatgctccagcgcccggaccagctggacaaggtggagcagtatcgcaggagagaagcgcggaagaaggcctccgtggaggccagattgaaggccgccatccagtcacagttggacggggtgcgcacaggcctcagccagctccacaacgccctgaatgacgtcaaagacatccagcagtcgctggcagacgtcagcaaggactggaggcagagcatcaacaccattgagagcctcaaggacgtcaaagacgccgtggtgcagcacagccagctcgccgcagccgtggagaacctcaagaacatcttctcagtgcctgagattgtgagggagacccaggacctaattgaacaaggggcactcctgcaagcccaccggaagctgatggacctggagtgctcccgggacgggctgatgtacgagcagtaccgcatggacagtgggaacacgcgtgacatgaccctcatccatggctactttggcagcacgcaggggctctctgatgagctggctaagcagctgtggatggtgctgcagaggtcactggtcactgtccgccgtgaccccaccttgctggtctcagttgtcaggatcattgaaagggaagagaaaattgacaggcgcatacttgaccggaaaaagcaaactggctttgttcctcctgggaggcccaagaattggaaggagaaaatgttcaccatcttggagaggactgtgaccaccagaattgagggcacacaggcagataccagagagtctgacaagatgtggcttgtccgccacctggaaattataaggaagtacgtcctggatgacctcattgtcgccaaaaacctgatggttcagtgctttcctccccactatgagatctttaagaacctcctgaacatgtaccaccaagccctgagcacgcggatgcaggacctcgcatcggaagacctggaagccaatgagatcgtgagcctcttgacgtgggtcttaaacacctacacaagtactgagatgatgaggaacgtggagctggccccggaagtggatgtcggcaccctggagccattgctttctccacacgtggtctctgagctgcttgacacgtacatgtccacgctcacttcaaacatcatcgcctggctgcggaaagcgctggagacagacaagaaagactgggtcaaagagacagagccagaagccgaccaggacgggtactaccagaccacactccctgccattgtcttccagatgtttgaacagaatcttcaagttgctgctcagataagtgaagatttgaaaacaaaggtactagttttatgtcttcagcagatgaattctttcctaagcagatataaagatgaagcgcagctgtataaagaagagcacctgaggaatcggcagcaccctcactgctacgttcagtacatgatcgccatcatcaacaactgccagaccttcaaggaatccatagtcagtttaaaaagaaagtatttaaagaatgaagtggaagagggtgtgtctccgagccagcccagcatggacgggattttagacgccatcgcgaaggagggctgcagcggtttgctggaggaggtcttcctggacctggagcaacatctgaatgaattgatgacgaagaagtggctattagggtcaaacgctgtagacattatctgtgtcaccgtggaagactatttcaacgattttgccaaaattaaaaagccgtataagaagaggatgacggccgaggcgcaccggcgcgtggtggtggagtacctgcgggcggtcatgcagaagcgcatttccttccggagcccggaggagcgcaaggagggtgccgagaagatggttagggaggcagagcagctgcgcttcctgttccggaagctggcgtccggtttcggggaagacgtggacggatactgcgacaccatcgtggctgtggccgaagtgatcaagctgacagacccttctctgctctacctggaggtctccactctggtcagcaagtatccagacatcagggatgaccacatcggtgcgctgctggctgtgcgtggggacgccagccgtgacatgaagcagaccatcatggagaccctggagcagggcccagcacaggccagccccagctacgtgcccctcttcaaggacattgtggtgcccagcctgaacgtggccaagctgctcaagtagcctccgccggcctgccctgctcgcccctccacagcctcggtccctgcctttagaaacgcgggacagctgattgctctccttggccacacgtgctccttttagctgcacggcctgtctttaggtgccagtgtgatgcaccgggtgtgcgtcgagtgagcgtcccgaggccacgtgcggaggcccctcactgtgctgtcaaaggcctgtgggtgcagggctctgccgcacagcctctcttgggtgcttgtttgttgcagtggttgaaagtgtgtggggcacagaggacgtgcacctccctgccctcctcctccctgggccttcaccgcaccccatctgcttaagtgctcggaaccccgtcacctaattaaagtttctcggcttcctcag

SEQ ID NO: 131495 - DNA, 424 bp, Homo sapiens
  Payload ID: 5662
  Gene Symbol: EXOC3
  Gene Name: exocyst complex component 3
  ENST ID: ENST00000508022
  CDS Start-End: 219-424
cggcggcggcgtagccgtagaggattttctacgttggtatgccaaatttcataatcagaaaataaagagaaaggaaaggttgcaatgtaggtccagatgaaaaaggagaagagaggtgtctgaaagcatgtgggcatggagaatgaaaaattccaggagaagtgcacagagaacacccctagcatgaacagtgtgaggattccaccagctttttcaccatgaaggagacagaccgggaggccgttgcgacagcagtgcaaagggttgctgggatgctccagcgcccggaccagctggacaaggtggagcagtatcgcaggagagaagcgcggaagaaggcctccgtggaggccagattgaaggccgccatccagtcacagttggacggggtgcgcacaggcctcagccagctccacaacgccct

SEQ ID NO: 131496 - DNA, 5365 bp, Homo sapiens
  Payload ID: 5662
  Gene Symbol: EXOC3
  Gene Name: exocyst complex component 3
  ENST ID: ENST00000503889
  CDS Start-End: 1-1421
acctaattgaacaaggggcactcctgcaagcccaccggaagctgatggacctggagtgctcccgggacgggctgatgtacgagcagtaccgcatggacagtgggaacacgcgtgacatgaccctcatccatggctactttggcagcacgcaggggctctctgatgagctggctaagcagctgtggatggtgctgcagaggtcactggtcactgtccgccgtgaccccaccttgctggtctcagttgtcaggatcattgaaagggaagagaaaattgacaggcgcatacttgaccggaaaaagcaaactggctttgttcctcctgggaggcccaagaattggaaggagaaaatgttcaccatcttggagaggactgtgaccaccagaattgagggcacacaggcagataccagagagtctgacaagatgtggcttgtccgccacctggaaattataaggaagtacgtcctggatgacctcattgtcgccaaaaacctgatggttcagtgctttcctccccactatgagatctttaagaacctcctgaacatgtaccaccaagccctgagcacgcggatgcaggacctcgcatcggaagacctggaagccaatgagatcgtgagcctcttgacgtgggtcttaaacacctacacaagtactgagatgatgaggaacgtggagctggccccggaagtggatgtcggcaccctggagccattgctttctccacacgtggtctctgagctgcttgacacgtacatgtccacgctcacttcaaacatcatcgcctggctgcggaaagcgctggagacagacaagaaagactgggtcaaagagacagagccagaagccgaccaggacgggtactaccagaccacactccctgccattgtcttccagatgtttgaacagaatcttcaagttgctgctcagataagtgaagatttgaaaacaaaggtactagttttatgtcttcagcagatgaattctttcctaagcagatataaagatgaagcgcagctgtataaagaagagcacctgaggaatcggcagcaccctcactgctacgttcagtacatgatcgccatcatcaacaactgccagaccttcaaggaatccatagtcagtttaaaaagaaagtatttaaagaatgaagtggaagagggtgtgtctccgagccagcccagcatggacgggattttagacgccatcgcgaaggagggctgcagcggtttgctggaggaggtcttcctggacctggagcaacatctgaatgaattgatgacgaagaagtggctattagggtcaaacgctgtagacattatctgtgtcaccgtggaagactatttcaacgattttgccaaaattaaaaagccgtataagaaggtaagaaggtgggacctagttccctcatcaccttgacgctagggctcacctctcaccctgctcagaattcagcatccagcgagtccctccgtgagtgaacgttcacttgttgtcctatcagcccaagggaggcaataggctctgcggacgccacctccctgggacggggctctggtgagaatggccggggccctgtggcatggccctcgaggtggagggagccatggttcccggagaggcccgcgtgccccgtcttagctccttgccttccactcactccctgaggccccagggatttctttccgcttcagaccctccttcctgcaggacccaggttcctctttcctccaaagtgcctgccgcgttttccagatgctgcggtcgttatcaaaggacagcagcagccactgacacgggcctgtctgtggaccgagtgctcatgcgcggcactgcctcgcccgcgtctgtcctgctgggggccggagctggcctggtgcgggggtccaggtcaccgtcactgttcccccactgagcccccgctcctcctctgcggtgagatgccagagccgtggcggagcgaggaggagtgggctcagagcctccggggagccaccgggagccccagcctgggtttcaatgagggtgctcctggccgccagagccgtggagcctgccgctgaccgcgcgtgtctccccagaggatgacggccgaggcgcaccggcgcgtggtggtggagtacctgcgggcggtcatgcagaagcgcatttccttccggagcccggaggagcgcaaggagggtgccgagaagatggttagggaggcagagcagctgcgcttcctgttccggaagctggcgtccggtttcggggaagacgtggacggatactgcgacaccatcgtggctgtggccgaagtgatcaagctgacagacccttctctgctctacctggaggtctccactctggtcagcaagtatccagacatcagggatgaccacatcggtgcgctgctggctgtgcgtggggacgccagccgtgacatgaagcagaccatcatggagaccctggagcagggcccagcacaggccagccccagctacgtgcccctcttcaaggacattgtggtgcccagcctgaacgtggccaagctgctcaagtagcctccgccggcctgccctgctcgcccctccacagcctcggtccctgcctttagaaacgcgggacagctgattgctctccttggccacacgtgctccttttagctgcacggcctgtctttaggtgccagtgtgatgcaccgggtgtgcgtcgagtgagcgtcccgaggccacgtgcggaggcccctcactgtgctgtcaaaggcctgtgggtgcagggctctgccgcacagcctctcttgggtgcttgtttgttgcagtggttgaaagtgtgtggggcacagaggacgtgcacctccctgccctcctcctccctgggccttcaccgcaccccatctgcttaagtgctcggaaccccgtcacctaattaaagtttctcggcttcctcagagaaatgaaaacgccatgcattctcttttccagttaaggttttctgactactgatctaggattgcccaggaactgttgtcaatcacagagtaaaagtctccgctcagcctggagggcgccctcctggtcccctcctgtctgacatcccctcagcctagagggcgccctcctggtcccctcctgtctgacatcccctcagcctagagggtgccttcctgatcccctcatgtctgacatcccctcagcctggagggcgccctcctggtcccctcctgtctgacatcccctcagcctggatggcgccctcctggtcccctcctgtctgacatcccctcagcctagagggcgccctcctggtcccctcctgtctgacatcccctcagcctggatggcgccctcctggtcccctcctgtctgacatcccctcagcctagagggtgccctcctgatcccctcatgtctgacatcccctcagcctggatggcgccctcctggtcccctcctgtctgacatcccctcagcctagagggtgccctcctggtcccctcatgtctgacatcccctcagcctagagggcgccctcctgatcccctcatgtctgacatcccctcagcctggagggcgccctcctggtcccctcgtatctgacatcccctcagcctggagggcgccctcctggtcccctcctgtctgacatcccctcagcctggagggcgccctcctgatcccctcctgtctgacatcccctcagcctggagggcgccctcctggtcccctcgtatctgacatcccctcagcctggagggcgccctcctggtcccctcctgtctgacatcccctcagcctggagggcgccctcctgatcccctcctgtctgacatcccctcagcctggagggcgccctcctggtcccctcgtatctgacatcccctcagcctggagggcgccctcctggtcccctcgtatctgacatcccctcagcctggagggcgccctcctggtcccctcgtatctgacatcccctcagcctggagggcgccctcctggtcccctcctgtctgacatcccctcagcctggagggcgccctcctggtcccctcctgtctgacatcccctcagcctggagggcgccctcctggtcccctcctgtctgacatcccctcagcctggagggcgccctcctggtcccctcctgtctgacatcccctcagcctggagggtgccctcctggtcccctcctgtttgacatccccagagttactccttgggtcctttgagagatgagacaccagctgcacccagcaagccctgtccccacccccagctaatcaaggcattaccccggaggccgggcgcagtggctcacgcctgtaatcccaacactttgggaggccaagatgtgaaaaattcacaaatgggacttcttgaaagaatcaaaacttgagaagtaactgagaagtagaagcagctcttaacaagcatcaggggctcagaagaggtagctcttcccagggcatccagcgggcgagctgttccatgtgcctctgaacccagcttcccacttagcagcaggtcttgagtgcacctggcatacacctgtgcaattctcgtcaacacagaacacctgcctgcccacccccggtgctgaagaccgaccagtcaaggaggtgttggtgggagtgttgtgttcaccatgtggagatcaggcggcgattaccgcatcttctttgctgactttggtaaccgggtgtccagggaggagcgatcgggagtggccaagcagttgcctggactcagcttctgactctgcagctgggagtcagatgcaggcccaagggtccaggggagttgttcagcgcctggaatcgccatgcattgcgcggtggaccgcacgacgctcctgctctgttctcccaggcacagacaggcacttggaaggcagctttgctcctctggccacccggaaacctcccagcagttcagatgggacaaactgggggcctgtcagaacagccacttgtgccgggaaggccaggccccggcctgctccgatgaacgtcaggacggtggctgcagcagggaaccagggctggccttggatctgtccagtagggtcactgactgggcagggcttgctgcatagaggatggctgcattttgtgctcagagttggttgaaatggctacgaagtgtggagaataaccactgaatcccaaaaagtcactgcgcttgatctgatccaagtaacagtgactgcagttagggtcgagagcttctccgaagcagcggtcatgcaggcttttgtgtggctgacgcttccctttttcacaacagtaaaaagctatcaatgggaaattgtggacttttcccaccagggactcaatggggactcaatgtgcaatattcagtcaacataaaactctttaagaactc

SEQ ID NO: 131497 - DNA, 5748 bp, Homo sapiens
  Payload ID: 5662
  Gene Symbol: EXOC3
  Gene Name: exocyst complex component 3
  ENST ID: ENST00000515601
  CDS Start-End: 115-1503
ggcggcggcggcggcggcggcggcggcggcggcggcggcggcggcgtagccgtagaggtgcacagagaacacccctagcatgaacagtgtgaggattccaccagctttttcaccatgaaggagacagaccgggaggccgttgcgacagcagtgcaaagggttgctgggatgctccagcgcccggaccagctggacaaggtggagcagtatcgcaggagagaagcgcggaagaaggcctccgtggaggccagattgaaggccgccatccagtcacagttggacggggtgcgcacaggcctcagccagctccacaacgccctgaatgacgtcaaagacatccagcagtcgctggcagacgtcagcaaggactggaggcagagcatcaacaccattgagagcctcaaggacgtcaaagacgccgtggtgcagcacagccagctcgccgcagccgtggagaacctcaagaacatcttctcagtgcctgagattgtgagggagacccaggacctaattgaacaaggggcactcctgcaagcccaccggaagctgatggacctggagtgctcccgggacgggctgatgtacgagcagtaccgcatggacagtgggaacacgcgtgacatgaccctcatccatggctactttggcagcacgcaggggctctctgatgagctggctaagcagctgtggatggtgctgcagaggtcactggtcactgtccgccgtgaccccaccttgctggtctcagttgtcaggatcattgaaagggaagagaaaattgacaggcgcatacttgaccggaaaaagcaaactggctttgttcctcctgggaggcccaagaattggaaggagaaaatgttcaccatcttggagaggactgtgaccaccagaattgagggcacacaggcagataccagagagtctgacaagatgtggcttgtccgccacctggaaattataaggaagtacgtcctggatgacctcattgtcgccaaaaacctgatggttcagtgctttcctccccactatgagatctttaagaacctcctgaacatgtaccaccaagccctgagcacgcggatgcaggacctcgcatcggaagacctggaagccaatgagatcgtgagcctcttgacgtgggtcttaaacacctacacaagatataaagatgaagcgcagctgtataaagaagagcacctgaggaatcggcagcaccctcactgctacgttcagtacatgatcgccatcatcaacaactgccagaccttcaaggaatccatagtcagtttaaaaagaaagtatttaaagaatgaagtggaagagggtgtgtctccgagccagcccagcatggacgggattttagacgccatcgcgaaggagggctgcagcggtttgctggaggaggtcttcctggacctggaggtgggcctggctctttcctcctgccgttttctgggccgaagcccagtgcttcctcactgccctctgggacacaggctgtgaactgtaccgtgcggatgccgtctggggagccgggctgtgcacttgcattccggtcagatcgcttaaagcgcctccgttttcggtgacgctgcttcgtatgatgcagggtccttcttacgcacaattcagtagattcaccctcaacatctgaatgaattgatgacgaagaagtggctattagggtcaaacgctgtagacattatctgtgtcaccgtggaagactatttcaacgattttgccaaaattaaaaagccgtataagaaggtaagaaggtgggacctagttccctcatcaccttgacgctagggctcacctctcaccctgctcagaattcagcatccagcgagtccctccgtgagtgaacgttcacttgttgtcctatcagcccaagggaggcaataggctctgcggacgccacctccctgggacggggctctggtgagaatggccggggccctgtggcatggccctcgaggtggagggagccatggttcccggagaggcccgcgtgccccgtcttagctccttgccttccactcactccctgaggccccagggatttctttccgcttcagaccctccttcctgcaggacccaggttcctctttcctccaaagtgcctgccgcgttttccagatgctgcggtcgttatcaaaggacagcagcagccactgacacgggcctgtctgtggaccgagtgctcatgcgcggcactgcctcgcccgcgtctgtcctgctgggggccggagctggcctggtgcgggggtccaggtcaccgtcactgttcccccactgagcccccgctcctcctctgcggtgagatgccagagccgtggcggagcgaggaggagtgggctcagagcctccggggagccaccgggagccccagcctgggtttcaatgagggtgctcctggccgccagagccgtggagcctgccgctgaccgcgcgtgtctccccagaggatgacggccgaggcgcaccggcgcgtggtggtggagtacctgcgggcggtcatgcagaagcgcatttccttccggagcccggaggagcgcaaggagggtgccgagaagatggttagggaggcagagcagctgcgcttcctgttccggaagctggcgtccggtttcggggaagacgtggacggatactgcgacaccatcgtggctgtggccgaagtgatcaagctgacagacccttctctgctctacctggaggtctccactctggtcagcaagtatccagacatcagggatgaccacatcggtgcgctgctggctgtgcgtggggacgccagccgtgacatgaagcagaccatcatggagaccctggagcagggcccagcacaggccagccccagctacgtgcccctcttcaaggacattgtggtgcccagcctgaacgtggccaagctgctcaagtagcctccgccggcctgccctgctcgcccctccacagcctcggtccctgcctttagaaacgcgggacagctgattgctctccttggccacacgtgctccttttagctgcacggcctgtctttaggtgccagtgtgatgcaccgggtgtgcgtcgagtgagcgtcccgaggccacgtgcggaggcccctcactgtgctgtcaaaggcctgtgggtgcagggctctgccgcacagcctctcttgggtgcttgtttgttgcagtggttgaaagtgtgtggggcacagaggacgtgcacctccctgccctcctcctccctgggccttcaccgcaccccatctgcttaagtgctcggaaccccgtcacctaattaaagtttctcggcttcctcagagaaatgaaaacgccatgcattctcttttccagttaaggttttctgactactgatctaggattgcccaggaactgttgtcaatcacagagtaaaagtctccgctcagcctggagggcgccctcctggtcccctcctgtctgacatcccctcagcctagagggcgccctcctggtcccctcctgtctgacatcccctcagcctagagggtgccttcctgatcccctcatgtctgacatcccctcagcctggagggcgccctcctggtcccctcctgtctgacatcccctcagcctggatggcgccctcctggtcccctcctgtctgacatcccctcagcctagagggcgccctcctggtcccctcctgtctgacatcccctcagcctggatggcgccctcctggtcccctcctgtctgacatcccctcagcctagagggtgccctcctgatcccctcatgtctgacatcccctcagcctggatggcgccctcctggtcccctcctgtctgacatcccctcagcctagagggtgccctcctggtcccctcatgtctgacatcccctcagcctagagggcgccctcctgatcccctcatgtctgacatcccctcagcctggagggcgccctcctggtcccctcgtatctgacatcccctcagcctggagggcgccctcctggtcccctcctgtctgacatcccctcagcctggagggcgccctcctgatcccctcctgtctgacatcccctcagcctggagggcgccctcctggtcccctcgtatctgacatcccctcagcctggagggcgccctcctggtcccctcctgtctgacatcccctcagcctggagggcgccctcctgatcccctcctgtctgacatcccctcagcctggagggcgccctcctggtcccctcgtatctgacatcccctcagcctggagggcgccctcctggtcccctcgtatctgacatcccctcagcctggagggcgccctcctggtcccctcgtatctgacatcccctcagcctggagggcgccctcctggtcccctcctgtctgacatcccctcagcctggagggcgccctcctggtcccctcctgtctgacatcccctcagcctggagggcgccctcctggtcccctcctgtctgacatcccctcagcctggagggcgccctcctggtcccctcctgtctgacatcccctcagcctggagggtgccctcctggtcccctcctgtttgacatccccagagttactccttgggtcctttgagagatgagacaccagctgcacccagcaagccctgtccccacccccagctaatcaaggcattaccccggaggccgggcgcagtggctcacgcctgtaatcccaacactttgggaggccaagatgtgaaaaattcacaaatgggacttcttgaaagaatcaaaacttgagaagtaactgagaagtagaagcagctcttaacaagcatcaggggctcagaagaggtagctcttcccagggcatccagcgggcgagctgttccatgtgcctctgaacccagcttcccacttagcagcaggtcttgagtgcacctggcatacacctgtgcaattctcgtcaacacagaacacctgcctgcccacccccggtgctgaagaccgaccagtcaaggaggtgttggtgggagtgttgtgttcaccatgtggagatcaggcggcgattaccgcatcttctttgctgactttggtaaccgggtgtccagggaggagcgatcgggagtggccaagcagttgcctggactcagcttctgactctgcagctgggagtcagatgcaggcccaagggtccaggggagttgttcagcgcctggaatcgccatgcattgcgcggtggaccgcacgacgctcctgctctgttctcccaggcacagacaggcacttggaaggcagctttgctcctctggccacccggaaacctcccagcagttcagatgggacaaactgggggcctgtcagaacagccacttgtgccgggaaggccaggccccggcctgctccgatgaacgtcaggacggtggctgcagcagggaaccagggctggccttggatctgtccagtagggtcactgactgggcagggcttgctgcatagaggatggctgcattttgtgctcagagttggttgaaatggctacgaagtgtggagaataaccactgaatcccaaaaagtcactgcgcttgatctgatccaagtaacagtgactgcagttagggtcgagagcttctccgaagcagcggtcatgcaggcttttgtgtggctgacgcttccctttttcacaacagtaaaaagctatcaatgggaaattgtggacttttcccaccagggactcaatggggactcaatgtgcaatattcagtcaacataaaactctttaagaactcc

SEQ ID NO: 131498 - DNA, 2825 bp, Homo sapiens
  Payload ID: 5662
  Gene Symbol: EXOC3
  Gene Name: exocyst complex component 3
  Uniprot ID: O60645
  ENST ID: ENST00000512944
  CDS Start-End: 190-2427
agtgcccgcgcgctgtccacttccggccgggaccccggaggcggaggcagcgaaggcggagggggcggcgggggcggcggcggcggcggcggcggcggcggcggcggcggcggcggcggcgtagccgtagaggtgcacagagaacacccctagcatgaacagtgtgaggattccaccagctttttcaccatgaaggagacagaccgggaggccgttgcgacagcagtgcaaagggttgctgggatgctccagcgcccggaccagctggacaaggtggagcagtatcgcaggagagaagcgcggaagaaggcctccgtggaggccagattgaaggccgccatccagtcacagttggacggggtgcgcacaggcctcagccagctccacaacgccctgaatgacgtcaaagacatccagcagtcgctggcagacgtcagcaaggactggaggcagagcatcaacaccattgagagcctcaaggacgtcaaagacgccgtggtgcagcacagccagctcgccgcagccgtggagaacctcaagaacatcttctcagtgcctgagattgtgagggagacccaggacctaattgaacaaggggcactcctgcaagcccaccggaagctgatggacctggagtgctcccgggacgggctgatgtacgagcagtaccgcatggacagtgggaacacgcgtgacatgaccctcatccatggctactttggcagcacgcaggggctctctgatgagctggctaagcagctgtggatggtgctgcagaggtcactggtcactgtccgccgtgaccccaccttgctggtctcagttgtcaggatcattgaaagggaagagaaaattgacaggcgcatacttgaccggaaaaagcaaactggctttgttcctcctgggaggcccaagaattggaaggagaaaatgttcaccatcttggagaggactgtgaccaccagaattgagggcacacaggcagataccagagagtctgacaagatgtggcttgtccgccacctggaaattataaggaagtacgtcctggatgacctcattgtcgccaaaaacctgatggttcagtgctttcctccccactatgagatctttaagaacctcctgaacatgtaccaccaagccctgagcacgcggatgcaggacctcgcatcggaagacctggaagccaatgagatcgtgagcctcttgacgtgggtcttaaacacctacacaagtactgagatgatgaggaacgtggagctggccccggaagtggatgtcggcaccctggagccattgctttctccacacgtggtctctgagctgcttgacacgtacatgtccacgctcacttcaaacatcatcgcctggctgcggaaagcgctggagacagacaagaaagactgggtcaaagagacagagccagaagccgaccaggacgggtactaccagaccacactccctgccattgtcttccagatgtttgaacagaatcttcaagttgctgctcagataagtgaagatttgaaaacaaaggtactagttttatgtcttcagcagatgaattctttcctaagcagatataaagatgaagcgcagctgtataaagaagagcacctgaggaatcggcagcaccctcactgctacgttcagtacatgatcgccatcatcaacaactgccagaccttcaaggaatccatagtcagtttaaaaagaaagtatttaaagaatgaagtggaagagggtgtgtctccgagccagcccagcatggacgggattttagacgccatcgcgaaggagggctgcagcggtttgctggaggaggtcttcctggacctggagcaacatctgaatgaattgatgacgaagaagtggctattagggtcaaacgctgtagacattatctgtgtcaccgtggaagactatttcaacgattttgccaaaattaaaaagccgtataagaagaggatgacggccgaggcgcaccggcgcgtggtggtggagtacctgcgggcggtcatgcagaagcgcatttccttccggagcccggaggagcgcaaggagggtgccgagaagatggttagggaggcagagcagctgcgcttcctgttccggaagctggcgtccggtttcggggaagacgtggacggatactgcgacaccatcgtggctgtggccgaagtgatcaagctgacagacccttctctgctctacctggaggtctccactctggtcagcaagtatccagacatcagggatgaccacatcggtgcgctgctggctgtgcgtggggacgccagccgtgacatgaagcagaccatcatggagaccctggagcagggcccagcacaggccagccccagctacgtgcccctcttcaaggacattgtggtgcccagcctgaacgtggccaagctgctcaagtagcctccgccggcctgccctgctcgcccctccacagcctcggtccctgcctttagaaacgcgggacagctgattgctctccttggccacacgtgctccttttagctgcacggcctgtctttaggtgccagtgtgatgcaccgggtgtgcgtcgagtgagcgtcccgaggccacgtgcggaggcccctcactgtgctgtcaaaggcctgtgggtgcagggctctgccgcacagcctctcttgggtgcttgtttgttgcagtggttgaaagtgtgtggggcacagaggacgtgcacctccctgccctcctcctccctgggccttcaccgcaccccatctgcttaagtgctcggaaccccgtcacctaattaaagtttctcggcttcctcagagaaatgaaaa

SEQ ID NO: 131499 - DNA, 2510 bp, Homo sapiens
  Payload ID: 5663
  Gene Symbol: EXOC3L1
  Gene Name: exocyst complex component 3-like 1
  Uniprot ID: Q86VI1
  ENST ID: ENST00000314586
  CDS Start-End: 242-2482
ctttctgttgatggccttggggagggaggagcctcggtgggaagaaggggcttctgggtggggagtgggagagagacttccttggggagaggaattcagctgcacgctggagtcagctggagttgcccaggccctgtgagcaagtggcaggcgtgcccagctgcattggggagagggctgttctcaaggccaaggtcatttttggagggagaactggacgcctgatcaaatctggcccacaatggactcagcagccaaggatgagatgcagccggcgttgtcccctggacctgagtggccagagcaggagcgggcagagcagctggcccggggtgcagcgctcaagtgggcctcaggcatcttctaccggccggagcagctggccaggctaggccagtaccgcagccgcgaggtgcagcgtacctgctccctggaatcgcgcctcaagtcagtgatgcagtcatacctggaaggcgtgcagactggtgtgtggcagctggcccaggccattgaggtggtgcagggaacccgggaggccctgagccaggcccgtgggttgctccagggcatgtcccaggccttacagactctagagcccctacgggagcgggttgcccagcacaagcaactgcaggccctgtctcacctgctgcctcggctgcgggcagtgccggctgcagtgtcccacacacagactctgattgatggccaacagttcttggaggcatatgtgagccttcgggagctggagcagctgcgagaggatacgtgggcacccctggggggcctggagttgccagtcttccaggggctggaccttctgttcgaggcactgggccaggctgtggaagcagctgcaggggccgcagggaagctggcacgggaggacccagccctgttggtggctgctgtgcgtgtggcggaggtggagactggacgaacaacccccctgggccaggtcccccgggactggcgtcagcgctgtctgagggcactacaggagggcctggagcaggcccactttgggtcacctctgctgcctgcaccaggggccctaccagggtggctggaggctctgcgagtggccctgccagtcgagttggccacagctgaggcactagtagcgccttgctgcccgccacagtacaacgtggtccagctatgggcccacacgctgcatagtggtttgcgccgcagcctgcagaacctccttgcagggcctgagctagaagctgcggatgccttcgccttgctgcactgggcactgcatgtgtacctggggcaggaaatgatggggagcctggagttggggcctgaggctgatgtgtcccagctggagccccttctgaccttggagaacattgagcagctggaggcaacatttgtggccaacatccaggcaagtgtgtctcagtggctgcagaatgcactggatggggaggtagctgagtggggccgggagcatgggcccaacacagacccgtctggctcctattactcaccaatgccagccattgtgctgcagatcctggaagagaacattcgtgtggccagcctggtcagtgagtcactgcaacagcgagtgcatggcatggcactgtcagaactgggcacattcttgaggagcttcagtgatgctctgatccgattctcccgagaccacttcagggggaaatcaatggcccctcattacgtgccctacctactggccgccctcaaccacaagtcagcactcagctcctcagtgtctgtcctgcagctggacggggcgccttcaggggccttggctccagtggaagctgcgctggacgagttgcagaggaggatctaccgcttggtgttggaggcgctgcaggcggagctccagcccctgttcgcggatctgccctcgcgccaatggctgtcgagccctgagctcctgcaaagtgtgtgtgaacggacggggcgcttctgccgggacttctggcgcgtgcggaaccccacggttcagctgctgctggctgaggccgagcgtgccgtggtgctccagtacctgagcgcgctgatgcaaggccgcctggtgtgccgcggagccgacgagaggacccaggcggccgagcgcctgcggcacgatgctgcccagcttcagcagcttttcctcagtttgggcctggaggagaacgcgcactgcgcgccggtgctgctcgccctgagggagctgctaaacctccgcgaccccgcgctgctgggcctggaggtggctggcctgcggcaacaatttcccgacgtgagcgaggaccacgtctccgccctcttgggcctgcgcggggacttgtcccgggagcagcacctggccgcgctcagctccctgcaggctgcgctgccgccgtcgccccgcgcgagccgccgcgtcctcttcagcctagtgcccgcgcccgcgctcgcgccggcctcctgcctgccctcggggtcctgcgcccgagccctgctgctcgcagaataaaccacggctgccggacgcctgagtctgt

SEQ ID NO: 131500 - DNA, 2247 bp, Homo sapiens
  Payload ID: 5663
  Gene Symbol: EXOC3L1
  Gene Name: exocyst complex component 3-like 1
  ENST ID: ENST00000545725
  CDS Start-End: 210-2247
ctcggtgggaagaaggggcttctgggtggggagtgggagagagacttccttggggagaggaattcagctgcacgctggagtcagctggagttgcccaggccctgtgagcaagtggcaggcgtgcccagctgcattggggagagggctgttctcaaggccaaggtcatttttggagggagaactggacgcctgatcaaatctggcccacaatggactcagcagccaaggatgagatgcagccggcgttgtcccctggacctgagtggccagagcaggagcgggcagagcagctggcccggggtgcagcgctcaagtgggcctcaggcatcttctaccggccggagcagctggccaggctaggccagtaccgcagccgcgaggtgcagcgtacctgctccctggaatcgcgcctcaagtcagtgatgcagtcatacctggaaggcgtgcagactgtgccggctgcagtgtcccacacacagactctgattgatggccaacagttcttggaggcatatgtgagccttcgggagctggagcagctgcgagaggatacgtgggcacccctggggggcctggagttgccagtcttccaggggctggaccttctgttcgaggcactgggccaggctgtggaagcagctgcaggggccgcagggaagctggcacgggaggacccagccctgttggtggctgctgtgcgtgtggcggaggtggagactggacgaacaacccccctgggccaggtcccccgggactggcgtcagcgctgtctgagggcactacaggagggcctggagcaggcccactttgggtcacctctgctgcctgcaccaggggccctaccagggtggctggaggctctgcgagtggccctgccagtcgagttggccacagctgaggcactagtagcgccttgctgcccgccacagtacaacgtggtccagctatgggcccacacgctgcatagtggtttgcgccgcagcctgcagaacctccttgcagggcctgagctagaagctgcggatgccttcgccttgctgcactgggcactgcatgtgtacctggggcaggaaatgatggggagcctggagttggggcctgaggctgatgtgtcccagctggagccccttctgaccttggagaacattgagcagctggaggcaacatttgtggccaacatccagatcctggaagagaacattcgtgtggccagcctggtcagtgagtcactgcaacagcgagtgcatggcatggcactgtcagaactgggcacattcttgaggagcttcagtgatgctctgatccgattctcccgagaccacttcagggggaaatcaatggcccctcattacgtgccctacctactggccgccctcaaccacaagtcagcactcagctcctcagtgtctgtcctgcagctggacggggcgccttcaggggccttggctccagtggaagctgcgctggacgagttgcagaggaggatctaccgcttggtgttggaggcgctgcaggcggagctccagcccctgttcgcggatctgccctcgcgccaatggctgtcgagccctgagctcctgcaaagtgtgtgtgaacggacggggcgcttctgccgggacttctggcgcgtgcggaaccccacggttcagctgctgctggctgaggccgagcgtgccgtggtgctccagtacctgagcgcgctgatgcaaggccgcctggtgtgccgcggagccgacgagaggacccaggcggccgagcgcctgcggcacgatgctgcccagcttcagcagcttttcctcagtttggtgagagcttcttgggcgggcagacgggcgagagtctcagtggctgggtgggagagagggctggcgcgagaccctaccccgacgtgctcagggcctggaggagaacgcgcactgcgcgccggtgctgctcgccctgagggagctgctaaacctccgcgaccccgcgctgctgggcctggaggtggctggcctgcggcaacaatttcccgacgtgagcgaggaccacgtctccgccctcttgggcctgcgcggggacttgtcccgggagcagcacctggccgcgctcagctccctgcaggctgcgctgccgccgtcgccccgcgcgagccgccgcgtcctcttcagcctagtgcccgcgcccgcgctcgcgccggcctcctgcctgccctcggggtcctgcgcccgagccctgctgctcgcagaataaaccacggctgccgga

SEQ ID NO: 131501 - DNA, 2225 bp, Homo sapiens
  Payload ID: 5663
  Gene Symbol: EXOC3L1
  Gene Name: exocyst complex component 3-like 1
  ENST ID: ENST00000563889
  CDS Start-End: 174-2225
gagagagacttccttggggagaggaattcagctgcacgctggagtcagctggagttgcccaggccctgtgagcaagtggcaggcgtgcccagctgcattggggagagggctgttctcaaggccaaggtcatttttggagggagaactggacgcctgatcaaatctggcccacaatggactcagcagccaaggatgagatgcagccggcgttgtcccctggctcttccttcccaggacctgagtggccagagcaggagcgggcagagcagctggcccggggtgcagcgctcaagtgggcctcaggcatcttctaccggccggagcagctggccaggctaggccagtaccgcagccgcgaggtgcagcgtacctgctccctggaatcgcgcctcaagtcagtgatgcagtcatacctggaaggcgtgcagactgtgccggctgcagtgtcccacacacagactctgattgatggccaacagttcttggaggcatatgtgagccttcgggagctggagcagctgcgagaggatacgtgggcacccctggggggcctggagttgccagtcttccaggggctggaccttctgttcgaggcactgggccaggctgtggaagcagctgcaggggccgcagggaagctggcacgggaggacccagccctgttggtggctgctgtgcgtgtggcggaggtggagactggacgaacaacccccctgggccaggtcccccgggactggcgtcagcgctgtctgagggcactacaggagggcctggagcaggcccactttgggtcacctctgctgcctgcaccaggggccctaccagggtggctggaggctctgcgagtggccctgccagtcgagttggccacagctgaggcactagtagcgccttgctgcccgccacagtacaacgtggtccagctatgggcccacacgctgcatagtggtttgcgccgcagcctgcagaacctccttgcagggcctgagctagaagctgcggatgccttcgccttgctgcactgggcactgcatgtgtacctggggcaggaaatgatggggagcctggagttggggcctgaggctgatgtgtcccagctggagccccttctgaccttggagaacattgagcagctggaggcaacatttgtggccaacatccagatcctggaagagaacattcgtgtggccagcctggtcagtgagtcactgcaacagcgagtgcatggcatggcactgtcagaactgggcacattcttgaggagcttcagtgatgctctgatccgattctcccgagaccacttcagggggaaatcaatggcccctcattacgtgccctacctactggccgccctcaaccacaagtcagcactcagctcctcagtgtctgtcctgcagctggacggggcgccttcaggggccttggctccagtggaagctgcgctggacgagttgcagaggaggatctaccgcttggtgttggaggcgctgcaggcggagctccagcccctgttcgcggatctgccctcgcgccaatggctgtcgagccctgagctcctgcaaagtgtgtgtgaacggacggggcgcttctgccgggacttctggcgcgtgcggaaccccacggttcagctgctgctggctgaggccgagcgtgccgtggtgctccagtacctgagcgcgctgatgcaaggccgcctggtgtgccgcggagccgacgagaggacccaggcggccgagcgcctgcggcacgatgctgcccagcttcagcagcttttcctcagtttggtgagagcttcttgggcgggcagacgggcgagagtctcagtggctgggtgggagagagggctggcgcgagaccctaccccgacgtgctcagggcctggaggagaacgcgcactgcgcgccggtgctgctcgccctgagggagctgctaaacctccgcgaccccgcgctgctgggcctggaggtggctggcctgcggcaacaatttcccgacgtgagcgaggaccacgtctccgccctcttgggcctgcgcggggacttgtcccgggagcagcacctggccgcgctcagctccctgcaggctgcgctgccgccgtcgccccgcgcgagccgccgcgtcctcttcagcctagtgcccgcgcccgcgctcgcgccggcctcctgcctgccctcggggtcctgcgcccgagccctgctgctcgcagaataaaccacggctgccgg

SEQ ID NO: 131502 - DNA, 1845 bp, Homo sapiens
  Payload ID: 5663
  Gene Symbol: EXOC3L1
  Gene Name: exocyst complex component 3-like 1
  ENST ID: ENST00000564324
  CDS Start-End: 424-666
gctggagtcagctggagttgcccaggccctgtgagcaagtggcaggcgtgcccagctgcattggggagagggctgttctcaaggccaaggtcatttttggagggagaactggacgcctgatcaaatctggtaagttctgtaccaaactgtcctgtgcagctcagagcaggaccagggtccagtggaggcctgtgcccactctgtctcgcttgacatctgcaggggcacgactgggaaacctagcaggcaaagcctcccaggtgccctccgcatcacacccgctccctctcacttcccgagggggccgggaagaacctccttcctcctctcagaagggcttagacagaggcagcagctcacaggggcatctactctgcctgcttgccccgggcccacctcagctctggctcctccaggcccacaatggactcagcagccaaggatgagatgcagccggcgttgtcccctggacctgagtggccagagcaggagcgggcagagcagctggcccggggtgcagcgctcaagtgggcctcaggcatcttctaccggccggagcagctggccaggctaggccagtaccgcagccgcgaggtgcagcgtacctgctccctggaatcgcgcctcaaggcaggaaatgatggggagcctggagttggggcctgaggctgatgtgtcccagctggagccccttctgaccttggagaacattgagcagctggaggcaacatttgtggccaacatccaggcaagtgtgtctcagtggctgcagaatgcactggatggggaggtagctgagtggggccgggagcatgggcccaacacagacccgtctggctcctattactcaccaatgccagccattgtgctgcagatcctggaagagaacattcgtgtggccagcctggtcagtgagtcactgcaacagcgagtgcatggcatggcactgtcagaactgggcacattcttgaggagcttcagtgatgctctgatccgattctcccgagaccacttcagggggaaatcaatggcccctcattacgtgccctacctactggccgccctcaaccacaagtcagcactcagctcctcagtgtctgtcctgcagctggacggggcgccttcaggggccttggctccagtggaagctgcgctggacgagttgcagaggaggatctaccgcttggtgttggaggcgctgcaggcggagctccagcccctgttcgcggatctgccctcgcgccaatggctgtcgagccctgagctcctgcaaagtgtgtgtgaacggacggggcgcttctgccgggacttctggcgcgtgcggaaccccacggttcagctgctgctggctgaggccgagcgtgccgtggtgctccagtacctgagcgcgctgatgcaaggccgcctggtgtgccgcggagccgacgagaggacccaggcggccgagcgcctgcggcacgatgctgcccagcttcagcagcttttcctcagtttgggcctggaggagaacgcgcactgcgcgccggtgctgctcgccctgagggagctgctaaacctccgcgaccccgcgctgctgggcctggaggtggctggcctgcggcaacaatttcccgacgtgagcgaggaccacgtctccgccctcttgggcctgcgcggggacttgtcccgggagcagcacctggccgcgctcagctccctgcaggctgcgctgccgccgtcgccccgcgcgagccgccgcgtcctcttcagcctagtgcccgcgcccgcgctcgcgccggcctcctgcctgccctcggggtcctgcgcccgagccctgctgctcgcagaataaaccacggctgccgg

SEQ ID NO: 131503 - DNA, 803 bp, Homo sapiens
  Payload ID: 5663
  Gene Symbol: EXOC3L1
  Gene Name: exocyst complex component 3-like 1
  ENST ID: ENST00000564418
  CDS Start-End: 260-803
gggagagagacttccttggggagaggaattcagctgcacgctggagtcagctggagttgcccaggccctgtgagcaagtggcaggcgtgcccagctgcattggggagagggctgttctcaaggccaaggtcatttttggagggagaactggacgcctgatcaaatctgaagggcttagacagaggcagcagctcacaggggcatctactctgcctgcttgccccgggcccacctcagctctggctcctccaggcccacaatggactcagcagccaaggatgagatgcagccggcgttgtcccctggacctgagtggccagagcaggagcgggcagagcagctggcccggggtgcagcgctcaagtgggcctcaggcatcttctaccggccggagcagctggccaggctaggccagtaccgcagccgcgaggtgcagcgtacctgctccctggaatcgcgcctcaagtcagtgatgcagtcatacctggaaggcgtgcagactggtgtgtggcagctggcccaggccattgaggtggtgcagggaacccgggaggccctgagccaggcccgtgggttgctccagggcatgtcccaggccttacagactctagagcccctacgggagcgggttgcccagcacaagcaactgcaggccctgtctcacctgctgcctcggctgcgggcagtgccggctgcagtgtcccacacacagactctgattgatggccaacagttcttggaggcatatgtgagccttcgggagctggagcagctgcgagaggatacgtgggcacccctggggg

SEQ ID NO: 131504 - DNA, 1706 bp, Homo sapiens
  Payload ID: 5664
  Gene Symbol: EXOC3L2
  Gene Name: exocyst complex component 3-like 2
  Uniprot ID: Q2M3D2
  ENST ID: ENST00000252482
  CDS Start-End: 29-1258
ccccagagaggtcctagggctggtggacatggccgccctggagaatggggagctggggccccttctctcccctggcaccctgcggggtttggaggatgaatgcgtcacagatgttaaggctcagacccgggctgcccttctccgtgtgctgcaggaggacgaagagcactgggggagcctggaggaccagcccagcagcctggcccaggatgtgtgtgagctgctggaagagcacacagagcgagcaccccgcatcagccaggagtttggggagcggatggcccactgctgcctaggcgggctggcagagttcctgcagagcttccagcagcgtgtggagcgattccatgagaacccagcagtccgggagatgctacctgacacctatatcagcaagaccatcgccctggtcaactgcggccccccactgagagctctggccgagcgcctggcccgggtggggcccccagaaagcgagccggcccgggaagcatctgctagtgctctggaccatgtgacccggctctgccaccgtgtcgtggccaacctgctgttccaggagctgcagccacacttcaacaagctgatgcgccggaagtggctgagcagcccggaggccctggatggcatcgtgggcacgctgggtgcccaggccctggccctgcgcagaatgcaggacgagccttaccaggcgctggtagccgagctacaccggcgggcgctggtcgagtacgtgcggcccctgctccgtgggcgcctgcgctgcagctcggcgcggacccgcagccgcgtggccggcaggctccgggaggacgcggcgcaactgcagaggctgttccggcggctggagtcccaggcctcgtggctggatgccgtggtgccccatttggctgaagtcatgcagctggaagacacgcccagcatccaggtggaggtgggagtgttggtgcgcgactacccagacatcaggcagaagcacgtggcagccctcctcgacatccgtggcctgcgcaacacagccgcccgccaggagatcctggccgtggcccgggacctggaactctctgaggagggagccctgtcaccccctcgggaccgtgccttctttgcagacatccctgtgccccgcccatctttctgtctcagcctccctctcttcctgggccgcctccccctctcccggctggccaggcccagtttggcctgtctgcctcggccccggcctccgtctctagcgcgacctcgggcccagcgctgagggtcacccaaccgccggccttagtgaccccatctatgctgctgacaagccaacctcccgtacggcgcccctcctgactccctgcctgggaccacacacccctgggatagaaagacccttagatgtcttttcacccaaccccaaactccctgtacagaagggaaacaaacgccaggcacggtggctcatgcctgtaatcccaacactttgggaggctgaggccggaggattgcttgagcccaggagttcaagaccagcctgggcaacatagtgagacctgccccctatctctacaaaaaataaaaaattagctgggcacggtggtgtgtgcctgtagtcccagctactggtgaggctgaggctggaggatcactggagttcgaggctgcagtgagctatgactgtgccactgcactccagcctggtcaacaaagcaagaccctttctc

SEQ ID NO: 131505 - DNA, 1719 bp, Homo sapiens
  Payload ID: 5664
  Gene Symbol: EXOC3L2
  Gene Name: exocyst complex component 3-like 2
  Uniprot ID: Q2M3D2
  ENST ID: ENST00000413988
  CDS Start-End: 42-1271
acaatcaggtctaccccagagaggtcctagggctggtggacatggccgccctggagaatggggagctggggccccttctctcccctggcaccctgcggggtttggaggatgaatgcgtcacagatgttaaggctcagacccgggctgcccttctccgtgtgctgcaggaggacgaagagcactgggggagcctggaggaccagcccagcagcctggcccaggatgtgtgtgagctgctggaagagcacacagagcgagcaccccgcatcagccaggagtttggggagcggatggcccactgctgcctaggcgggctggcagagttcctgcagagcttccagcagcgtgtggagcgattccatgagaacccagcagtccgggagatgctacctgacacctatatcagcaagaccatcgccctggtcaactgcggccccccactgagagctctggccgagcgcctggcccgggtggggcccccagaaagcgagccggcccgggaagcatctgctagtgctctggaccatgtgacccggctctgccaccgtgtcgtggccaacctgctgttccaggagctgcagccacacttcaacaagctgatgcgccggaagtggctgagcagcccggaggccctggatggcatcgtgggcacgctgggtgcccaggccctggccctgcgcagaatgcaggacgagccttaccaggcgctggtagccgagctacaccggcgggcgctggtcgagtacgtgcggcccctgctccgtgggcgcctgcgctgcagctcggcgcggacccgcagccgcgtggccggcaggctccgggaggacgcggcgcaactgcagaggctgttccggcggctggagtcccaggcctcgtggctggatgccgtggtgccccatttggctgaagtcatgcagctggaagacacgcccagcatccaggtggaggtgggagtgttggtgcgcgactacccagacatcaggcagaagcacgtggcagccctcctcgacatccgtggcctgcgcaacacagccgcccgccaggagatcctggccgtggcccgggacctggaactctctgaggagggagccctgtcaccccctcgggaccgtgccttctttgcagacatccctgtgccccgcccatctttctgtctcagcctccctctcttcctgggccgcctccccctctcccggctggccaggcccagtttggcctgtctgcctcggccccggcctccgtctctagcgcgacctcgggcccagcgctgagggtcacccaaccgccggccttagtgaccccatctatgctgctgacaagccaacctcccgtacggcgcccctcctgactccctgcctgggaccacacacccctgggatagaaagacccttagatgtcttttcacccaaccccaaactccctgtacagaagggaaacaaacgccaggcacggtggctcatgcctgtaatcccaacactttgggaggctgaggccggaggattgcttgagcccaggagttcaagaccagcctgggcaacatagtgagacctgccccctatctctacaaaaaataaaaaattagctgggcacggtggtgtgtgcctgtagtcccagctactggtgaggctgaggctggaggatcactggagttcgaggctgcagtgagctatgactgtgccactgcactccagcctggtcaacaaagcaagaccctttctc

SEQ ID NO: 131506 - DNA, 2293 bp, Homo sapiens
  Payload ID: 5665
  Gene Symbol: EXOC3L4
  Gene Name: exocyst complex component 3-like 4
  Uniprot ID: Q17RC7
  ENST ID: ENST00000380069
  CDS Start-End: 77-2245
cccacagggccacaacaggtttctgcatctgctcctatggccactccttcttgcccccagctctcctgctgccaagatgccatcaccacagacagacactcctgggccggagctgcagagtcccaaggaggctgaggagccacagactccagctcagggctcccggcgaacaagcagcaggaaagagcccaatgcccaccgcaaggatggcacaaggctgggcctgggctccctgaggcaggccttctcccgggccagccagcgggctttgacccaggtctccaaggaagatacgggcctgttccggcgaagctcctgctccctgttccggtccttccggcaagccctgaatgacggcccagctaccggccattcccaggccactcctgaggtgccctcgggggtcatgaatggtgtcagccagcaggcatccactggggcagcgtctgaggaactgaaacccgaggcagaaggcaaatccgtggccgacctcattactgaacggcaactgctggcggccttcgaacagcttctgcgcctggagacgctgctggtggccgagaaggcctcgcgcacctttgagcaggaccctacggccttcgcgcggcgcgctatggacgtgtgcctgctttacgacgggctggcagccgagatcggcgccatcgtgcgcgagacgctggacagcgacggtgtggacgcggccgcgctggccgagctggcccgcgtggtgagcgcggaggaggaagcccacccttctccccccgacgacggcgacttcctgcgcacgccgcgccgctggcgccagcactgggaggaggcggtgcggcgaagcgctcaggagcgcgtgcggcggccgggcgcggggtgggccttcggggaggcggagggcgcgtcgggtttggcccagcttctggccgagctgggtggcttggttcgccgcgacctgcagaaggtgcggcaggaggtgcagcccgcgtatgcggcggccggcttcccagcgtgggaggtctatctgcgtgccttccacagcgccgtggcccagcgcctccaggagctcgcgcgcgacgcccgcggctgcgagcagctctatatcctgctggactgggccgccaacgtctacggcagtcctgacttcctgggcgccccggggctggcgctgcccgccgagccgctgcctccgctcctggcgccggacgtgtgggcccgactggagagcgactacaccagcttcctggaggccaagatcgcaagctgcttcgacagcatcttgcagctggagcagagtcactgggcggccgccgaggtccccgaggtgctgcagggcctctaccaggcgccgctgtccatggacgtccatatgctcgtggccgagcacgtgaaggcggccggcgccatctccgcggagctggaggccaccaccctgcgaatctgcacgcgggcgctcggcctcttcgtgcccaggtttgaaaaggcttttctggcgtcggaggcggtgagcgagccgcacctgggcgcctacatcaacgcctgcgaggagctcaggaccagtcttctctccaggttcccaggaacccaagaggagctggagaagcccctggtgacggccacctgcagcttccagaagcacttgcttcagggcttgcagcgtgagttgcagccgctcttcagggttgtgtgcaccagggactggctgacgcaggactggctgcatcccctcatggacaaggtggtgaccttcgccggtcatctccagcgtgtggcccggccgcgggcacaggagactctgcaggaggtgcaccggttcgtggtccgcgagtacctggcgcgggcgctgaggccacgggagcggttccggggcatggagcgcatgcatggctcccagaagatgagcctggatgcccaggccatcagcgacaccttccagggcctgggttccgaggccacatggttggaccaagccatccagtgcgtggctgagatcctgggcgagacctacaaagatgacatccagcggcacctggagactcttatccggagctaccccgacatcaggcgggaccacatactggccattctggcgctgcgccgactgggccgccagcggaaccagcatctcttgcagcacactcaagacctgctgagagctgcggccggggcggcgggtgcggaggcccctcggggccgcgtgctcttcgaggagatcaaggtgcccagtgccatggctgtgctgatcacctgcgtctagttctctctggctcgagggggggccggccgctggcagggagctgtggtc

SEQ ID NO: 131507 - DNA, 657 bp, Homo sapiens
  Payload ID: 5665
  Gene Symbol: EXOC3L4
  Gene Name: exocyst complex component 3-like 4
  ENST ID: ENST00000560304
  CDS Start-End: 1-637
ccagcgtgtggcccggccgcgggcacaggagactctgcaggaggtgcaccggttcgtggtccgcgagtacctggcgcgggcgctgaggccacgggagcggttccggggcatggagcgcatgcatggctcccagaagatgagcctggatgcccaggccatcagcgacaccttccagggcctgggttccgaggccacatggttggaccaagccatccagtgcgtggctgagatcctgggcgagacctacaaagatgacatccagcggcacctggagactcttatccggagctaccccgacatcaggcgggaccacatactggccattctggcgctgcgccgactgggccgccagcggaaccagcatctcttgcagcacactcaagacctgctgagagctgcggccggggcggcgggtgcggaggcccctcggggccgcgtgctcttcgaggagatcaagccaagcgcagctgtcaggccagaaggagcagccgtgcaggaggcatttcaggcatcgttgaggggagtgttttggggccgcagagctctcaatgctgcctatcgggcgggggggggcctcccgcccgactgtccagcttcaccctccagtctgaaagtgaagagcagagtatttatttaaaaaataaatgtgaattaaaa

SEQ ID NO: 131508 - DNA, 460 bp, Homo sapiens
  Payload ID: 5665
  Gene Symbol: EXOC3L4
  Gene Name: exocyst complex component 3-like 4
  ENST ID: ENST00000559116
  CDS Start-End: 1-460
gagcccaatgcccaccgcaaggatggcacaaggctgggcctgggctccctgaggcaggccttctcccgggccagccagcgggctttgacccaggtctccaaggaagatacgggcctgttccggcgaagctcctgctccctgttccggtccttccggcaagccctgaatgacggcccagctaccggccattcccaggccactcctgaggtgccctcgggggtcatgaatggtgtcagccagcaggcatccactggggcagcgtctgaggaactgaaacccgaggcagtcctgacttcctgggcgccccggggctggcgctgcccgccgagccgctgcctccgctcctggcgccggacgtgtgggcccgactggagagcgactacaccagcttcctggaggccaagatcgcaagctgcttcgacagcatcttgcagctggagcagagtcactgggcggccgc

SEQ ID NO: 131509 - DNA, 665 bp, Homo sapiens
  Payload ID: 5665
  Gene Symbol: EXOC3L4
  Gene Name: exocyst complex component 3-like 4
  ENST ID: ENST00000559661
  CDS Start-End: 1-46
gggcctctaccaggcgccgctgtccatggacgtccatatggtttgaaaaggcttttctggcgtcggaggcggtgagcgagccgcacctgggcgcctacatcaacgcctgcgaggagctcaggaccagtcttctctccaggttcccaggaacccaagaggagctggagaagcccctggtgacggccacctgcagcttccagaagcacttgcttcagggcttgcagcgtgagttgcagccgctcttcagggttgtgtgcaccagggactggctgacgcaggactggctgcatcccctcatggacaaggtggtgaccttcgccggtcatctccagcgtgtggcccggccgcgggcacaggagactctgcaggaggtgcaccggttcgtggtccgcgagtacctggcgcgggcgctgaggccacgggagcggttccggggcatggagcgcatgcatggctcccagaagatgagcctggatgcccaggccatcagcgacaccttccagggcctgggttccgaggccacatggttggaccaagccatccagtgcgtggctgagatcctgggcgagacctacaaagatgacatccagcggcacctggagactcttatccggagctaccccgacatcaggcgggaccacatactggccattctggcgctgcgc

SEQ ID NO: 131510 - DNA, 4185 bp, Homo sapiens
  Payload ID: 5666
  Gene Symbol: EXOC4
  Gene Name: exocyst complex component 4
  Uniprot ID: Q96A65
  ENST ID: ENST00000253861
  CDS Start-End: 30-2954
ggagcctagcggctctccccgcgtccaagatggcggcagaagcagctggtgggaaatacagaagcacagtcagcaaaagcaaagacccctcggggctgctcatctctgtgatcaggactctgtctactagtgacgatgtcgaagacagggaaaatgaaaagggtcgccttgaagaagcctacgagaaatgtgaccgtgacctggatgaattgattgtacagcactacacagaattgacgacagccattcgcacataccagagcatcacagagcgcatcactaactcccgaaataaaataaagcaggtaaaagagaacctgctttcatgcaagatgctgctgcactgcaaacgggatgagcttcggaaactgtggattgaaggaattgagcataagcatgtcctgaacttgttggatgaaattgagaatatcaagcaagtgcctcaaaagctggaacagtgcatggccagcaagcactatctcagtgccactgacatgttggtgtcagcagttgagtctttggagggccccctgctccaggtggaaggactgagtgaccttcgactagagcttcacagcaagaagatgaaccttcacttggttctcatagatgaactacaccggcacctgtacatcaaatcgactagccgagttgtgcagcgtaacaaggaaaaagggaaaatcagctccctcgtgaaagatgcttctgttcctctgattgatgttacaaacctccctactcctcgaaaattccttgatacctctcactattctactgctggaagctcaagtgtgagggagataaatctgcaggacatcaaggaagatttagaattggatccagaggaaaacagcaccctgtttatgggtatcctcattaagggcttggcgaaactgaagaagatcccagaaacagttaaggcaatcatagagcgcttggagcaggagttgaagcaaattgtgaagaggtctacaacccaggtggcagacagtggctatcagcggggggagaacgttactgtggagaaccaaccaaggttgcttctagaactgctggagttactgtttgacaagtttaatgctgtagccgctgcacactctgtggtcctgggatacctgcaggacactgtagtgactccactgactcagcaggaagatatcaaactgtatgatatggcagatgtatgggtgaagatccaagatgttctacagatgctattaactgagtacttggatatgaaaaatactcgtacggcctctgaaccatcagctcaactaagctatgccagcactggacgagagtttgcagccttttttgccaagaagaaacctcaaaggccaaaaaattctcttttcaagttcgaatcgtcctcccatgccatcagtatgagcgcctatctgcgagaacagagaagggagctctatagtcggagtggagaactgcaagggggtcctgatgacaacttaattgaaggtggaggaacaaaatttgtctgcaaacctggagccagaaacattaccgtcatattccacccattactaagatttattcaggagattgagcatgctctgggtcttggcccagccaaacagtgtcctcttcgagagtttctcaccgtgtacatcaaaaacatctttctcaatcaagtcttggctgagatcaacaaggagattgaaggagtcactaaaacatctgaccctttgaagattctggccaacgcagacaccatgaaggtgctgggagtgcagcggcctctcctacagagcacaatcattgtggagaagacagttcaagacctcctgaacctgatgcatgacttgagtgcatattcagatcaattcctcaacatggtgtgcgtgaagctccaggagtacaaggacacctgcactgcagcttacaggggtattgtccagtcagaagaaaaacttgtcatcagtgcatcctgggcaaaagatgatgatatcagcagactcttgaaatctctaccaaactggatgaatatggctcaacccaaacagctgaggccaaaaagagaggaggaagaagatttcataagggcagcttttggcaaggagtctgaagttcttattgggaacctgggtgataaattaatccctccacaagacatccttcgtgacgtcagtgacctcaaagccttggccaacatgcatgaaagcctggaatggttggcaagtcgaacaaagtcagctttctccaatctttctacatcccagatgctttctcctgctcaagacagccacacgaacacggatctccccccagtgtcagagcagatcatgcagactctcagtgaacttgccaaatcgttccaggatatggctgaccgctgcttgcttgtcttacatctggaagtgagggttcactgtttccactatcttatccctcttgcaaaggaggggaactatgccattgtggctaatgtggaaagtatggattatgaccccctggtggtcaagctcaacaaagatatcagcgccattgaagaggccatgagcgccagccttcagcagcacaagttccagtatatcttcgaaggcctgggccacctgatctcctgcatcctcattaatggtgcccagtacttcaggcgcatcagtgagtctggcatcaagaaaatgtgtaggaacatttttgttcttcagcagaatttgaccaacatcaccatgtcgcgggaggcagacctggactttgcaaggcagtactacgagatgctttacaacacagctgacgagctcctgaacctggtggtggaccagggtgtgaagtacacggagctggagtacatccacgctctgaccctgctgcaccgcagccagactggggtgggggaactgaccacccagaacacgaggctgcagaggctcaaagagatcatctgcgagcaggctgccatcaagcaagccaccaaggacaagaagataactaccgtttagcagggcgtactgcggttggtgacgggggtcccctcagtcacactcacttttttccttggtatgttattgagtatattctgagcttagttttctctacagtgatactttagtggagaggaggtgtaaggattctttctctctggttttggcttttcatataaatgctaaaggaaggcgacagtacagagtgttttggttgaacaactactttaatgcagtcaaatctaacgggactagggtgggatagggaggaaggtggtatcaaattgttggactctgaaaaacaagtggatggattactaatatttgatttattactcaatatatatataattccagccttggaaagtaggaaagtaggctgctacctaacttttagtcccttccaaaaccatttagtagggttctattacataaacagtagggtttttcctctcctgaccttatccgtttacagttcaatgaaataagtgtatgtgcattgctgtctgtctctattgccaaaatcaaataaatggcttctcagctgctgtttacaacaaacttccctaaccaaaacagaacctctaatttagggctaggaatagaagtcttttgatcccagtccctgggacagttttgtatgctgtatcttgtacacaggttgtaggttggtttattgccattttgttttatttctgctgtataaaaaccaagagccagacaattagacaactatggaggaatgaaaggcaattcaaacatctgcttgattcccgccccgccacccctaatttctgagagaataatggttagagaacattgcatctcacttgaaacatcctttgggggtaaatgattcttaggtgctcacttggtctgagctcagctgaatgcagggaagatgggacagagtgacatttctcctctgtgcggcctccagctgagcctgtctctgaattgttccctcccccgcaatgtgggcacttaccatgttcctggcacactggacctcaccatgtcccccggtcaccagtcctcttgctgcccatggttcataggtcatagaaggcagcaatgcactgactgggccacatcttgaaaactcgtggaaagggaaaggggaggagatgggactttgaccacacacagtgatgcctcacaccctgaaggtgggggattttgtacctgtttgtacaactttggtcttgatgggaaaaatggagaattaaaaagtgttttgagaagctta

SEQ ID NO: 131511 - DNA, 1604 bp, Homo sapiens
  Payload ID: 5666
  Gene Symbol: EXOC4
  Gene Name: exocyst complex component 4
  Uniprot ID: Q96A65
  ENST ID: ENST00000393161
  CDS Start-End: 30-1451
ggagcctagcggctctccccgcgtccaagatggcggcagaagcagctggtgggaaatacagaagcacagtcagcaaaagcaaagacccctcggggctgctcatctctgtgatcaggactctgtctactagtgacgatgtcgaagacagggaaaatgaaaagggtcgccttgaagaagcctacgagaaatgtgaccgtgacctggatgaattgattgtacagcactacacagaattgacgacagccattcgcacataccagagcatcacagagcgcatcactaactcccgaaataaaataaagcaggtaaaagagaacctgctttcatgcaagatgctgctgcactgcaaacgggatgagcttcggaaactgtggattgaaggaattgagcataagcatgtcctgaacttgttggatgaaattgagaatatcaagcaagtgcctcaaaagctggaacagtgcatggccagcaagcactatctcagtgccactgacatgttggtgtcagcagttgagtctttggagggccccctgctccaggtggaaggactgagtgaccttcgactagagcttcacagcaagaagatgaaccttcacttggttctcatagatgaactacaccggcacctgtacatcaaatcgactagccgagttgtgcagcgtaacaaggaaaaagggaaaatcagctccctcgtgaaagatgcttctgttcctctgattgatgttacaaacctccctactcctcgaaaattccttgatacctctcactattctactgctggaagctcaagtgtgagggagataaatctgcaggacatcaaggaagatttagaattggatccagaggaaaacagcaccctgtttatgggtatcctcattaagggcttggcgaaactgaagaagatcccagaaacagttaaggcaatcatagagcgcttggagcaggagttgaagcaaattgtgaagaggtctacaacccaggtggcagacagtggctatcagcggggggagaacgttactgtggagaaccaaccaaggttgcttctagaactgctggagttactgtttgacaagtttaatgctgtagccgctgcacactctgtggtcctgggatacctgcaggacactgtagtgactccactgactcagcaggaagatatcaaactgtatgatatggcagatgtatgggtgaagatccaagatgttctacagatgctattaactgagtacttggatatgaaaaatactcgtacggcctctgaaccatcagctcaactaagctatgccagcactggacgagagtttgcagccttttttgccaagaagaaacctcaaaggccaaaaaattctcttttcaagttcgaatcgtcctcccatgccatcagtatgagcgcctatctgcgagaacagagaagggagctctatagtcggagtggagaactgcaagggtagcggcgaagaaatccaccagaaagacaatcaaagtaacattaaaaagctcaaattttacaaaagttaagttcctgccaacattttcaatttatcatacaattagaaatgtgactcagtctaacaacacccaagaggataaaaggattaaaaaaa

SEQ ID NO: 131512 - DNA, 2632 bp, Homo sapiens
  Payload ID: 5667
  Gene Symbol: EXOC5
  Gene Name: exocyst complex component 5
  ENST ID: ENST00000340918
  CDS Start-End: 252-2183
acttccggcgtatgaggcggtgacaatgggagcagcgcgggcggcgccgggaggcagctgacaagcgtttgcggcttcgcttcatggccgctctcccgcccctcctgggatctgtggggagctggggagcccgcagcggcccggagccggagctggcgagccgagcggagacctgtgcgccgcgcctctgaggcgcagcatgtgaagcggagacggcatccagtggggggcgagcctctcagccggccgggatggctaccacggccgagctcttcgaggagccttttgtggcagatgaatatattgaacgtcttgtatggagaaccccaggaggaggctctagaggtggacctgaagcttttgatcctaaaagattattagaagaatttgtaaatcatattcaggaactccagataatggatgaaaggattcagaggaaagtagagaaactagagcaacaatgtcagaaagaagccaaggaatttgccaagaaggtacaagagctgcagaaaagcaatcagataaaggaagcagcagacatcattcagaagttgcacctaattgcccaagagttaccttttgatagattttcagaagttaaatccaaaattgcaagtaaataccatgatttagaatgccagctgattcaggagtttaccagtgctcaaagaagaggtgaaatctccagaatgagagaagtagcagcagttttacttcattttaagggttattcccattgtgttgatgtttatataaagcagtgccaggagggtgcttatttgagaaatgatatatttgaagacgctggaatactctgtcaaagagtgaacaaacaagttggagatatcttcagtaatccagaaacagtcctggctaaacttattcaaaatgtatttgaaatcaaactacagagttttgtgaaagagcagttagaagaatgtaggaagtccgatgcagagcaatatctcaaaaatctctatgatctgtatacaagaaccaccaatctttccagcaagctgatggagtttaatttaggtactgataaacagactttcttgtctaagcttatcaaatccattttcatttcctatttggagaactatattgaggtggagactggatatttgaaaagcagaagtgctatgatcctacagcgctattatgattcgaaaaaccatcaaaagagatccattggcacaggaggtattcaagatttgaaggaaagaattagacagcgtaccaacttaccacttgggccaagtatcgatactcatggggagacttttctatcccaagaagtggtggttaatcttttacaagaaaccaaacaagcctttgaaagatgtcataggctctctgatccttctgacttaccaaggaatgccttcagaatttttaccattcttgtggaatttttatgtattgagcatattgattatgctttggaaacaggacttgctggaattccctcttcagattctaggaatgcaaatctttattttttggacgttgtgcaacaggccaatactatttttcatctttttgacaaacagtttaatgatcaccttatgccactaataagctcttctcctaagttatctgaatgccttcagaagaaaaaagaaataattgaacaaatggagatgaaattggatactggcattgataggacattaaattgtatgattggacagatgaagcatattttggctgcagaacagaagaaaacagattttaagccagaagatgaaaacaatgttttgattcaatatactaatgcctgtgtaaaagtctgtgcttacgtaagaaaacaagtggagaagattaaaaattccatggatgggaagaatgtggatacagttttgatggaacttggagtacgttttcatcgacttatctatgagcatcttcaacaatattcctacagttgtatgggtggcatgttggccatttgtgatgtagccgaatataggaagtgtgccaaagacttcaagattccaatggtattacatctttttgatactctgcatgctctttgcaatcttctggtagttgccccagataatttaaagcaagtctgctcaggagaacaacttgctaatctggacaagaatatacttcactccttcgtacaacttcgtgctgattatagatctgcccgccttgctcgacacttcagctgagattgaatttacaaaggaattcagtgtcagttcctttacagaggaatgtcttatacttcagcagccctcggttgatagaaagcacaggagataccttatgacacagccaacattttgtgaaacaatgactggaacaaaacagcagccatacttacctttgaggttttatttaaagtttggataccactagctatattttgcttttttcccctcacattgaattttaattccattcttgaatgtagaaatttcagattctctaaaactacatgtcactgtttttatcctagaaaatgttgctgtcagaaggcaaaggaaatgttaccagtgttttcggttcttgtacttttaacatattccatttagaaattttgccattctgttttccattaataataggtgaaatacaggaaaactacatttgttattcctcagtttttaatgacctt

SEQ ID NO: 131513 - DNA, 8513 bp, Homo sapiens
  Payload ID: 5667
  Gene Symbol: EXOC5
  Gene Name: exocyst complex component 5
  ENST ID: ENST00000413566
  CDS Start-End: 252-2387
acttccggcgtatgaggcggtgacaatgggagcagcgcgggcggcgccgggaggcagctgacaagcgtttgcggcttcgcttcatggccgctctcccgcccctcctgggatctgtggggagctggggagcccgcagcggcccggagccggagctggcgagccgagcggagacctgtgcgccgcgcctctgaggcgcagcatgtgaagcggagacggcatccagtggggggcgagcctctcagccggccgggatggctaccacggccgagctcttcgaggagccttttgtggcagatgaatatattgaacgtcttgtatggagaaccccaggaggaggctctagaggtggacctgaagcttttgatcctaaaagattattagaagaatttgtaaatcatattcaggaactccagataatggatgaaaggattcagaggaaagtagagaaactagagcaacaatgtcagaaagaagccaaggaatttgccaagaaggtacaagagctgcagaaaagcaatcaggttgccttccaacatttccaagaactagatgagcacattagctatgtagcaactaaagtctgtcaccttggagaccagttagagggggtaaacacacccagacaacgggcagtggaggctcagaaattgatgaaatactttaatgagtttctagatggagaattgaaatctgatgtttttacaaattctgaaaagataaaggaagcagcagacatcattcagaagttgcacctaattgcccaagagttaccttttgataggcaaagcaaagttaaatccaaaattgcaagtaaataccatgatttagaatgccagctgattcaggagtttaccagtgctcaaagaagaggtgaaatctccagaatgagagaagtagcagcagttttacttcattttaagggttattcccattgtgttgatgtttatataaagcagtgccaggagggtgcttatttgagaaatgatatatttgaagacgctggaatactctgtcaaagagtgaacaaacaagttggagatatcttcagtaatccagaaacagtcctggctaaacttattcaaaatgtatttgaaatcaaactacagagttttgtgaaagagcagttagaagaatgtaggaagtccgatgcagagcaatatctcaaaaatctctatgatctgtatacaagaaccaccaatctttccagcaagctgatggagtttaatttaggtactgataaacagactttcttgtctaagcttatcaaatccattttcatttcctatttggagaactatattgaggtggagactggatatttgaaaagcagaagtgctatgatcctacagcgctattatgattcgaaaaaccatcaaaagagatccattggcacaggaggtattcaagatttgaaggaaagaattagacagcgtaccaacttaccacttgggccaagtatcgatactcatggggagacttttctatcccaagaagtggtggttaatcttttacaagaaaccaaacaagcctttgaaagatgtcataggctctctgatccttctgacttaccaaggaatgccttcagaatttttaccattcttgtggaatttttatgtattgagcatattgattatgctttggaaacaggacttgctggaattccctcttcagattctaggaatgcaaatctttattttttggacgttgtgcaacaggccaatactatttttcatctttttgacaaacagtttaatgatcaccttatgccactaataagctcttctcctaagttatctgaatgccttcagaagaaaaaagaaataattgaacaaatggagatgaaattggatactggcattgataggcaaacggggacattaaattgtatgattggacagatgaagcatattttggctgcagaacagaagaaaacagattttaagccagaagatgaaaacaatgttttgattcaatatactaatgcctgtgtaaaagtctgtgcttacgtaagaaaacaagtggagaagattaaaaattccatggatgggaagaatgtggatacagttttgatggaacttggagtacgttttcatcgacttatctatgagcatcttcaacaatattcctacagttgtatgggtggcatgttggccatttgtgatgtagccgaatataggaagtgtgccaaagacttcaagattccaatggtattacatctttttgatactctgcatgctctttgcaatcttctggtagttgccccagataatttaaagcaagtctgctcaggagaacaacttgctaatctggacaagaatatacttcactccttcgtacaacttcgtgctgattatagatctgcccgccttgctcgacacttcagctgagattgaatttacaaaggaattcagtgtcagttcctttacagaggaatgtcttatacttcagcagccctcggttgatagaaagcacaggagataccttatgacacagccaacattttgtgaaacaatgactggaacaaaacagcagccatacttacctttgaggttttatttaaagtttggataccactagctatattttgcttttttcccctcacattgaattttaattccattcttgaatgtagaaatttcagattctctaaaactacatgtcactgtttttatcctagaaaatgttgctgtcagaaggcaaaggaaatgttaccagtgttttcggttcttgtacttttaacatattccatttagaaattttgccattctgttttccattaataataggtgaaatacaggaaaactacatttgttattcctcagtttttaatgaccttttcagcatcaattgttaatcagattattttaggttttcgtaaataatttttttgcctctttcaaaaggttaacaattaagcatactttctgcagttggttgattggatttttttctgaggtacagcattaatactagtccaaaaaatgtcataaactgaactaaaatgatgaactattttatgtagacattaggagtggatcggaatacttctgctttctgggtaaaacttaaaagtttactatttcttatttggtaaatagattttaagccaattctagtaagaaattaataaaactaccttattttgtatttcacttaaggtggaggaccttaactaaaggaccatatttattcattattttaatattataagggaagtaaaaaaaagtgaggtatagtctaaatggtgcatataggaaatactgacagtgtttagcaacatgcagccctttgagatttctgtcgtaatgctaaacttgaataagatggaatggctgaacatgtggttagtcttttattttaagaagaattgagaattgatagatttggagatgagctttgcaaaggctgtttgcttttcatgtctataggtctgtcattgtcctttttcaaagcatttctgaagttattcctacttggatatagttaatggaattggcttaatttgatgacataataaatcacttataaaattttaaatatcaagtgaaaatttagaaaggccattactattctataaaccttataaacttgctctgggagaatgcattctaaattatatatagtgtttcagctcccattgtggtgttcatagtcttctaggaacagataaacttaagtattcaattcactcttggcattttttctttaatataggctttttagcctatttttggaaaactgcttttcttctgagaaccttattctgaatgtcatcaactttaccaaaccttctaagtccagagctaacttagtactgtttaagttactattgactgaattttcttcattttctgtttagtccagtgttaccaaggtaagctggggaatgaagtataccaacttctttcagagcattttaggacattatggcagctttagaaggctgtcttgtttctagccaagggagagccagcgcaggttttggatactagagaaagtcatttgcttgtactattgccattttagaaagctctgatgtgaattcaaattttacctctgttacttaaagccaacaattttaaggcagtagttttactggccatttaagctctttgtacagtgtcaatttgtaaaaaagaaaaaacgaaaaaaaatctcaaataaaacatgagataacattttaagacttccaaatcagagaagtgcttcaaattattttgtttggattaatttttaaaatgtaaagcatatacttgttgcttagttattttgtttattattttcatgtttgagttctgtgcaatattttctattatgtccgttgataggacagtgacaaaattcgtaagtgaatacttaatttaaaagtgttaacattaatgctcaataaacaaattccctgcagttgttttttttatttcactctttttatattttagagccatccatcctgaattttataaatgattttttatttaaaaatttgagatttttaaaatttttcacagcacaggtcttctcattttcttttttagcaaaaaatacttgactatataaacaagactagaaatttatcctaaacagatggtctttctctgagggaaaaaaaaaaatgtgtcatgtgaggcaatatgcattctttgtattctgattttttaagtgttttcatatttatagccatcacaaaattttgcccaaagtgtatggctcagaagagatgatcaataactaaaatgtttttcgttttgcacatggtaaaattttaggtagagagtggagctttgtataattggtaactttaaccaacatttacgtaagtacggtctttgcagtattacacaataccgcatgagctaatatgcagtatttaggtaatgcattgaatgaagttgaaaatatgctcttaacacactgtgcattgtttttctaaaattgagaaatatctgaaatacagaatacgaatttaataaaggaagcctaccttatgtaaattatgatgttgaaaatgacagtcaaccagagtagatgaagtgtccttatgaagaattattaaatagtagctggatggatctttagatggatgaccacctgaccattccaggacaatttttggtcccattttgaggattgccatagttgcaagtccttaggatcttccttgttttaaaaaactatcaaagtaggttaaattaaaatctaatttaaattaggttaatttatattacattgtagatcattcttttttcccccctctttcacttctaaatattttgctttctaaatactagccttctggttcacagtgaaataatttaattatcaatcagtagattgattccaagtggagaattcactgcttccctaaaatgcgtttttcttacctgtaatggtgaatatttacaaggatctggataaagagattttgatttttgaaatgccacaaaaccccttaaagtggtcaagtacctaaggtagtggctaaggcatgcttgaactgtgtttgagagacagcagttcagtcagtacataatttgttggtgactaacaaagctcacatctgggagattaactttttttaacgcaaaaatattctgcacattacccatatattgttgaattttacatacaaagcattttgtgctttcattcaattagtttaactatattcagtttctgtattatttctctctgatctatcctgtaattattctatactttagaagaaaagatcagttcatattgttagactgaataattctacatgaagttaaaagttagcaatttaaaaaattttgctgcataataaagataattatagttacatgtattgatttaagtctcacacactgtgctaataagtcctttgcacatattattggattctagagcaaccctaggatttgggtactattatttccatttgacagatgaaaaacctaatgcatagaaagataagtagaccagtcaaggtctacagctagtaaaatgctcagattgaaacctaaatcttttctcactcacttttaggttctatatgctattctccttacgtaacgttaaatagatcctttagtttgataggttcattagttttgcttaatcgttgcttccaatatgattcttattgtagtatttatattacaaagttggcatacagggtcaatatctaatttactgttgtgtttttcttaatatgttcaatgtatggtcatactttttaaatttgattttttaaatattataagtggtcatgaaattttaatgttaagtttgtacctaatagaaatatgtctatcacaaatctttattggtattattttatatacttttccagcttgataattttcacaatagaaagagaccaaatattttgtactatattttgtgacatagaagtaaatgacaactctaccttggaagatatgaagaaatcagtgtttttatgttcaaaaactattttaaatgtcataggcttgccaattgtgttaactatttagtacattggtagtttttaaatgactaatgctggagtgaaaatgtaaggcaaaatatttagtatattaacagtagatagtcattttcatgtaatcagaattgcatgttaagggttttaaaagctgtcataactcttaccttttatttctaccagtgatcaatcatttctctttacaaatttagggaggaaacaactgttcaaatgtataggggacagaaacctgacatttagagaacagaaattttaattgccaaattaaagcagctaggctgcccctgggcttaacaaaattcctatttttgaactagacccgaggtattttatcattattatttgataggtaccattaacctttgttttgtgattatcgacttttggggggaaagatgagtaattaaacacactcgcccattttctaagtggtttagaaggttgcagtctgcctcaccatacaaagccagtttaaataggaatatatcacatcatacttcacatagcagtcaacctcagaggaaagtcatttattcagaaggcatagattttgctagacagcagtgatgcattacaaatatataattatttgcactaatatttgagcaggtggaatggattagaacatggtcaacatcatgctgctgataacatgtatttttctatattaatatgtactgtgcaacatgtattaaaattgtcaataattcattttagccaagatactaatatttatattactgtgtttaagagacagtatccaactgagccacttttaatttaaaagtctgaaactggaattaagtttactttcaaaaatcacttaaattactttataatcagtgaaaggtcagtaaaatgtagaattataagtgcctagtgacttaataggaggaaatatggagggttaaggaaggaagtaggaacctggaataagaaagctaagtttcatttatagttccaatgagtgactttctttgttttcaccactgggaatcttaaatgaagaaagtgtcgtatcccttccagttatctttatgttaataaactaagtgaagtttggatagaactaacaaaggaattagtctccattggtggacttccagagttttgagattaaactttgagaggtgagaagccttcctgatgcccctgtaatcttaaattggcaggtgcctctaagtgaggccatccctctttgcctgcctatcattttaatctttatactgtaactggttcctttcaactctggccttttattgtagcacttttatcaagtctgcagcttcccagctacttgggaggctgaggtgggaagaacacttgaagctaggagttcaagaccactctgggcaacatagtgagtccctgtttttagaaaaataaataacctttaggtttttgctatagaaaatatccaaatagagtctggacaatgctggatgtaaagaaaactgtgaagctacctctaagcatattgtttgtgaatactgtgtaccatttagaggataacatgggggattcacatgaagttatgtgaaaatattttataaggaataatacctaagtgcctctcttaagttctccagtagaatgtattttcaatttttgccacaagggggagaagttatttttatagtaatatgtacatttttttattttaaaaatagaattcacacaactttacagcatctatgaacattttgctatcccaattatgtgtgtgtgtgcatgtgtgtaaacaagattctgaaagtcttgcatgagaaaaatttcaaaggaaattaataacaaaaccaaaacagttttgaagaacatgtgcacagtggacacaggaattgaacaaagtttaccatgattaacattatgttttcttagttatatatcacattgaattcctttatcaactctaataagaatctactgattagtgttctacattctgctttttaaagaaaaatttttgaaacaatcagacttaacagaagggttgtaaatactgtacaaataaaatttttcccttttg

SEQ ID NO: 131514 - DNA, 2349 bp, Homo sapiens
  Payload ID: 5667
  Gene Symbol: EXOC5
  Gene Name: exocyst complex component 5
  ENST ID: ENST00000555148
  CDS Start-End: 190-324
aagcgtttgcggcttcgcttcatggccgctctcccgcccctcctgggatctgtggggagctggggagcccgcagcggcccggagccggagctggcgagccgagcggagacctgtgcgccgcgcctctgaggcgcagcatgtgaagcggagacggcatccagtggggggcgagcctctcagccggccgggatggctaccacggccgagctcttcgaggagccttttgtggcagatgaatatattgaacgtcttgtatggagaaccccaggaggaggctctagaggtggacctgaagcttttgatcctaaaaggaactccagataatggatgaaaggattcagaggaaagtagagaaactagagcaacaatgtcagaaagaagccaaggaatttgccaagaaggtacaagagctgcagaaaagcaatcaggttgccttccaacatttccaagaactagatgagcacattagctatgtagcaactaaagtctgtcaccttggagaccagttagagggggtaaacacacccagacaacgggcagtggaggctcagaaattgatgaaatactttaatgagtttctagatggagaattgaaatctgatgtttttacaaattctgaaaagataaaggaagcagcagacatcattcagaagttgcacctaattgcccaagagttaccttttgatagattttcagaagttaaatccaaaattgcaagtaaataccatgatttagaatgccagctgattcaggagtttaccagtgctcaaagaagaggtgaaatctccagaatgagagaagtagcagcagttttacttcattttaagggttattcccattgtgttgatgtttatataaagcagtgccaggagggtgcttatttgagaaatgatatatttgaagacgctggaatactctgtcaaagagtgaacaaacaagttggagatatcttcagtaatccagaaacagtcctggctaaacttattcaaaatgtatttgaaatcaaactacagagttttgtgaaagagcagttagaagaatgtaggaagtccgatgcagagcaatatctcaaaaatctctatgatctgtatacaagaaccaccaatctttccagcaagctgatggagtttaatttaggtactgataaacagactttcttgtctaagcttatcaaatccattttcatttcctatttggagaactatattgaggtggagactggatatttgaaaagcagaagtgctatgatcctacagcgctattatgattcgaaaaaccatcaaaagagatccattggcacaggaggtattcaagatttgaaggaaagaattagacagcgtaccaacttaccacttgggccaagtatcgatactcatggggagacttttctatcccaagaagtggtggttaatcttttacaagaaaccaaacaagcctttgaaagatgtcataggctctctgatccttctgacttaccaaggaatgccttcagaatttttaccattcttgtggaatttttatgtattgagcatattgattatgctttggaaacaggacttgctggaattccctcttcagattctaggaatgcaaatctttattttttggacgttgtgcaacaggccaatactatttttcatctttttgacaaacagtttaatgatcaccttatgccactaataagctcttctcctaagttatctgaatgccttcagaagaaaaaagaaataattgaacaaatggagatgaaattggatactggcattgataggacattaaattgtatgattggacagatgaagcatattttggctgcagaacagaagaaaacagattttaagccagaagatgaaaacaatgttttgattcaatatactaatgcctgtgtaaaagtctgtgcttacgtaagaaaacaagtggagaagattaaaaattccatggatgggaagaatgtggatacagttttgatggaacttggagtacgttttcatcgacttatctatgagcatcttcaacaatattcctacagttgtatgggtggcatgttggccatttgtgatgtagccgaatataggaagtgtgccaaagacttcaagattccaatggtattacatctttttgatactctgcatgctctttgcaatcttctggtagttgccccagataatttaaagcaagtctgctcaggagaacaacttgctaatctggacaagaatatacttcactccttcgtacaacttcgtgctgattatagatctgcccgccttgctcgacacttcagctgagattgaatttacaaaggaattcagtgtcagttcctttacagaggaatgtcttatacttcagcag

SEQ ID NO: 131515 - DNA, 518 bp, Homo sapiens
  Payload ID: 5667
  Gene Symbol: EXOC5
  Gene Name: exocyst complex component 5
  ENST ID: ENST00000556318
  CDS Start-End: 333-518
gtgcttggggccgaggtgggctgggcggccggtcggcagagaggggaagccgggtgtcccaagggaggagggttgcttttgtttgtgggggcaagagggaaagtctggaaggttcgggtgttggaagatgtctactccggatgagtagtgggaagggctgactcaggacgaggaaagagagccaggagcctcaggagccttttgtggcagatgaatatattgaacgtcttgtatggagaaccccaggaggaggctctagaggtggacctgaagcttttgatcctaaaagattattagaagaatttgtaaatcatattcaggaactccagataatggatgaaaggattcagaggaaagtagagaaactagagcaacaatgtcagaaagaagccaaggaatttgccaagaaggtacaagagctgcagaaaagcaatcaggttgccttccaacatttccaagaactagatgagcacattagctatgtagcaactaaagtctgtcaccttggagaccagtta

SEQ ID NO: 131516 - DNA, 10589 bp, Homo sapiens
  Payload ID: 5667
  Gene Symbol: EXOC5
  Gene Name: exocyst complex component 5
  Uniprot ID: O00471
  ENST ID: ENST00000621441
  CDS Start-End: 361-2487
aaggatcaaagttcctcatacacggtagcgtcgagccttttttcggttctttcgccgctcgttttattcgccggcccctcccgacaacctccctggcgcgcgcagttccacttccggcgtatgaggcggtgacaatgggagcagcgcgggcggcgccgggaggcagctgacaagcgtttgcggcttcgcttcatggccgctctcccgcccctcctgggatctgtggggagctggggagcccgcagcggcccggagccggagctggcgagccgagcggagacctgtgcgccgcgcctctgaggcgcagcatgtgaagcggagacggcatccagtggggggcgagcctctcagccggccgggatggctaccacggccgagctcttcgaggagccttttgtggcagatgaatatattgaacgtcttgtatggagaaccccaggaggaggctctagaggtggacctgaagcttttgatcctaaaagattattagaagaatttgtaaatcatattcaggaactccagataatggatgaaaggattcagaggaaagtagagaaactagagcaacaatgtcagaaagaagccaaggaatttgccaagaaggtacaagagctgcagaaaagcaatcaggttgccttccaacatttccaagaactagatgagcacattagctatgtagcaactaaagtctgtcaccttggagaccagttagagggggtaaacacacccagacaacgggcagtggaggctcagaaattgatgaaatactttaatgagtttctagatggagaattgaaatctgatgtttttacaaattctgaaaagataaaggaagcagcagacatcattcagaagttgcacctaattgcccaagagttaccttttgatagattttcagaagttaaatccaaaattgcaagtaaataccatgatttagaatgccagctgattcaggagtttaccagtgctcaaagaagaggtgaaatctccagaatgagagaagtagcagcagttttacttcattttaagggttattcccattgtgttgatgtttatataaagcagtgccaggagggtgcttatttgagaaatgatatatttgaagacgctggaatactctgtcaaagagtgaacaaacaagttggagatatcttcagtaatccagaaacagtcctggctaaacttattcaaaatgtatttgaaatcaaactacagagttttgtgaaagagcagttagaagaatgtaggaagtccgatgcagagcaatatctcaaaaatctctatgatctgtatacaagaaccaccaatctttccagcaagctgatggagtttaatttaggtactgataaacagactttcttgtctaagcttatcaaatccattttcatttcctatttggagaactatattgaggtggagactggatatttgaaaagcagaagtgctatgatcctacagcgctattatgattcgaaaaaccatcaaaagagatccattggcacaggaggtattcaagatttgaaggaaagaattagacagcgtaccaacttaccacttgggccaagtatcgatactcatggggagacttttctatcccaagaagtggtggttaatcttttacaagaaaccaaacaagcctttgaaagatgtcataggctctctgatccttctgacttaccaaggaatgccttcagaatttttaccattcttgtggaatttttatgtattgagcatattgattatgctttggaaacaggacttgctggaattccctcttcagattctaggaatgcaaatctttattttttggacgttgtgcaacaggccaatactatttttcatctttttgacaaacagtttaatgatcaccttatgccactaataagctcttctcctaagttatctgaatgccttcagaagaaaaaagaaataattgaacaaatggagatgaaattggatactggcattgataggacattaaattgtatgattggacagatgaagcatattttggctgcagaacagaagaaaacagattttaagccagaagatgaaaacaatgttttgattcaatatactaatgcctgtgtaaaagtctgtgcttacgtaagaaaacaagtggagaagattaaaaattccatggatgggaagaatgtggatacagttttgatggaacttggagtacgttttcatcgacttatctatgagcatcttcaacaatattcctacagttgtatgggtggcatgttggccatttgtgatgtagccgaatataggaagtgtgccaaagacttcaagattccaatggtattacatctttttgatactctgcatgctctttgcaatcttctggtagttgccccagataatttaaagcaagtctgctcaggagaacaacttgctaatctggacaagaatatacttcactccttcgtacaacttcgtgctgattatagatctgcccgccttgctcgacacttcagctgagattgaatttacaaaggaattcagtgtcagttcctttacagaggaatgtcttatacttcagcagccctcggttgatagaaagcacaggagataccttatgacacagccaacattttgtgaaacaatgactggaacaaaacagcagccatacttacctttgaggttttatttaaagtttggataccactagctatattttgcttttttcccctcacattgaattttaattccattcttgaatgtagaaatttcagattctctaaaactacatgtcactgtttttatcctagaaaatgttgctgtcagaaggcaaaggaaatgttaccagtgttttcggttcttgtacttttaacatattccatttagaaattttgccattctgttttccattaataataggtgaaatacaggaaaactacatttgttattcctcagtttttaatgaccttttcagcatcaattgttaatcagattattttaggttttcgtaaataatttttttgcctctttcaaaaggttaacaattaagcatactttctgcagttggttgattggatttttttctgaggtacagcattaatactagtccaaaaaatgtcataaactgaactaaaatgatgaactattttatgtagacattaggagtggatcggaatacttctgctttctgggtaaaacttaaaagtttactatttcttatttggtaaatagattttaagccaattctagtaagaaattaataaaactaccttattttgtatttcacttaaggtggaggaccttaactaaaggaccatatttattcattattttaatattataagggaagtaaaaaaaagtgaggtatagtctaaatggtgcatataggaaatactgacagtgtttagcaacatgcagccctttgagatttctgtcgtaatgctaaacttgaataagatggaatggctgaacatgtggttagtcttttattttaagaagaattgagaattgatagatttggagatgagctttgcaaaggctgtttgcttttcatgtctataggtctgtcattgtcctttttcaaagcatttctgaagttattcctacttggatatagttaatggaattggcttaatttgatgacataataaatcacttataaaattttaaatatcaagtgaaaatttagaaaggccattactattctataaaccttataaacttgctctgggagaatgcattctaaattatatatagtgtttcagctcccattgtggtgttcatagtcttctaggaacagataaacttaagtattcaattcactcttggcattttttctttaatataggctttttagcctatttttggaaaactgcttttcttctgagaaccttattctgaatgtcatcaactttaccaaaccttctaagtccagagctaacttagtactgtttaagttactattgactgaattttcttcattttctgtttagtccagtgttaccaaggtaagctggggaatgaagtataccaacttctttcagagcattttaggacattatggcagctttagaaggctgtcttgtttctagccaagggagagccagcgcaggttttggatactagagaaagtcatttgcttgtactattgccattttagaaagctctgatgtgaattcaaattttacctctgttacttaaagccaacaattttaaggcagtagttttactggccatttaagctctttgtacagtgtcaatttgtaaaaaagaaaaaacgaaaaaaaatctcaaataaaacatgagataacattttaagacttccaaatcagagaagtgcttcaaattattttgtttggattaatttttaaaatgtaaagcatatacttgttgcttagttattttgtttattattttcatgtttgagttctgtgcaatattttctattatgtccgttgataggacagtgacaaaattcgtaagtgaatacttaatttaaaagtgttaacattaatgctcaataaacaaattccctgcagttgttttttttatttcactctttttatattttagagccatccatcctgaattttataaatgattttttatttaaaaatttgagatttttaaaatttttcacagcacaggtcttctcattttcttttttagcaaaaaatacttgactatataaacaagactagaaatttatcctaaacagatggtctttctctgagggaaaaaaaaaaatgtgtcatgtgaggcaatatgcattctttgtattctgattttttaagtgttttcatatttatagccatcacaaaattttgcccaaagtgtatggctcagaagagatgatcaataactaaaatgtttttcgttttgcacatggtaaaattttaggtagagagtggagctttgtataattggtaactttaaccaacatttacgtaagtacggtctttgcagtattacacaataccgcatgagctaatatgcagtatttaggtaatgcattgaatgaagttgaaaatatgctcttaacacactgtgcattgtttttctaaaattgagaaatatctgaaatacagaatacgaatttaataaaggaagcctaccttatgtaaattatgatgttgaaaatgacagtcaaccagagtagatgaagtgtccttatgaagaattattaaatagtagctggatggatctttagatggatgaccacctgaccattccaggacaatttttggtcccattttgaggattgccatagttgcaagtccttaggatcttccttgttttaaaaaactatcaaagtaggttaaattaaaatctaatttaaattaggttaatttatattacattgtagatcattcttttttcccccctctttcacttctaaatattttgctttctaaatactagccttctggttcacagtgaaataatttaattatcaatcagtagattgattccaagtggagaattcactgcttccctaaaatgcgtttttcttacctgtaatggtgaatatttacaaggatctggataaagagattttgatttttgaaatgccacaaaaccccttaaagtggtcaagtacctaaggtagtggctaaggcatgcttgaactgtgtttgagagacagcagttcagtcagtacataatttgttggtgactaacaaagctcacatctgggagattaactttttttaacgcaaaaatattctgcacattacccatatattgttgaattttacatacaaagcattttgtgctttcattcaattagtttaactatattcagtttctgtattatttctctctgatctatcctgtaattattctatactttagaagaaaagatcagttcatattgttagactgaataattctacatgaagttaaaagttagcaatttaaaaaattttgctgcataataaagataattatagttacatgtattgatttaagtctcacacactgtgctaataagtcctttgcacatattattggattctagagcaaccctaggatttgggtactattatttccatttgacagatgaaaaacctaatgcatagaaagataagtagaccagtcaaggtctacagctagtaaaatgctcagattgaaacctaaatcttttctcactcacttttaggttctatatgctattctccttacgtaacgttaaatagatcctttagtttgataggttcattagttttgcttaatcgttgcttccaatatgattcttattgtagtatttatattacaaagttggcatacagggtcaatatctaatttactgttgtgtttttcttaatatgttcaatgtatggtcatactttttaaatttgattttttaaatattataagtggtcatgaaattttaatgttaagtttgtacctaatagaaatatgtctatcacaaatctttattggtattattttatatacttttccagcttgataattttcacaatagaaagagaccaaatattttgtactatattttgtgacatagaagtaaatgacaactctaccttggaagatatgaagaaatcagtgtttttatgttcaaaaactattttaaatgtcataggcttgccaattgtgttaactatttagtacattggtagtttttaaatgactaatgctggagtgaaaatgtaaggcaaaatatttagtatattaacagtagatagtcattttcatgtaatcagaattgcatgttaagggttttaaaagctgtcataactcttaccttttatttctaccagtgatcaatcatttctctttacaaatttagggaggaaacaactgttcaaatgtataggggacagaaacctgacatttagagaacagaaattttaattgccaaattaaagcagctaggctgcccctgggcttaacaaaattcctatttttgaactagacccgaggtattttatcattattatttgataggtaccattaacctttgttttgtgattatcgacttttggggggaaagatgagtaattaaacacactcgcccattttctaagtggtttagaaggttgcagtctgcctcaccatacaaagccagtttaaataggaatatatcacatcatacttcacatagcagtcaacctcagaggaaagtcatttattcagaaggcatagattttgctagacagcagtgatgcattacaaatatataattatttgcactaatatttgagcaggtggaatggattagaacatggtcaacatcatgctgctgataacatgtatttttctatattaatatgtactgtgcaacatgtattaaaattgtcaataattcattttagccaagatactaatatttatattactgtgtttaagagacagtatccaactgagccacttttaatttaaaagtctgaaactggaattaagtttactttcaaaaatcacttaaattactttataatcagtgaaaggtcagtaaaatgtagaattataagtgcctagtgacttaataggaggaaatatggagggttaaggaaggaagtaggaacctggaataagaaagctaagtttcatttatagttccaatgagtgactttctttgttttcaccactgggaatcttaaatgaagaaagtgtcgtatcccttccagttatctttatgttaataaactaagtgaagtttggatagaactaacaaaggaattagtctccattggtggacttccagagttttgagattaaactttgagaggtgagaagccttcctgatgcccctgtaatcttaaattggcaggtgcctctaagtgaggccatccctctttgcctgcctatcattttaatctttatactgtaactggttcctttcaactctggccttttattgtagcacttttatcaagtctgcagcttcccagctacttgggaggctgaggtgggaagaacacttgaagctaggagttcaagaccactctgggcaacatagtgagtccctgtttttagaaaaataaataacctttaggtttttgctatagaaaatatccaaatagagtctggacaatgctggatgtaaagaaaactgtgaagctacctctaagcatattgtttgtgaatactgtgtaccatttagaggataacatgggggattcacatgaagttatgtgaaaatattttataaggaataatacctaagtgcctctcttaagttctccagtagaatgtattttcaatttttgccacaagggggagaagttatttttatagtaatatgtacatttttttattttaaaaatagaattcacacaactttacagcatctatgaacattttgctatcccaattatgtgtgtgtgtgcatgtgtgtaaacaagattctgaaagtcttgcatgagaaaaatttcaaaggaaattaataacaaaaccaaaacagttttgaagaacatgtgcacagtggacacaggaattgaacaaagtttaccatgattaacattatgttttcttagttatatatcacattgaattcctttatcaactctaataagaatctactgattagtgttctacattctgctttttaaagaaaaatttttgaaacaatcagacttaacagaagggttgtaaatactgtacaaataaaatttttcccttttgagaataagtcgctgtcatgatgctgcaccaccctccaatacttttgtatttccaagaagaaagaatgcttcagtataactacaatacatgaaaattgggaagttaacattgacatattactactatctaatcctcagacaccaatcattttactagctgtcctaattccttttaaggatctcagttcaaaatcatgtattgctttaggttgtagtggctctagtctcattcattctgacacagttccacagtctttccttgacttttttgactctggacatttttatagattatagggtagttactttgtaaaacacccctacatttggatttctgtttccacgtaattagattctgtttgtgctttttggcagacataccacggatgcaactctgtgttattgttgcatcctatcacatagtacacaatttcaatttgccccatttctgatgatgttcatttttatcactttcttaaggtactatttaccaggcttctccactttaaaactattacttttccctttgtaaatattttggaggtagatatatattaatagatacagacatatataggtcccccttatttatttatttgcagacagagtctcgctctgttgcccaagctggagtgcggtggcgtgatctcagctcactgcaacctctacctcctgggttcaagcgattctcccacctcagcctcccaagtagctaggactacaggcacatgccaccatgcctggccaatttttctatttgtagtagaaatggggttttgccgtgttggtcaggctggtgtcaaactcctagccttaagtgatctgcccacctcaacctcccaaagtcctgggattacaggtgtgagccaccttaaccagccatcctttatatatatatatatatatatatatataatattaatatatataaaaatatatgtatatgtgtggtgtgtgtgtatatatatacatatgtgtgtgtatatacacgtgtgtttatacacgtgtgtgtacatatacacgcgtgtgtatatatacacacgtgtgtgtgtgtatatatatatactaatcagaattctcttgatatcactatgtattcatagttttctgttcaactaattataatctgtcattttaccaaatctcaaattatcccaaatttggtcagaagtagcctcttcaggttgtctcctgtgtcgttttggcatgttcccatcatttttacagcaatttattctgggcacaacaggattttccaaggtcatcttgtacttgccttgccccagctctggaatcagccattcctccaccttttagtgaaattggcagttagaaatcaagatttgtgcatgagatgtgcttattattattgagatgtctcaccctactctttctcaatagataatgctagggggctttatgtgtgcatacacacacacacactcacgcatattttaaatatacacccacacccatgcgcccctctgcaacatcttcctcacctcacttgagcttccatactccatactgggcttcccctctctctggaggagaccatcctcatctcacatagctcttgaagttttggctttaggaccaaattgagggaataagaatggtcattgcagaaatcctgtaaaaattttaaaatattaaatttaaaaattacaattttatcacgcagaaacaactatatttttggtggaagttttttttttttttttttaatgtagtgagcaaattagtaaagctgaattgaggagggggtaaagtgttatgcccaagacacagaacttacattttgaaagaattaaatttgaaatgcataccgtatgtttttctattatacaatctccttgctactgtaattgctatttaataagagtgcatcagagaaactgtatgaatggaaacctgaccattaagcactgaataccaataggatatttttactaataaagttcaaaggaaaaatga

SEQ ID NO: 131517 - DNA, 3564 bp, Homo sapiens
  Payload ID: 5668
  Gene Symbol: EXOC6
  Gene Name: exocyst complex component 6
  Uniprot ID: Q8TAG9
  ENST ID: ENST00000260762
  CDS Start-End: 15-2429
agcttccagccaaaatggcggagaacagcgagagtctgggcaccgtccccgagcacgagcggatcttgcaggagatcgagagcaccgacaccgcctgtgtggggcccaccctccggtctgtgtatgatgaccaaccaaatgcgcacaagaagtttatggaaaagttagatgcttgtatccgtaatcatgacaaggaaattgaaaagatgtgtaattttcatcatcagggttttgtagatgctattacagaactccttaaagtaaggactgatgcagaaaaactgaaggtgcaagttactgataccaaccgaaggtttcaagatgctggaaaagaggtgatagtccacacagaagatatcattcgatgtagaattcagcagagaaatattacaactgtagtagaaaaattgcagttatgccttcctgtgctagaaatgtacagtaagctgaaagaacagatgagtgccaaaaggtactattctgccctaaaaactatggaacaattagagaatgtgtactttccctgggttagtcaataccggttttgtcagctcatgatagaaaatcttcccaaactccgtgaggatattaaagaaatctccatgtctgatctcaaagactttttggaaagtattcgaaaacattctgacaaaataggtgaaacagcaatgaaacaggcacagcatcagaaaaccttcagtgtttctctgcagaaacaaaataaaatgaaatttgggaaaaatatgtatataaatcgtgatagaattccagaggaaaggaatgaaactgtattgaaacattcacttgaagaagaggatgagaatgaagaagagatcttaactgttcaggatcttgttgatttttcccctgtttatcgatgtttgcacatttattctgttttgggtgacgaggaaacatttgaaaactattatcgaaaacaaagaaagaaacaagcaagactggtattgcaaccccagtcgaatatgcatgaaacagttgatggctatagaagatatttcactcaaattgtagggttctttgtggtagaagatcacattttacatgtgacccaaggattagtaaccagggcatacactgatgaactttggaacatggccctctcaaagataattgctgtccttagagctcattcatcctattgcactgatcctgatcttgttctggagctgaagaatcttactgtaatatttgcagatactttacagggttatggttttccagtgaaccgactttttgaccttttatttgaaataagagaccaatacaatgaaacactgcttaagaaatgggctggagttttcagggacatttttgaagaagataattacagccccatccctgttgtcaatgaagaagaatataaaattgtcatcagcaaatttccctttcaagatccagaccttgaaaagcagtctttcccaaagaaattccccatgtctcagtcagtgcctcatatttacattcaagttaaagaatttatttatgccagccttaaattttcagagtcactacaccggagctcaacagaaatagacgatatgcttagaaaatcaacaaatctgctgctgaccagaactttgagtagctgtttactgaaccttattagaaaacctcatataggtttgacagagctggtacaaatcatcataaacacaacacacctggagcaagcttgtaaatatcttgaggactttataactaacattacaaatatttcccaagaaactgttcatactacaagactttatggactttctactttcaaggatgctcgacatgcagcagaaggagaaatatataccaaactgaatcaaaaaattgatgaatttgttcagcttgctgattatgactggacaatgtctgagccagatggaagagctagtggttatttaatggaccttataaattttttgagaagcatctttcaagtgtttactcatttgcctgggaaagttgctcagacagcttgcatgtcagcctgccagcatctgtcaacatccttaatgcagatgctactggacagtgagttaaaacaaataagcatgggagctgttcagcagtttaacttagatgtcatacagtgtgaattgtttgccagctctgagcctgtgccaggattccagggggataccctgcagctagcattcattgacctcagacaactccttgacctgtttatggtttgggattggtctacttacctagctgattatgggcagccagcttctaagtaccttcgggtgaatccaaacacagcccttactcttttggagaagatgaaggatactagcaaaaagaacaatatatttgctcagttcaggaagaatgatcgagacaaacagaagttgatagagacagtcgtgaaacagctgagaagtttggtgaatggtatgtcccagcacatgtagacctcacatggcttgcactcagtgacaccaaatccatgattcaatgttgatcttgagcaagtattggtcatgatacagtaatttgtttacagaatccaaaaatacaatagagaagatacatgagggcttaaacaagaaatagtaataaatatcatttgtatggatttttaaataatcgaatactattttatatatggaaaaaaatgaccattttttcacttttaggggaaaatgcaaaagtgtaatacataaattgtcacaaattatacatgaaattgattacaaatacatttgaaaaacatatgcctctactcataagtatttttttctatttagacttgaatgataatctgttttttgatcagtatatggctttggaattcaatcatgtctgatatggtagtatttcactaccattttctgacttttagcttttattttcacctcaatgtgatttaagcagaccaaaatttctaattctgctaattctgaaggggaaatagacaaatcttaaaagctgcctgaaatcaaacttgatttaactcagtaagaatgtgaattatttgttctacttgggtggtttaatttaatcgttctgaatatgaacaaaaggttttggattttctaaagatgcagtgttgtttctgttcatcagggttaatatttctaactatattgcttgtaggtgaccccattctggatttgtttggtttggtttggttccagttaaaagagaggacaggaactaaatggggctaaccacttcaggtgcagcttgtgcgagggtagatggttcctgcacacagaagttaccacaggggtcaggttactttcttcaaatagcagatttcagtactttatcctcattgtggaaacaagccaaaccaaatgaactctggaaaacctaaaacaaatgtacattttcctttgtgtatgtttccgtggtccaaatggcaatataaatccagtctttattctccctttgttgtatttatgctgaatcttccctttgccttttcaggatttaggcctgtaagaaactatgcctgattctgtaaaataagtgtaaagaattatatgtacatctctggattttgtgatgaaatattaaaaatattgagcaagttgttgaaaa

SEQ ID NO: 131518 - DNA, 2714 bp, Homo sapiens
  Payload ID: 5668
  Gene Symbol: EXOC6
  Gene Name: exocyst complex component 6
  ENST ID: ENST00000371543
  CDS Start-End: 50-511
gtcgttcccgcggcgccgcgcctcgctggctcctcagcttccagccaaaatggcggagaacagcgagagtctgggcaccgtccccgagcacgagcggatcttgcaggagatcgagagcaccgacaccgcctgtgtggggcccaccctccggtctgtgtatgatgaccaaccaaatgcgcacaagaagtttatggaaaagttagatgcttgtatccgtaatcatgacaaggaaattgaaaagatgtgtaattttcatcatcagggttttgtagatgctattacagaactccttaaagtaaggactgatgcagaaaaactgaaggtgcaagttactgataccaaccgaaggtttcaagatgctggaaaagaggtgatagtccacacagaagatatcattcgatgtagaattcagcagagaaatattacaactgtagtagaaaaattgcagttatgccttcctgtgctagaaatgtacagtaagctgaaagaacagatgagtgccaaaaggtgagttggtttttttcctattgttttaaataagaatttttttctattattgaaaggacagatacatttactataaatcatagtgaatcatgagttttgctttcttcattacactaacctttgtacttaaaatttgcgcatcaggataatccactaaagcaaatcttagccttttattaataaatcattgtcctttataaatgatatcaaggattggtaatgttgatcaagtacaaatagccgaacaggaatgaaaatattgattagcttaccaacatactaatattgcatgtaactaagggctaagtgcatattgtggaaggaaaagagtgtaggcagttatattttgacagtctgggtgaatgtagtagttcacattctgttttataactcaaatgcatatatgacagttgaaaaagaaagtaatttaaagtagtttattgattgccataggagcattggatatagtgatgtttaaaatattttaaagacgaacagttttggccaggtgtcatggctcatgcttgtaatcccggcactttgggagtctgaggcaaggggatcacttgaacccaggagtttgagaccagcgtgggcaatatagggagacctcatttcacctccccacccccttccccccaaaaaacaaaagaaaaaaaacaaatgattcaaaagtaacatagaaaaaccagaataaattagacaatttggactagggaaaaaatgatttcttcttggttagtaactacttaattatcagaacacatcttatacagacctatagtaaaagatgtgtgtatgtcctgcttcattgtgctacatgttgaatttcattaggctttaccagttaatacaatttagtagaatgattttttccctgtaataaacaagccaaaaactattctgaaagtcttattttctttcacgtatgtattaataatatattctctttttaaatcaatgttatatatcctcacattttaaagattcaaataattttcctacgcgtttgctgccaaaaaaaaaaaaaacagatatcacctttcctatttcccattcaccattccttctttataggagcaaaaacttttacctcttttaatggattattttggtatttatatttatgtctttaaataactaacttttaattattaccatattattttccagtttggggcattatcggtttttcagtaatataatctaatatttatactcacattttctcaactatccccaaaatgtcttacgtctttttccctccctgaaaacattgatttgtatgtgttcttttgtcccttttaatctagaacagtcctcctgttctttgtttttttcatggaagagtgcaggtcagttctcttgtagaccagggcattttggatttatctagttgtttcttcatgtttagattcaagttaaaaggttttggcaagagtatagcataagtgatacctcacattgcatgacatcaggaggcttataaagtcatgttgtccttaggttatgctaaatttgatcatttggttaaggggaagtctaccagatgtcttttgaaaaggtatatttttctctttgcaattaataagtaatatgtgggtcctgtttcctaacaggttttcacccagtagttttatcattcttgccttaatccgttattatattggatttacaagatgttgatttaaaaaattctattatttcttaaacatttattaactggctgttttatatataaagaagagctttttattccccaccaccaccttttttctttttttccgattatggctgtgaacttacgcatttttaaaataaatatattataatttattattgtcattattcattttgatgcacaaattgtttcaaatttaacaagagaaacttctcaagccaattcctgtgtctttgtctttgagtatttttgtgtttattgtatcgtaagatgttccaagctctcattgtgccttttttttttttttttgcctcagatctggaagcagccattctccagggtaccctagctccttttagtattaatggtatttagaaactaagatgtatgggttgggagcagtggctcacacctgtaatctcagcactttgggaggctaaggcaggtggatcgcttaagctcaagagtttgagaccagcctggcccgtatggtaaaaccccatctctactgaaaaaaaaaaaaaaa

SEQ ID NO: 131519 - DNA, 3564 bp, Homo sapiens
  Payload ID: 5668
  Gene Symbol: EXOC6
  Gene Name: exocyst complex component 6
  Uniprot ID: Q8TAG9
  ENST ID: ENST00000371552
  CDS Start-End: 27-2426
ctggaaaattaggggcctgtcgagcgatgttggaagaagaaacagatcaaacctatgagaatgtcctggctgagattcagtctttcgaactgcctgttgaagctactttaaggtctgtgtatgatgaccaaccaaatgcgcacaagaagtttatggaaaagttagatgcttgtatccgtaatcatgacaaggaaattgaaaagatgtgtaattttcatcatcagggttttgtagatgctattacagaactccttaaagtaaggactgatgcagaaaaactgaaggtgcaagttactgataccaaccgaaggtttcaagatgctggaaaagaggtgatagtccacacagaagatatcattcgatgtagaattcagcagagaaatattacaactgtagtagaaaaattgcagttatgccttcctgtgctagaaatgtacagtaagctgaaagaacagatgagtgccaaaaggtactattctgccctaaaaactatggaacaattagagaatgtgtactttccctgggttagtcaataccggttttgtcagctcatgatagaaaatcttcccaaactccgtgaggatattaaagaaatctccatgtctgatctcaaagactttttggaaagtattcgaaaacattctgacaaaataggtgaaacagcaatgaaacaggcacagcatcagaaaaccttcagtgtttctctgcagaaacaaaataaaatgaaatttgggaaaaatatgtatataaatcgtgatagaattccagaggaaaggaatgaaactgtattgaaacattcacttgaagaagaggatgagaatgaagaagagatcttaactgttcaggatcttgttgatttttcccctgtttatcgatgtttgcacatttattctgttttgggtgacgaggaaacatttgaaaactattatcgaaaacaaagaaagaaacaagcaagactggtattgcaaccccagtcgaatatgcatgaaacagttgatggctatagaagatatttcactcaaattgtagggttctttgtggtagaagatcacattttacatgtgacccaaggattagtaaccagggcatacactgatgaactttggaacatggccctctcaaagataattgctgtccttagagctcattcatcctattgcactgatcctgatcttgttctggagctgaagaatcttactgtaatatttgcagatactttacagggttatggttttccagtgaaccgactttttgaccttttatttgaaataagagaccaatacaatgaaacactgcttaagaaatgggctggagttttcagggacatttttgaagaagataattacagccccatccctgttgtcaatgaagaagaatataaaattgtcatcagcaaatttccctttcaagatccagaccttgaaaagcagtctttcccaaagaaattccccatgtctcagtcagtgcctcatatttacattcaagttaaagaatttatttatgccagccttaaattttcagagtcactacaccggagctcaacagaaatagacgatatgcttagaaaatcaacaaatctgctgctgaccagaactttgagtagctgtttactgaaccttattagaaaacctcatataggtttgacagagctggtacaaatcatcataaacacaacacacctggagcaagcttgtaaatatcttgaggactttataactaacattacaaatatttcccaagaaactgttcatactacaagactttatggactttctactttcaaggatgctcgacatgcagcagaaggagaaatatataccaaactgaatcaaaaaattgatgaatttgttcagcttgctgattatgactggacaatgtctgagccagatggaagagctagtggttatttaatggaccttataaattttttgagaagcatctttcaagtgtttactcatttgcctgggaaagttgctcagacagcttgcatgtcagcctgccagcatctgtcaacatccttaatgcagatgctactggacagtgagttaaaacaaataagcatgggagctgttcagcagtttaacttagatgtcatacagtgtgaattgtttgccagctctgagcctgtgccaggattccagggggataccctgcagctagcattcattgacctcagacaactccttgacctgtttatggtttgggattggtctacttacctagctgattatgggcagccagcttctaagtaccttcgggtgaatccaaacacagcccttactcttttggagaagatgaaggatactagcaaaaagaacaatatatttgctcagttcaggaagaatgatcgagacaaacagaagttgatagagacagtcgtgaaacagctgagaagtttggtgaatggtatgtcccagcacatgtagacctcacatggcttgcactcagtgacaccaaatccatgattcaatgttgatcttgagcaagtattggtcatgatacagtaatttgtttacagaatccaaaaatacaatagagaagatacatgagggcttaaacaagaaatagtaataaatatcatttgtatggatttttaaataatcgaatactattttatatatggaaaaaaatgaccattttttcacttttaggggaaaatgcaaaagtgtaatacataaattgtcacaaattatacatgaaattgattacaaatacatttgaaaaacatatgcctctactcataagtatttttttctatttagacttgaatgataatctgttttttgatcagtatatggctttggaattcaatcatgtctgatatggtagtatttcactaccattttctgacttttagcttttattttcacctcaatgtgatttaagcagaccaaaatttctaattctgctaattctgaaggggaaatagacaaatcttaaaagctgcctgaaatcaaacttgatttaactcagtaagaatgtgaattatttgttctacttgggtggtttaatttaatcgttctgaatatgaacaaaaggttttggattttctaaagatgcagtgttgtttctgttcatcagggttaatatttctaactatattgcttgtaggtgaccccattctggatttgtttggtttggtttggttccagttaaaagagaggacaggaactaaatggggctaaccacttcaggtgcagcttgtgcgagggtagatggttcctgcacacagaagttaccacaggggtcaggttactttcttcaaatagcagatttcagtactttatcctcattgtggaaacaagccaaaccaaatgaactctggaaaacctaaaacaaatgtacattttcctttgtgtatgtttccgtggtccaaatggcaatataaatccagtctttattctccctttgttgtatttatgctgaatcttccctttgccttttcaggatttaggcctgtaagaaactatgcctgattctgtaaaataagtgtaaagaattatatgtacatctctggattttgtgatgaaatattaaaaatattgagcaagttgttgaaaatgc

SEQ ID NO: 131520 - DNA, 3310 bp, Homo sapiens
  Payload ID: 5668
  Gene Symbol: EXOC6
  Gene Name: exocyst complex component 6
  ENST ID: ENST00000443748
  CDS Start-End: 67-2172
acttggagctcgcccccgtcgttcccgcggcgccgcgcctcgctggctcctcagcttccagccaaaatggcggagaacagcgagagtctgggcaccgtccccgagcacgagcggatcttgcaggagatcgagagcaccgacaccgcctgtgtggggcccaccctccggtctgtgtatgatgaccaaccaaatgcgcacaagaagtttatggaaaagttagatgcttgtatccgtaatcatgacaaggaaattgaaaagatgtgtaattttcatcatcagggttttgtagatgctattacagaactccttaaagtaaggactgatgcagaaaaactgaaggtgcaagttactgataccaaccgaaggtttcaagatgctggaaaagaggtgatagtccacacagaagatatcattcgatgtagaattcagcagagaaatattacaactgtagtagaaaaattgcagttatgccttcctgtgctagaaatgtacagtaagctgaaagaacagatgagtgccaaaaggtactattctgccctaaaaactatggaacaattagagaatgtgtactttccctgggttagtcaataccggttttgtcagctcatgatagaaaatcttcccaaactccgtgaggatattaaagaaatctccatgtctgatctcaaagactttttggaaagtattcgaaaacattctgacaaaataggtgaaacagcaatgaaacaggcacagcatcagaaaaccttcagtgtttctctgcagaaacaaaataaaatgaaatttgggaaaaatatgtatataaatcgtgatagaattccagaggaaaggaatgaaactgtattgaaacattcacttgaagaagaggatgagaatgaagaagagggtgacgaggaaacatttgaaaactattatcgaaaacaaagaaagaaacaagcaagactggtattgcaaccccagtcgaatatgggttatggttttccagtgaaccgactttttgaccttttatttgaaataagagaccaatacaatgaaacactgcttaagaaatgggctggagttttcagggacatttttgaagaagataattacagccccatccctgttgtcaatgaagaagaatataaaattgtcatcagcaaatttccctttcaagatccagaccttgaaaagcagtctttcccaaagaaattccccatgtctcagtcagtgcctcatatttacattcaagttaaagaatttatttatgccagccttaaattttcagagtcactacaccggagctcaacagaaatagacgatatgcttagaaaatcaacaaatctgctgctgaccagaactttgagtagctgtttactgaaccttattagaaaacctcatataggtttgacagagctggtacaaatcatcataaacacaacacacctggagcaagcttgtaaatatcttgaggactttataactaacattacaaatatttcccaagaaactgttcatactacaagactttatggactttctactttcaaggatgctcgacatgcagcagaaggagaaatatataccaaactgaatcaaaaaattgatgaatttgttcagcttgctgattatgactggacaatgtctgagccagatggaagagctagtggttatttaatggaccttataaattttttgagaagcatctttcaagtgtttactcatttgcctgggaaagttgctcagacagcttgcatgtcagcctgccagcatctgtcaacatccttaatgcagatgctactggacagtgagttaaaacaaataagcatgggagctgttcagcagtttaacttagatgtcatacagtgtgaattgtttgccagctctgagcctgtgccaggattccagggggataccctgcagctagcattcattgacctcagacaactccttgacctgtttatggtttgggattggtctacttacctagctgattatgggcagccagcttctaagtaccttcgggtgaatccaaacacagcccttactcttttggagaagatgaaggatactagcaaaaagaacaatatatttgctcagttcaggaagaatgatcgagacaaacagaagttgatagagacagtcgtgaaacagctgagaagtttggtgaatggtatgtcccagcacatgtagacctcacatggcttgcactcagtgacaccaaatccatgattcaatgttgatcttgagcaagtattggtcatgatacagtaatttgtttacagaatccaaaaatacaatagagaagatacatgagggcttaaacaagaaatagtaataaatatcatttgtatggatttttaaataatcgaatactattttatatatggaaaaaaatgaccattttttcacttttaggggaaaatgcaaaagtgtaatacataaattgtcacaaattatacatgaaattgattacaaatacatttgaaaaacatatgcctctactcataagtatttttttctatttagacttgaatgataatctgttttttgatcagtatatggctttggaattcaatcatgtctgatatggtagtatttcactaccattttctgacttttagcttttattttcacctcaatgtgatttaagcagaccaaaatttctaattctgctaattctgaaggggaaatagacaaatcttaaaagctgcctgaaatcaaacttgatttaactcagtaagaatgtgaattatttgttctacttgggtggtttaatttaatcgttctgaatatgaacaaaaggttttggattttctaaagatgcagtgttgtttctgttcatcagggttaatatttctaactatattgcttgtaggtgaccccattctggatttgtttggtttggtttggttccagttaaaagagaggacaggaactaaatggggctaaccacttcaggtgcagcttgtgcgagggtagatggttcctgcacacagaagttaccacaggggtcaggttactttcttcaaatagcagatttcagtactttatcctcattgtggaaacaagccaaaccaaatgaactctggaaaacctaaaacaaatgtacattttcctttgtgtatgtttccgtggtccaaatggcaatataaatccagtctttattctccctttgttgtatttatgctgaatcttccctttgccttttcaggatttaggcctgtaagaaactatgcctgattctgtaaaataagtgtaaagaattatatgtacatctctggattttgtgatgaaatattaaaaatattgagcaagttgttgaaaatgc

SEQ ID NO: 131521 - DNA, 216 bp, Homo sapiens
  Payload ID: 5668
  Gene Symbol: EXOC6
  Gene Name: exocyst complex component 6
  ENST ID: ENST00000458552
  CDS Start-End: 1-216
gggaaagttgctcagacagcttgcatgtcagcctgccagcatctgtcaacatccttaatgcagatgctactggacagtgagttaaaacaaataagcatgggagctgttcagcagtttaacttagatgtcatacagtgtgaattgtttgccagctctgagcctgtgccaggattccagggggataccctgcagctagcattcattgacctcagacaa

SEQ ID NO: 131522 - DNA, 1799 bp, Homo sapiens
  Payload ID: 5668
  Gene Symbol: EXOC6
  Gene Name: exocyst complex component 6
  ENST ID: ENST00000495132
  CDS Start-End: 47-1261
acaaagaaagaaacaagcaagactggtattgcaaccccagtcgaatatgcatgaaacagttgatggctatagaagatatttcactcaaattgtagggttctttgtggtagaagatcacattttacatgtgacccaaggattagtaaccagggcatacactgatgaactttggaacatggccctctcaaagataattgctgtccttagagctcattcatcctattgcactgatcctgatcttgttctggagctgaagaatcttactgtaatatttgcagatactttacagggttatggttttccagtgaaccgactttttgaccttttatttgaaataagagaccaatacaatgaaacactgcttaagaaatgggctggagttttcagggacatttttgaagaagataattacagccccatccctgttgtcaatgaagaagaatataaaattgtcatcagcaaatttccctttcaagatccagaccttgaaaagcagtctttcccaaagaaattccccatgtctcagtcagtgcctcatatttacattcaagttaaagaatttatttatgccagccttaaattttcagagtcactacaccggagctcaacagaaatagacgatatgcttagaaaatcaacaaatctgctgctgaccagaactttgagtagctgtttactgaaccttattagaaaacctcatataggtttgacagagctggtacaaatcatcataaacacaacacacctggagcaagcttgtaaatatcttgaggactttataactaacattacaaatatttcccaagaaactgttcatactacaagactttatggactttctactttcaaggatgctcgacatgcagcagaaggagaaatatataccaaactgaatcaaaaaattgatgaatttgttcagcttgctgattatgactggacaatgtctgagccagatggaagagctagtggttatttaatggaccttataaattttttgagaagcatctttcaagtgtttactcatttgcctgggaaagttgctcagacagcttgcatgtcagcctgccagcatctgtcaacatccttaatgcagatgctactggacagtgagttaaaacaaataagcatgggagctgttcagcagtttaacttagatgtcatacagtgtgaatatgaggtgttgctgtgttgcccagactggtctcaaactcctggcctcaagtcatcctcctgccttggcatcccaaaatgctggaattagaggcgtgagctactgtgcctggccatttttataagcttttaagctgaaatgtttgccagctctgagcctgtgccaggattccagggggataccctgcagctagcattcattgacctcagacaactccttgacctgtttatggtttgggattggtctacttacctagctgattatgggcagccagcttctaagtaccttcgggtgaatccaaacacagcccttactcttttggagaagatgaaggatactagcaaaaagaacaatatatttgctcagttcaggaagaatgatcgagacaaacagaagttgatagagacagtcgtgaaacagctgagaagtttggtgaatggtatgtcccagcacatgtagacctcacatggcttgcactcagtgacaccaaatccatgattcaatgttgatcttgagcaagtattggtcatgatacagtaatttgtttacagaatccaaaaatacaatagagaagatacatgagggcttaaacaagaaatagtaataaatatcatttgtatggattttt

SEQ ID NO: 131523 - DNA, 5918 bp, Homo sapiens
  Payload ID: 5669
  Gene Symbol: EXOC6B
  Gene Name: exocyst complex component 6B
  Uniprot ID: Q9Y2D4
  ENST ID: ENST00000272427
  CDS Start-End: 132-2567
agggaggggtcggcctgcgggtagccagaggctggggcggctgtggagcctgtggtgggagcggcattgtggggcagggaaaaggtgagccgagccgacggaggggacgcgctgcggggcgcccccagtctatggagcggggtaagatggcggaggcggagagcctggagacagcggcagagcacgagcggatcctgcgagagatcgagagcactgacacggcctgcatcgggcccacgctcaggtctgtttatgatggtgaagaacatggacgtttcatggagaagcttgaaactcgtatccgtaatcacgaccgagaaattgagaaaatgtgcaactttcattaccagggctttgtggactctataactgaactgctgaaagtgagaggagaagcccagaaactcaaaaatcaagtgacggatactaatagaaaactacaacatgagggaaaggaactggtaatagcaatggaagagctgaagcagtgtcgactacaacagagaaatatttctgccactgttgataaattaatgctgtgtcttccagtcctagagatgtacagcaaactgagggaccagatgaaaactaaaaggcattatcctgcactgaaaactctggaacatctagagcatacctacctgcctcaagtaagccactatcgattctgcaaggtgatggtggacaacatccccaagcttcgagaagaaataaaagatgtttctatgtccgatctcaaagactttctggagagcatccgcaaacattcagacaaaattggagagactgccatgaagcaagcccagcagcaaagaaacctggataacatcgtcttgcaacaacccagaataggtagcaagaggaaatctaagaaagatgcatatataatctttgatacagagatagaaagtactagtccgaagtctgaacaggattcaggaattctggatgttgaagacgaggaagatgatgaagaggtacctggggcccaagatttggtggatttctctccagtttatcgatgtctacatatatattctgtcctgggtgcccgggaaacatttgagaattactaccgaaaacagaggcgaaaacaggctcgtttggtacttcaacctccatctaacatgcatgaaactttagatggctacaggaagtattttaatcaaattgtaggcttttttgtggttgaagatcacattttacatacaacccagggcttagtaaatagagcctacattgatgaactgtgggaaatggcactttcaaaaaccatcgcagcactccgtacccactcgtcttactgttctgatccaaaccttgtgttagatttgaagaacctcattgtgctttttgctgacacacttcaggtgtatggtttccctgtaaatcagctttttgacatgctgttagaaatcagagaccaatatagtgaaactctgctaaagaagtgggcaggtattttcagaaacatacttgattctgacaactacagtcctataccagtaacaagtgaagagatgtacaaaaaggtggtaggacaattcccatttcaagatatagaactggaaaagcaaccatttccaaaaaagtttcctttctctgaatttgtgccaaaagtttacaaccaaattaaagaatttatctacgcttgtctgaagttttcagaagatcttcatctaagctcaactgaagttgatgacatgattcggaaatcaacaaacctgttgctaaccaggactctgagcaactctctgcagaatgtaattaaaaggaagaatattgggcttactgagcttgttcagattattatcaatacaacacatttggagaaatcctgtaagtacttggaagaatttatcaccaacatcactaatgtgcttccagagacagttcacactaccaagctctatggcaccacaacttttaaggatgctagacatgcagctgaagaagagatttataccaacttaaaccagaagattgaccagttcctacagctggcagactatgactggatgaccggagatttgggcaacaaagctagtgattacctggtagacctcattgcctttcttcgtagcacctttgctgtattcacacaccttcctggaaaggtggcccagacagcgtgtatgtcagcttgcaagcatttagccacatccttgatgcaacttttgttggaagctgaagtgcggcagctcaccttgggagcattacagcagttcaacttggacgtcagagaatgtgaacagtttgccagatccggcccggtgcctgggttccaggaggacacgctgcagttggccttcatcgacttgagacaacttttggatcttttcatccagtgggattggtcaacctaccttgctgactatggtcagcccaactgcaagtacctccgggtaaacccagtgactgctctgaccctgcttgagaagatgaaggatactagccgcaagaacaacatgtttgcacagtttcggaaaaatgagcgagacaagcagaaactcattgacaccgtggccaagcagctccgaggactcatcagcagccaccactcatgaagggtgaccccggacccacagaggcgacctgctgcagcctctgtgtcagtctggggtccagccccagctgaccctgcatttgtgcattcttcttcaaagagagcatatgtatttttttattaacccctgtgcagtattcacataacatttccctatagtaaaagaggcacaagaataagcaagtacatgagatgttgctaggctgggactcaggggaagttattactacactatctgtgttatcttagagatggtggtatcatcaattccacagtgatgaaccacctttcatccatggctctaaagcttaggtctggggcttaggaaccataaaaagtgggtatctggcgctgggaggtagagtgagtaagcaaaaggatactaaaatatgtcctgttcactcttggatgcccattcaccacatagatgaggctgattcttctcaatacaaggaaagggcatggcaaacattactatttagtacactaagggcagctctggagggtcatctcctcagtctgctgactttcactggcttgtgaacaagcatggcatatggcaagatgacagcttcattccaatcccccaagaatggcggtttctttagcctgatctaaccccaggcttttattgcaattttttctagggcaggatacagctaagtagacagcagtaataattggatcccatgtttaactgcatattgccccagctctaggagtgttgagtctcaactcgaagagtttttctggatcttgaaagccagttttcatggaatcagagacccaatcccttccctgttcatctcatttccttcacttacagtcagagcacttggttcaggacataaatcaacagttacttccataggccttcacagggcgtttcagacttagcctcctccagtaatgccattgaaatagttcagatttcggaagcctaaaaatggcctttaccttacccttaggtgtaacctgaggattagttgggattgttcctttatgttttaaaaccagctttttggttatcatctttaaggaaatgtcaccagctctgcactgtgggggcagccatgcctggactggatgcctctagggatggagacattgttaccataaagtcgacagagccaaccatggcttgtggcttgttgcctctggcccaactgtccttcactaaataatatcctagatattattttgttgctcaagcccaaggttcccaccctcttttgagatccccaaagccatctttggccttgtctaagaaagattgcctataatcctgtcctccaaactctaaagcctggagcagcttagcgtggaggctgcactcattgacccagatggactcctgagacttaacgcaagggctttgctatgaggtcagtcgggggaaactgtactttaagacacttcagaaagatgctactggctagtagcagaaagatggctagtggcaagagtataattgtgcatcaccaaacaatgacaaataagccacacaggcatttccagcttggattgatgggaggagagactcatcaaacagaattcttcactacctttgtcagctactgagttgcttctggggagggaagtacttccttgcccctccccaacccccctacctcaccatatcctatcatatcttgatagtcatggggaagaggatgtgcacacagacatacaaatttcctcaaagctggagagaccaggctacatgtgagctcatagatgctgctgaggctcatcctgagggctggatggttggccagggtttcagaatgagggtaagggatgagcactgccacccagaacttgataagccaagagaaggcaggagccaaaatggcatcgccaagctctcatctttgttgaaacaagtgagaaacgattatattaatctgaagttctattgcttgagaagagttcaaaacacttctctttgctagtacccagtttgcagcaagatctcttcagctttaagtgctgagagactttgaagtggaaatggagagatgtgtaagcatggcacagtgtttgtctttttagaggatcatcattgctggtctggtctcaaacctctgccttggaagaactgtgctatacaggaaaaagtgaacaaggtggaggaataggggttattctgcacagaagtcccatgaaaggaaaagcttattcaagctcaagacataaagatggaccctttgatatatcttctctccattcttagtctgccttcaccttatctaacaaaaaacaacatgcagctactgagttgtatgtagagacatactcttggtgggccagggaaggtaaaaacagggaccagcaatgtcaagtttttgaactagaaaagtgggatgtttttagttttgtctataacctgtagctgggccaacccttgagaggacttgtgcaaagcatgtgtgcccagacccatcagactcctcagatatggcctcaaatacctagagatgtagaagtaccgtggagggcctcaataagagggcaagcacacagatggctagaagcctgtatggcttctggtcaggatgaacccttggccaagttcttgaggaaaccaggtctatattcctgaagggacagttcagtttgggactctattaggtttcagtagtaatataggctgcttgcatcattttaacattcatagggaaaatctctttgagcaggctataaatgaagctgttgcaggtagggaagaacaggacctgaaaatgggaaccaggaagtgagatcctgttggcaaagggaatgtagagcttccagggtgcattgcccactgttctcattgcataccagtcctccaagtcagtctagccttactgtacacttgacaagtgcttactcagcaagtcccagacccacggccttttatctcccaagactggctttggccatgaccttcctcatcaggcctctgagcacactctctaggaactgctgcagaaattcccctaccttagcctcccttctcccaggactcctctcttgactgcaattgcctcttcttcttcttcttcttcttcctttttgttttttttttttttgcctgcattcacaattacttttcacaaaggtgttggaaatggcatttttattttacacagatagttgcacatatatagagaaaattaggaaagtccatttttaactctaaagggaacttttttctctaaaacttacttgtaaagctactgatacagatgggccgcatggttaggggaaagctcctctgtgaaaagagcatgtttattcctcttgtacattttcctcttttaactgctattaaacaagaaagcctacatacctgtttcaaaagcca

SEQ ID NO: 131524 - DNA, 1372 bp, Homo sapiens
  Payload ID: 5669
  Gene Symbol: EXOC6B
  Gene Name: exocyst complex component 6B
  ENST ID: ENST00000410112
  CDS Start-End: 96-218
gcggctgtggagcctgtggtgggagcggcattgtggggcagggaaaaggtgagccgagccgacggaggggacgcgctgcggggcgcccccagtctatggagcggggtaagatggcggaggcggagagcctggagacagcggcagagcacgagcggatcctgcgagagatcgagagcactgacacggcctgcatcgggcccacgctcagaatcaagtgacggatactaatagaaaactacaacatgagggaaaggaactggtaatagcaatggaagagctgaagcagtgtcgactacaacagagaaatatttctgccactgttgataaattaatgctgtgtcttccagtcctagagatgtacagcaaactgagggaccagatgaaaactaaaaggcattatcctgcactgaaaactctggaacatctagagcatacctacctgcctcaagtaagccactatcgattctgcaaggtgatggtggacaacatccccaagcttcgagaagaaataaaagatgtttctatgtccgatctcaaagactttctggagagcatccgcaaacattcagacaaaattggagagactgccatgaagcaagcccagcagcaaagaaacctggataacatcgtcttgcaacaacccagaataggtagcaagaggaaatctaagaaagatgcatatataatctttgatacagagatagaaagtactagtccgaagtctgaacaggattcaggaattctggatgttgaagacgaggaagatgatgaagaggtacctggggcccaagatttggtggatttctctccagtttatcgatgtctacatatatattctgtcctgggtgcccgggaaacatttgagaattactaccgaaaacagaggcgaaaacaggctcgtttggtacttcaacctccatctaacatgcatgaaactttagatggctacaggaagtattttaatcaaattgtaggcttttttgtggttgaagatcacattttacatacaacccagggcttagtaaatagagcctacattgatgaactgtgggaaatggcactttcaaaaaccatcgcagcactccgtacccactcgtcttactgttctgatccaaaccttgtgttagatttgaagaacctcattgtgctttttgctgacacacttcaggtgtatggtttccctgtaaatcagctttttgacatgctgttagaaatcagagaccaatatagtgaaactctgctaaagaagtgggcaggtattttcagaaacatacttgattctgacaactacagtcctataccagtaacaagtgaagagatgtacaaaaaggtggtaggacaattcccatttcaagatatagaactggaaaag

SEQ ID NO: 131525 - DNA, 5795 bp, Homo sapiens
  Payload ID: 5669
  Gene Symbol: EXOC6B
  Gene Name: exocyst complex component 6B
  ENST ID: ENST00000410104
  CDS Start-End: 132-2177
agggaggggtcggcctgcgggtagccagaggctggggcggctgtggagcctgtggtgggagcggcattgtggggcagggaaaaggtgagccgagccgacggaggggacgcgctgcggggcgcccccagtctatggagcggggtaagatggcggaggcggagagcctggagacagcggcagagcacgagcggatcctgcgagagatcgagagcactgacacggcctgcatcgggcccacgctcaggtctgtttatgatggtgaagaacatggacgtttcatggagaagcttgaaactcgtatccgtaatcacgaccgagaaattgagaaaatgtgcaactttcattaccagggctttgtggactctataactgaactgctgaaagtgagaggagaagcccagaaactcaaaaatcaagtgacggatactaatagaaaactacaacatgagggaaaggaactggtaatagcaatggaagagctgaagcagtgtcgactacaacagagaaatatttctgccactgttgataaattaatgctgtgtcttccagtcctagagatgtacagcaaactgagggaccagatgaaaactaaaaggcattatcctgcactgaaaactctggaacatctagagcatacctacctgcctcaagtaagccactatcgattctgcaaggtgatggtggacaacatccccaagcttcgagaagaaataaaagatgtttctatgtccgatctcaaagactttctggagagcatccgcaaacattcagacaaaattggagagactgccatgaagcaagcccagcagcaaagaaacctggataacatcgtcttgcaacaacccagaataggtagcaagaggaaatctaagaaagatgcatatataatctttgatacagagatagaaagtactagtccgaagtctgaacaggattcaggaattctggatgttgaagacgaggaagatgatgaagaggtacctggggcccaagatttggtggatttctctccagtttatcgatgtctacatatatattctgtcctgggtgcccgggaaacatttgagaattactaccgaaaacagaggcgaaaacaggctcgtttggtacttcaacctccatctaacatgcatgaaactttagatggctacaggaagtattttaatcaaattgtaggcttttttgtggttgaagatcacattttacatacaacccagggcttagtaaatagagcctacattgatgaactgtgggaaatggcactttcaaaaaccatcgcagcactccgtacccactcgtcttactgttctgatccaaaccttgtgttagatttgaagaacctcattgtgctttttgctgacacacttcaggtgtatggtttccctgtaaatcagctttttgacatgctgttagaaatcagagaccaatatagtgaaactctgctaaagaagtgggcaggtattttcagaaacatacttgattctgacaactacagtcctataccagtaacaagtgaagagatgtacaaaaaggtggtaggacaattcccatttcaagatatagaactggaaaagcaaccatttccaaaaaagtttcctttctctgaatttgtgccaaaagtttacaaccaaattaaagaatttatctacgcttgtctgaagttttcagaagatcttcatctaagctcaactgaagttgatgacatgattcggaaatcaacaaacctgttgctaaccaggactctgagcaactctctgcagaatgtaattaaaaggaagaatattgggcttactgagcttgttcagattattatcaatacaacacatttggagaaatcctgtaagtacttggaagaatttatcaccaacatcactaatgtgcttccagagacagttcacactaccaagctctatggcaccacaacttttaaggatgctagacatgcagctgaagaagagatttataccaacttaaaccagaagattgaccagttcctacagctggcagactatgactggatgaccggagatttgggcaacaaagctagtgattacctggtagacctcattgcctttcttcgtagcacctttgctgtattcacacaccttcctgtaagtggcagttgcttactttgtcctttatatataaaaagatttccttataatttagtttggtgaaagatgttagtttctgctgtaactacccaggaagattttcagtatataaaggcgcatgctatatttattaacctttaatgatatgtagaggctacttccatcattttttcattgacctttgcatttttttcatctgaaaatggttcctggtattatgtctgcttatcttcctatgatgttcaaggtaattagtacaaagacaatataaaagccttggtagaattaaaaaaagaaacttagttagaatttcagatatgtatattttagttttagaatattctttaacttttttatataaactgaaattctttgatgaaatgctccatcttttttatctaatttgtctatgttttctctgttttcttaagcatattaattatagacattcaaaatcattctttactacttcttatatatattatacatacatattggtggattttttttctcttggttttcagtgatatggtcctgtctgtttctaatatttttcggttgatgttagacattgtataaaatatgtagagattccaggtggtgttatcttccaccagaaaaggttcatgttttcctttacttagtaaatagaatgggcaggtgggttgtggtttgaagctgaccaccttagtaccatcatggactgatttggattaatattgggttgcagttgtagtgtactttgtttgcccttgttggtaggatatggctctgcagagcttttaaaaactgcctgatatgtcattgtctttttagcaccaaagaggactatagaaattcctgctcttcacagaaaccttgtctgttcagcctcctgtactctttcgttttagaatctggtaaatgtcttgagaaggagacttagcagtacccagtatcagcaattgctgatgggaaaaaaagtgttggggattgtcagtgttactttaccatccctaatgaggtttcagctcctatgtgatctgaatgtttgtgtaccccaaaaaatcatatgttgaatctaataaccagtgtgattacattaggaggtgaggccttgggaggtgatagattatgatggtagagcctcgcaaatgggattagtatacttataaaagagacttcagagagctgccttgttccttgtggccatgtgaggatacggggatacaggaagaagactccttttttatttcgcactaggaaataggccttcatcagacaccgaatctgctgataccttgatgttggacttccaagcctccagaactgtgagaattcttttgtttataagctaccagtctatgggattttgttacattattctgaatggactaagatagctcctgtcatttttaggcattcttctactagtgagtctttttctctgaaacactgtgaaactgtgagaaatctccttgcttttcaaagattttggcttaaacccttattttcctcagccgtttagctttagaattcagtaaatatcttgagggtaaaactagtcctcaaacctctaactgtggcactctagtctgttggaagcagcaaagattccaagtttttttcgccccctagtagttagtctctgcctggttttaagattctcagtctgttgcccttgtctacgttcctcaaatgcccacaaggaaagctgcagattttcacctcacctttaaaaggttttgtcctctctgcagttttattccctttagtcttcattgcttcacagcacctgatgccttttaatatgttttttctacatgttttacttcctctcctagttgttcctagtgggagcatttatctgcagaaaattatgtcattttgtctagctttatcctgataccaaagccagacaaaaagagcacacacaaaaaaactatgagttaatctcacaattatggataaaagtaaaataaataaaattttagcaagtcaattcccagtgttttaagaaagtaattttgtactagtgtgtaggatttattccagaaatgcaaggatggtttgatattttaaaaaaatatgttaatataatttatcatattactaggtgagggagatacagtttcttgatgtattctagaaagacattttattacatccaggctacattcttgatttaaaaacaaagtttactaaattccaagcagtataatattttaataacaaaataaagaacatctatttgaaatttagtggccaccatagattgaacagtagaacaataaaacatttattttcattgacaacaggaattgggtgaagatgcttctcaccaacactttagaagttctataaaataaatgtaaaaaaagaataaattacattataatgagccatgcatgtcttagtccattcctgctcccataacaagatactgtagactgagaaatttataaacaacagaaatttgtttctcacagttctggaggctgcaaagtccaatattaagatgtcagcagattcagtgtctgataaagtcctgttactcataaatggcacctctgtatccttacgtggcagagaaggcaaaaaggacaaactcactcccccaatcccttctataaggcactaatccaattaatgagtgatgtaatcacttctgaaatttttgtgccctcccccacaaaaattaaaaattaaaaaaaataacaaagttgcattggggattaaatttcaatatgaattttggcaaggctcaaacatttcaaaccatagcacatgcatattattattcataggttattattatctaaatagaacatactaaaaattcattaagaccaataagagtttaggttagatgattcacttagaaaacaaataaacttttcttatattagcaatgcccacatagaaaatatagtgtcaaaagtgtcttatttactattgggacatagatataatttttctatgcagctacttagcaagtcaatttagaaataatgtgacaacatcacagagtaatataaaagagactttcttatgcacaaatatatatggtattccaggatgggagtatttcattctgtagaaagttttttcaaatttaatctaattgcagtgagtatcaagtaaatttgtttagggaagaatcttaatgaaatcattctgaaattcatttgtaagcaaaaatggacaatatttggtaaaaaatgataacatgaacataatttgtaactctattaataagacatacaaattaagcttgtgtgatatttttgactataaactactcagaaataagaaaatggtaacactccttgtttataagaaatatttgtggaaataggtattttcatacctgctgctaggggtctagttattgtagtctttttggagtcagtttttcaatatgcctcagaaaccccttaaaatgtgcttacctttttactatgtaattccccttttagaatttgaacttaatgaaataatcatgattgtattataatattcagatgtaactatatttaatacaatgtattttgtatagcgaggagtaggtataaattaaaaatccaacaaacaaatgtgttcacaaactaaattattgtatattcatataatgtgatattcattaaattaatgtaaatttatatttattcattaaaaatatattcgttatttcttaactgg

SEQ ID NO: 131526 - DNA, 2583 bp, Homo sapiens
  Payload ID: 5669
  Gene Symbol: EXOC6B
  Gene Name: exocyst complex component 6B
  ENST ID: ENST00000634650
  CDS Start-End: 110-2557
agccagaggctggggcggctgtggagcctgtggtgggagcggcattgtggggcagggaaaaggtgagccgagccgacggaggggacgcgctgcggggcgcccccagtctatggagcggggtaagatggcggaggcggagagcctggagacagcggcagagcacgagcggatcctgcgagagatcgagagcactgacacggcctgcatcgggcccacgctcaggtctgtttatgatggtgaagaacatggacgtttcatggagaagcttgaaactcgtatccgtaatcacgaccgagaaattgagaaaatgtgcaactttcattaccagggctttgtggactctataactgaactgctgaaagtgagaggagaagcccagaaactcaaaaatcaagtgacggatactaatagaaaactacaacatgagggaaaggaactggtaatagcaatggaagagctgaagcagtgtcgactacaacagagaaatatttctgccactgttgataaattaatgctgtgtcttccagtcctagagatgtacagcaaactgagggaccagatgaaaactaaaaggcattatcctgcactgaaaactctggaacatctagagcatacctacctgcctcaagtaagccactatcgattctgcaaggtgatggtggacaacatccccaagcttcgagaagaaataaaagatgtttctatgtccgatctcaaagactttctggagagcatccgcaaacattcagacaaaattggagagactgccatgaagcaagcccagcagcaaagaaacctggataacatcgtcttgcaacaacccagaataggtagcaagaggaaatctaagaaagatgcatatataatctttgatacagagatagaaagtactagtccgaagtctgaacaggattcaggaattctggatgttgaagacgaggaagatgatgaagaggtacctggggcccaagatttggtggatttctctccagtttatcgatgtctacatatatattctgtcctgggtgcccgggaaacatttgagaattactaccgaaaacagaggcgaaaacaggctcgtttggtacttcaacctccatctaacatgcatgaaactttagatggctacaggaagtattttaatcaaattgtaggcttttttgtggttgaagatcacattttacatacaacccagggcttagtaaatagagcctacattgatgaactgtgggaaatggcactttcaaaaaccatcgcagcactccgtacccactcgtcttactgttctgatccaaaccttgtgttagatttgaagaacctcattgtgctttttgctgacacacttcaggtgtatggtttccctgtaaatcagctttttgacatgctgttagaaatcagagaccaatatagtgaaactctgctaaagaagtgggcaggtattttcagaaacatacttgattctgacaactacagtcctataccagtaacaagtgaagagatgtacaaaaaggtggtaggacaattcccatttcaagatatagaactggaaaagcaaccatttccaaaaaagtttcctttctctgaatttgtgccaaaagtttacaaccaaattaaagaatttatctacgcttgtctgaagttttcagaagatcttcatctaagctcaactgaagttgatgacatgattcggaaatcaacaaacctgttgctaaccaggactctgagcaactctctgcagaatgtaattaaaaggaagaatattgggcttactgagcttgttcagattattatcaatacaacacatttggagaaatcctgtaagtacttggaagaatttatcaccaacatcactaatgtgcttccagagacagttcacactaccaagctctatggcaccacaacttttaaggatgctagacatgcagctgaagaagagatttataccaacttaaaccagaagattgaccagttcctacagctggcagactatgactggatgaccggagatttgggcaacaaagctagtgattacctggtagacctcattgcctttcttcgtagcacctttgctgtattcacacaccttcctggaaaggtggcccagacagcgtgtatgtcagcttgcaagcatttagccacatccttgatgcaacttttgttggaagctgaagtgcggcagctcaccttgggagcattacagcagttcaacttggacgtcagagaatgtgaacagtttgccagatccggcccggtgcctgggttccaggaggacacgctgcagttggccttcatcgacttgagacaacttttggatcttttcatccagtgggattggtcaacctaccttgctgactatggtcagcccaactgcaagtacctccgggtaaacccagtgactgctctgaccctgcttgagaagatatctagagagatgaaggatactagccgcaagaacaacatgtttgcacagtttcggaaaaatgagcgagacaagcagaaactcattgacaccgtggccaagcagctccgaggactcatcagcagccaccactcatgaagggtgaccccggacccacagaggcg

SEQ ID NO: 131527 - DNA, 4596 bp, Homo sapiens
  Payload ID: 5670
  Gene Symbol: EXOC7
  Gene Name: exocyst complex component 7
  Uniprot ID: Q9UPT5
  ENST ID: ENST00000332065
  CDS Start-End: 4-1965
gcgatgattcccccacaggaggcatccgctcgacggcgggagattgaggacaagctgaagcaggaggaggagactctgtccttcatccgagacagcctggagaagagcgaccagctcactaagaacatggtgtctatcttatcatcctttgagagccgccttatgaagctggagaactccatcatccctgtgcacaagcagacggagaatctgcagcggctgcaggagaatgttgagaagacgctgtcctgcctggaccatgtcatcagctactaccatgtggccagtgacactgagaagatcatcagagagggccccacaggtaggctggaagagtacctgggaagcatggccaagattcagaaggcagtggagtatttccaggacaacagcccagacagcccggaactcaacaaagtgaaactgctctttgagcgcgggaaggaggccctggagtccgaatttcgcagcctgatgacgcggcacagtaaggtcgtctcgcccgtgctcatcttggatctgatcagtggtgacgatgatctggaggcccaggaggacgtgaccctggagcacctgcccgagagcgtgctccaggatgtcattcgcatctcccgctggctggtggaatatggccgcaaccaagatttcatgaacgtctactaccagatacgctccagccagctggaccgctccatcaaaggactgaaggagcatttccataagagcagttcttcctctggggttccctactcccctgctatccccaacaagaggaaagacacacctaccaagaagccagtcaagcggccagggagagatgacatgctggacgtggagaccgatgcctacatccactgcgtcagtgccttcgtcaagctggcgcagagcgagtaccagctgctggccgacatcatccccgagcaccaccagaagaagaccttcgactccctgatacaggatgccctggatgggctgatgcttgaaggggagaacatcgtgtctgctgcccggaaggccattgtgcgacacgacttctccacggtgctcaccgtcttccccatcctgcgacacctcaagcagaccaagcctgagtttgaccaggtgctccagggcacggctgccagcacaaagaacaagctgcctggcctcatcacatccatggagaccatcggtgccaaagcgctggaggacttcgcagacaacatcaagaatgacccggacaaggagtacaacatgccgaaggacggcaccgtacacgagctcaccagcaatgccatcctcttcctgcagcagcttttggacttccaggagacggcaggcgccatgctggcctcccaagagaccagctcttcggccaccagctacagctctgagttcagcaagcggctgctaagcacctatatctgtaaagtgctgggcaacctgcagttgaacttgctgagcaagtccaaggtgtacgaggacccagctctgagcgccatcttcctgcacaacaactacaattacatcctcaagtccctggagaagtctgaactgatccagctggtggcagtgacacagaagactgctgagcgctcctaccgggagcacattgagcagcagatccagacctaccagcgcagctggttaaaggtgactgattacatcgcagagaagaatctacctgtgttccagccgggagtcaagctccgggacaaggagcggcagattatcaaggagcgttttaagggcttcaatgatggcctcgaagaactgtgcaaaatccagaaggcctgggctattccagacacagagcagagggacaggattcgccaggcccagaagaccattgtcaaggagacctacggggcctttctacagaagtttggcagcgtgcccttcaccaagaacccggagaagtacatcaagtacggggtggagcaggtgggcgacatgatcgatcgccttttcgacacctctgcctgagcctgctgctagccctgcctggttccaccagactggcgtgtcattggacagataaaccagtgttagcttgcctctgggctgggtgagcttgaagtcctctgggacagagacctgtctccacgcctccgggagctgtgtccctgagccccctagtcctggctcctgctttttccccacagcccgtgttcccagccgaaccagcactctcccggaagcctggggtccctccacaccttggcttttatgaccctgatggcttctgaaacaggaaaagagagaaggaagacagaggcctgtgcccactgctgctccatgtgtaccaagagcagcagggcagaagggccctccctccagcctaggtcagaggtggggacagagaactcccctacagcccagagatgtggcagggctcagagaagcagccagagctcctggaggaaaggcagtcgggactgaccccctctcttaaaacacattcccgcccgcccacaggcctgaggtctgggacctttccctcccaggagtcccctaggtggctgggggaggcaggctcactggccattttccctagagtccagcacactgcaggaggcgttcggaggaggagttccgccccaccctctacagccttcctcaggcccctgtctctggcccccagcctcagtgcctcttggcccagggccaggcagtcgtggttgcagaaggagcaattaggctgcctgcctgtgggctgggagacagggacaatggggaaaagttaaggagcaaaatgggggttggaagcaaaaaatagggccccacctatttaggacgagattgaagactgacccttgaggcacacttgcactggagatgggtttatttcacgctctgtgcttgtgtgctagcggagggagagctcagggtggcttaatccagaggccctgtcatggcccgcccccagccatgggaaagcaaacttcatcctaaggtgtgcagcccaggccctgcccctttacagtctaggccgcctgccatggggtgcagcctctccaggggctgcgtcagacttgcacgctgcccacatccagattcctgcaaagacgaattgggtgcacagcaccccaaccacatacacgaggaagaagatgcggtcagcagtctcaggccagcttctctgtgacccctttactcctctggagggctctgtggggagagatacagggaaaggagctgttcttcaaggtcccctcaacatgagcggaagagcgaaccccaggggtcatcagcctgtatcgcttcctttcttagattctcagctgatgaaaatttgggtctggcccatttcaggccatcttcagttgaagaaacaccctcttaggctgtgcaaggcatgggttatcaggggattgaggtcacctgggacttcagggaggctcagcttgctccctgccccagacctgtttcttctaagggaggaggacatggtggagaccagggacaggagagccagcagggtggatgcaaggggcctctacccacacctggacctccgtgccctcaccccagccctaggtgtgcacctaggcctcattccttaccccccagcccctgcccaccttcagcaggatgaggccctgggttgccgtgctctcgctgttcccctctcggggctgggctggggccgctcttggccccaaggttgccccgggccagcagcccagccagcagcacagtctctatggtgctgaggaagagcagcagcagcaggatggtgaagtagtaaactgggggaggcagggcacagggagatgctcaggggccagtccctgtgtctctggtgcccagcgagctgagcaccagtgggtgaccggggagaaacagggcagactgggtaagggagcagggcttactgagcagtgggttgcaggaggaggagctgggcagggcctgcaccagggaggagtggaggacgaggtaactcagcagcaatgtcaccttgtagcctatgcgctcaatggcccggaggggcagcaaccccccgcacacgtcagccaacagcagtgcctctgcaggcaccaagagagcgatgatggacttgagcgccgtgttcttcagcctcagctggaaggggaaaagtcagggccttcccggcgggggggaaggaggtgggcatcgggggcatggggcctggcctctggccgtgcatcctcactcccacccgcctccagcagccctctgtcggcctcctcccgacttgactcaccgtcacctggaagcagggcaccagctgctggggtgggacttgggtcttcagatcataaactacgtattccctcttgacactcacaatctcgttcaccacgtgggcctggaactctaactccatcgctgaggggtgggaatgagaactatgaaccaggaaggagagatcccagctgccaagtctgggggtagcagactggagcccaggggtgatggagacttttgatggcttttggcagggacagacttggacacaaaaccgatccatagaagggcttcccaaaccttgttttgcaacatcccaaattgtctccagttgaaggaaggcctttatcagattcatagatgagctttcattgtaaaaataaatgtactttgcaccacttc

SEQ ID NO: 131528 - DNA, 3519 bp, Homo sapiens
  Payload ID: 5670
  Gene Symbol: EXOC7
  Gene Name: exocyst complex component 7
  Uniprot ID: Q9UPT5
  ENST ID: ENST00000335146
  CDS Start-End: 55-2262
ggtgggcccgcggaggaaagatactggggagtgggagccgcggggttcagagcgatgattcccccacaggaggcatccgctcgacggcgggagattgaggacaagctgaagcaggaggaggagactctgtccttcatccgagacagcctggagaagagcgaccagctcactaagaacatggtgtctatcttatcatcctttgagagccgccttatgaagctggagaactccatcatccctgtgcacaagcagacggagaatctgcagcggctgcaggagaatgttgagaagacgctgtcctgcctggaccatgtcatcagctactaccatgtggccagtgacactgagaagatcatcagagagggccccacaggtaggctggaagagtacctgggaagcatggccaagattcagaaggcagtggagtatttccaggacaacagcccagacagcccggaactcaacaaagtgaaactgctctttgagcgcgggaaggaggccctggagtccgaatttcgcagcctgatgacgcggcacagtaaggtcgtctcgcccgtgctcatcttggatctgatcagtggtgacgatgatctggaggcccaggaggacgtgaccctggagcacctgcccgagagcgtgctccaggatgtcattcgcatctcccgctggctggtggaatatggccgcaaccaagatttcatgaacgtctactaccagatacgctccagccagctggaccgctccatcaaaggactgaaggagcatttccataagagcagttcttcctctggggttccctactcccctgctatccccaacaagaggaaagacacacctaccaagaagccagtcaagcggccagggacgatccgtaaggctcagaaccttctgaaacagtattcccagcatggtctagatgggaaaaaggggggctctaacctcattcctctggaagggcttcttccctgtaccccaaggggcggcctgcctggcccctggataaacgctgcttgtgtttgtgcggccgacatctcgccaggtcacgagcatgatttccgagttaagcacctgtccgaggccttgaacgacaagcacgggccgctggccgggagagatgacatgctggacgtggagaccgatgcctacatccactgcgtcagtgccttcgtcaagctggcgcagagcgagtaccagctgctggccgacatcatccccgagcaccaccagaagaagaccttcgactccctgatacaggatgccctggatgggctgatgcttgaaggggagaacatcgtgtctgctgcccggaaggccattgtgcgacacgacttctccacggtgctcaccgtcttccccatcctgcgacacctcaagcagaccaagcctgagtttgaccaggtgctccagggcacggctgccagcacaaagaacaagctgcctggcctcatcacatccatggagaccatcggtgccaaagcgctggaggacttcgcagacaacatcaagaatgacccggacaaggagtacaacatgccgaaggacggcaccgtacacgagctcaccagcaatgccatcctcttcctgcagcagcttttggacttccaggagacggcaggcgccatgctggcctcccaagagaccagctcttcggccaccagctacagctctgagttcagcaagcggctgctaagcacctatatctgtaaagtgctgggcaacctgcagttgaacttgctgagcaagtccaaggtgtacgaggacccagctctgagcgccatcttcctgcacaacaactacaattacatcctcaagtccctggagaagtctgaactgatccagctggtggcagtgacacagaagactgctgagcgctcctaccgggagcacattgagcagcagatccagacctaccagcgcagctggttaaaggtgactgattacatcgcagagaagaatctacctgtgttccagccgggagtcaagctccgggacaaggagcggcagattatcaaggagcgttttaagggcttcaatgatggcctcgaagaactgtgcaaaatccagaaggcctgggctattccagacacagagcagagggacaggattcgccaggcccagaagaccattgtcaaggagacctacggggcctttctacagaagtttggcagcgtgcccttcaccaagaacccggagaagtacatcaagtacggggtggagcaggtgggcgacatgatcgatcgccttttcgacacctctgcctgagcctgctgctagccctgcctggttccaccagactggcgtgtcattggacagataaaccagtgttagcttgcctctgggctgggtgagcttgaagtcctctgggacagagacctgtctccacgcctccgggagctgtgtccctgagccccctagtcctggctcctgctttttccccacagcccgtgttcccagccgaaccagcactctcccggaagcctggggtccctccacaccttggcttttatgaccctgatggcttctgaaacaggaaaagagagaaggaagacagaggcctgtgcccactgctgctccatgtgtaccaagagcagcagggcagaagggccctccctccagcctaggtcagaggtggggacagagaactcccctacagcccagagatgtggcagggctcagagaagcagccagagctcctggaggaaaggcagtcgggactgaccccctctcttaaaacacattcccgcccgcccacaggcctgaggtctgggacctttccctcccaggagtcccctaggtggctgggggaggcaggctcactggccattttccctagagtccagcacactgcaggaggcgttcggaggaggagttccgccccaccctctacagccttcctcaggcccctgtctctggcccccagcctcagtgcctcttggcccagggccaggcagtcgtggttgcagaaggagcaattaggctgcctgcctgtgggctgggagacagggacaatggggaaaagttaaggagcaaaatgggggttggaagcaaaaaatagggccccacctatttaggacgagattgaagactgacccttgaggcacacttgcactggagatgggtttatttcacgctctgtgcttgtgtgctagcggagggagagctcagggtggcttaatccagaggccctgtcatggcccgcccccagccatgggaaagcaaacttcatcctaaggtgtgcagcccaggccctgcccctttacagtctaggccgcctgccatggggtgcagcctctccaggggctgcgtcagacttgcacgctgcccacatccagattcctgcaaagacgaattgggtgcacagcaccccaaccacatacacgaggaagaagatgcggtcagcagtctcaggccagcttctctgtgacccctttactcctctggagggctctgtggggagagatacagggaaaggagctgttcttcaaggtcccctcaacatgagcggaagagcgaacccca

SEQ ID NO: 131529 - DNA, 1924 bp, Homo sapiens
  Payload ID: 5670
  Gene Symbol: EXOC7
  Gene Name: exocyst complex component 7
  ENST ID: ENST00000357231
  CDS Start-End: 1-1853
tatcatcctttgagagccgccttatgaagctggagaactccatcatccctgtgcacaagcagacggagaatctgcagcggctgcaggagaatgttgagaagacgctgtcctgcctggaccatgtcatcagctactaccatgtggccagtgacactgagaagatcatcagagagggccccacaggtaggctggaagagtacctgggaagcatggccaagattcagaaggcagtggagtatttccaggacaacagcccagacagcccggaactcaacaaagtgaaactgctctttgagcgcgggaaggaggccctggagtccgaatttcgcagcctgatgacgcggcacagtaaggtcgtctcgcccgtgctcatcttggatctgatcagtggtgacgatgatctggaggcccaggaggacgtgaccctggagcacctgcccgagagcgtgctccaggatgtcattcgcatctcccgctggctggtggaatatggccgcaaccaagatttcatgaacgtctactaccagatacgctccagccagctggaccgctccatcaaaggactgaaggagcatttccataagagcagttcttcctctggggttccctactcccctgctatccccaacaagaggaaagacacacctaccaagaagccagtcaagcggccagggacgatccgtaaggctcagaaccttctgaaacagtattcccagcatggtctagatgggaaaaaggggggctctaacctcattcctctggaagggagagatgacatgctggacgtggagaccgatgcctacatccactgcgtcagtgccttcgtcaagctggcgcagagcgagtaccagctgctggccgacatcatccccgagcaccaccagaagaagaccttcgactccctgatacaggatgccctggatgggctgatgcttgaaggggagaacatcgtgtctgctgcccggaaggccattgtgcgacacgacttctccacggtgctcaccgtcttccccatcctgcgacacctcaagcagaccaagcctgagtttgaccaggtgctccagggcacggctgccagcacaaagaacaagctgcctggcctcatcacatccatggagaccatcggtgccaaagcgctggaggacttcgcagacaacatcaagaatgacccggacaaggagtacaacatgccgaaggacggcaccgtacacgagctcaccagcaatgccatcctcttcctgcagcagcttttggacttccaggagacggcaggcgccatgctggcctcccaaggtaaagtgctgggcaacctgcagttgaacttgctgagcaagtccaaggtgtacgaggacccagctctgagcgccatcttcctgcacaacaactacaattacatcctcaagtccctggagaagtctgaactgatccagctggtggcagtgacacagaagactgctgagcgctcctaccgggagcacattgagcagcagatccagacctaccagcgcagctggttaaaggtgactgattacatcgcagagaagaatctacctgtgttccagccgggagtcaagctccgggacaaggagcggcagattatcaaggagcgttttaagggcttcaatgatggcctcgaagaactgtgcaaaatccagaaggcctgggctattccagacacagagcagagggacaggattcgccaggcccagaagaccattgtcaaggagacctacggggcctttctacagaagtttggcagcgtgcccttcaccaagaacccggagaagtacatcaagtacggggtggagcaggtgggcgacatgatcgatcgccttttcgacacctctgcctgagcctgctgctagccctgcctggttccaccagactggcgtgtcattggacagataaaccagtgttagcttgc

SEQ ID NO: 131530 - DNA, 2208 bp, Homo sapiens
  Payload ID: 5670
  Gene Symbol: EXOC7
  Gene Name: exocyst complex component 7
  ENST ID: ENST00000405575
  CDS Start-End: 55-2136
ggtgggcccgcggaggaaagatactggggagtgggagccgcggggttcagagcgatgattcccccacaggaggcatccgctcgacggcgggagattgaggacaagctgaagcaggaggaggagactctgtccttcatccgagacagcctggagaagagcgaccagctcactaagaacatggtgtctatcttatcatcctttgagagccgccttatgaagctggagaactccatcatccctgtgcacaagcagacggagaatctgcagcggctgcaggagaatgttgagaagacgctgtcctgcctggaccatgtcatcagctactaccatgtggccagtgacactgagaagatcatcagagagggccccacaggtaggctggaagagtacctgggaagcatggccaagattcagaaggcagtggagtatttccaggacaacagcccagacagcccggaactcaacaaagtgaaactgctctttgagcgcgggaaggaggccctggagtccgaatttcgcagcctgatgacgcggcacagtaaggtcgtctcgcccgtgctcatcttggatctgatcagtggtgacgatgatctggaggcccaggaggacgtgaccctggagcacctgcccgagagcgtgctccaggatgtcattcgcatctcccgctggctggtggaatatggccgcaaccaagatttcatgaacgtctactaccagatacgctccagccagctggaccgctccatcaaaggactgaaggagcatttccataagagcagttcttcctctggggttccctactcccctgctatccccaacaagaggaaagacacacctaccaagaagccagtcaagcggccagggacgatccgtaaggctcagaaccttctgaaacagtattcccagcatggtctagatgggaaaaaggggggctctaacctcattcctctggaaggtcacgagcatgatttccgagttaagcacctgtccgaggccttgaacgacaagcacgggccgctggccgggagagatgacatgctggacgtggagaccgatgcctacatccactgcgtcagtgccttcgtcaagctggcgcagagcgagtaccagctgctggccgacatcatccccgagcaccaccagaagaagaccttcgactccctgatacaggatgccctggatgggctgatgcttgaaggggagaacatcgtgtctgctgcccggaaggccattgtgcgacacgacttctccacggtgctcaccgtcttccccatcctgcgacacctcaagcagaccaagcctgagtttgaccaggtgctccagggcacggctgccagcacaaagaacaagctgcctggcctcatcacatccatggagaccatcggtgccaaagcgctggaggacttcgcagacaacatcaagaatgacccggacaaggagtacaacatgccgaaggacggcaccgtacacgagctcaccagcaatgccatcctcttcctgcagcagcttttggacttccaggagacggcaggcgccatgctggcctcccaagagaccagctcttcggccaccagctacagctctgagttcagcaagcggctgctaagcacctatatctgtaaagtgctgggcaacctgcagttgaacttgctgagcaagtccaaggtgtacgaggacccagctctgagcgccatcttcctgcacaacaactacaattacatcctcaagtccctggagaagtctgaactgatccagctggtggcagtgacacagaagactgctgagcgctcctaccgggagcacattgagcagcagatccagacctaccagcgcagctggttaaaggtgactgattacatcgcagagaagaatctacctgtgttccagccgggagtcaagggcttcaatgatggcctcgaagaactgtgcaaaatccagaaggcctgggctattccagacacagagcagagggacaggattcgccaggcccagaagaccattgtcaaggagacctacggggcctttctacagaagtttggcagcgtgcccttcaccaagaacccggagaagtacatcaagtacggggtggagcaggtgggcgacatgatcgatcgccttttcgacacctctgcctgagcctgctgctagccctgcctggttccaccagactggcgtgtcattggacagataaaccagtgttagcttgcc

SEQ ID NO: 131531 - DNA, 718 bp, Homo sapiens
  Payload ID: 5670
  Gene Symbol: EXOC7
  Gene Name: exocyst complex component 7
  ENST ID: ENST00000406660
  CDS Start-End: 43-522
gaggaaagatactggggagtgggagccgcggggttcagagcgatgattcccccacaggaggcatccgctcgacggcgggagattgaggacaagctgaagcaggaggaggagactctgtccttcatccgagacagcctggagaagagcgaccagctcactaagaacatggtgtctatcttatcatcctttgagagccgccttatgaagctggagaactccatcatccctgtgcacaagcagacggagaatctgcagcggctgcaggagaatgttgagaagacgctgtcctgcctggaccatgtcatcagctactaccatgtggccagtgacactgagaagatcatcagagagggccccacaggtaggctggaagagtacctgggaagcatggccaagattcagaaggcagtggagtatttccaggacaacagcccagacagcccggaactcaacaaagtggtaaggggtccgcagaataacgtgagaagcttggggatatcagtctctgccctggtctcatgagggacatggagccagcttgaggatgtatgcagtagaatacacagaaggatatagcacagtacatcctataggcattaggatctctgcttcaagaattgcacattttttattattaaaaattctttattataaaacttgttaatgtattataaaaattaaattataaattacatataaaatataaacttaacatttg

SEQ ID NO: 131532 - DNA, 583 bp, Homo sapiens
  Payload ID: 5670
  Gene Symbol: EXOC7
  Gene Name: exocyst complex component 7
  ENST ID: ENST00000442951
  CDS Start-End: 221-583
agttctggaatgggcagcgacggaggcagtgtgtgggtttatctagcaacagtttggcatctctcctgcctagccccctccccatgttccgtaccctcactgaggaggctgcacttcccactggcctggacttgctgctttctgtctaagctcgccattcttccttctctccttctgcaaacactcagtgtctatcttatcatcctttgagagccgccttatgaagctggagaactccatcatccctgtgcacaagcagacggagaatctgcagcggctgcaggagaatgttgagaagacgctgtcctgcctggaccatgtcatcagctactaccatgtggccagtgacactgagaagatcatcagagagggccccacaggtaggctggaagagtacctgggaagcatggccaagattcagaaggcagtggagtatttccaggacaacagcccagacagcccggaactcaacaaagtgaaactgctctttgagcgcgggaaggaggccctggagtccgaatttcgcagcctgatgacgcggcacagtaaggtcgtctcgcccgtgctcatcttggatctgatc

SEQ ID NO: 131533 - DNA, 543 bp, Homo sapiens
  Payload ID: 5670
  Gene Symbol: EXOC7
  Gene Name: exocyst complex component 7
  ENST ID: ENST00000420116
  CDS Start-End: 178-543
agcaacagtttggcatctctcctgcctagccccctccccatgttccgtaccctcactgaggaggctgcacttcccactggcctggacttgctgctttctgtctaagctcgccattcttccttctctccttctgcaaacactcaccccacaggtaggctggaagagtacctgggaagcatggccaagattcagaaggcagtggagtatttccaggacaacagcccagacagcccggaactcaacaaagtgaaactgctctttgagcgcgggaaggaggccctggagtccgaatttcgcagcctgatgacgcggcacagtaaggtcgtctcgcccgtgctcatcttggatctgatcagtggtgacgatgatctggaggcccaggaggacgtgaccctggagcacctgcccgagagcgtgctccaggatgtcattcgcatctcccgctggctggtggaatatggccgcaaccaagatttcatgaacgtctactaccagatacgctccagccagctggaccgctccatcaaaggactgaaggagcat

SEQ ID NO: 131534 - DNA, 2031 bp, Homo sapiens
  Payload ID: 5670
  Gene Symbol: EXOC7
  Gene Name: exocyst complex component 7
  Uniprot ID: Q9UPT5
  ENST ID: ENST00000411744
  CDS Start-End: 1-2031
atgattcccccacaggaggcatccgctcgacggcgggagattgaggacaagctgaagcaggaggaggagactctgtccttcatccgagacagcctggagaagagcgaccagctcactaagaacatggtgtctatcttatcatcctttgagagccgccttatgaagctggagaactccatcatccctgtgcacaagcagacggagaatctgcagcggctgcaggagaatgttgagaagacgctgtcctgcctggaccatgtcatcagctactaccatgtggccagtgacactgagaagatcatcagagagggccccacaggtaggctggaagagtacctgggaagcatggccaagattcagaaggcagtggagtatttccaggacaacagcccagacagcccggaactcaacaaagtgaaactgctctttgagcgcgggaaggaggccctggagtccgaatttcgcagcctgatgacgcggcacagtaaggtcgtctcgcccgtgctcatcttggatctgatcagtggtgacgatgatctggaggcccaggaggacgtgaccctggagcacctgcccgagagcgtgctccaggatgtcattcgcatctcccgctggctggtggaatatggccgcaaccaagatttcatgaacgtctactaccagatacgctccagccagctggaccgctccatcaaaggactgaaggagcatttccataagagcagttcttcctctggggttccctactcccctgctatccccaacaagaggaaagacacacctaccaagaagccagtcaagcggccaggtcacgagcatgatttccgagttaagcacctgtccgaggccttgaacgacaagcacgggccgctggccgggagagatgacatgctggacgtggagaccgatgcctacatccactgcgtcagtgccttcgtcaagctggcgcagagcgagtaccagctgctggccgacatcatccccgagcaccaccagaagaagaccttcgactccctgatacaggatgccctggatgggctgatgcttgaaggggagaacatcgtgtctgctgcccggaaggccattgtgcgacacgacttctccacggtgctcaccgtcttccccatcctgcgacacctcaagcagaccaagcctgagtttgaccaggtgctccagggcacggctgccagcacaaagaacaagctgcctggcctcatcacatccatggagaccatcggtgccaaagcgctggaggacttcgcagacaacatcaagaatgacccggacaaggagtacaacatgccgaaggacggcaccgtacacgagctcaccagcaatgccatcctcttcctgcagcagcttttggacttccaggagacggcaggcgccatgctggcctcccaagagaccagctcttcggccaccagctacagctctgagttcagcaagcggctgctaagcacctatatctgtaaagtgctgggcaacctgcagttgaacttgctgagcaagtccaaggtgtacgaggacccagctctgagcgccatcttcctgcacaacaactacaattacatcctcaagtccctggagaagtctgaactgatccagctggtggcagtgacacagaagactgctgagcgctcctaccgggagcacattgagcagcagatccagacctaccagcgcagctggttaaaggtgactgattacatcgcagagaagaatctacctgtgttccagccgggagtcaagctccgggacaaggagcggcagattatcaaggagcgttttaagggcttcaatgatggcctcgaagaactgtgcaaaatccagaaggcctgggctattccagacacagagcagagggacaggattcgccaggcccagaagaccattgtcaaggagacctacggggcctttctacagaagtttggcagcgtgcccttcaccaagaacccggagaagtacatcaagtacggggtggagcaggtgggcgacatgatcgatcgccttttcgacacctctgcctga

SEQ ID NO: 131535 - DNA, 2260 bp, Homo sapiens
  Payload ID: 5670
  Gene Symbol: EXOC7
  Gene Name: exocyst complex component 7
  ENST ID: ENST00000467929
  CDS Start-End: 161-2131
gaggagatggggttgggggctaggccgtggggttgggacgcagtggtctcctttagcttctggtttctggtgatgtcctccccttgcctgcccccaggaggaggagactctgtccttcatccgagacagcctggagaagagcgaccagctcactaagaacatggtgtctatcttatcatcctttgagagccgccttatgaagctggagaactccatcatccctgtgcacaagcagacggagaatctgcagcggctgcaggagaatgttgagaagacgctgtcctgcctggaccatgtcatcagctactaccatgtggccagtgacactgagaagatcatcagagagggccccacaggtaggctggaagagtacctgggaagcatggccaagattcagaaggcagtggagtatttccaggacaacagcccagacagcccggaactcaacaaagtgaaactgctctttgagcgcgggaaggaggccctggagtccgaatttcgcagcctgatgacgcggcacagtaaggtcgtctcgcccgtgctcatcttggatctgatcagtggtgacgatgatctggaggcccaggaggacgtgaccctggagcacctgcccgagagcgtgctccaggatgtcattcgcatctcccgctggctggtggaatatggccgcaaccaagatttcatgaacgtctactaccagatacgctccagccagctggaccgctccatcaaaggactgaaggagcatttccataagagcagttcttcctctggggttccctactcccctgctatccccaacaagaggaaagacacacctaccaagaagccagtcaagcggccagggacgatccgtaaggctcagaaccttctgaaacagtattcccagcatggtctagatgggaaaaaggggggctctaacctcattcctctggaagggagagatgacatgctggacgtggagaccgatgcctacatccactgcgtcagtgccttcgtcaagctggcgcagagcgagtaccagctgctggccgacatcatccccgagcaccaccagaagaagaccttcgactccctgatacaggatgccctggatgggctgatgcttgaaggggagaacatcgtgtctgctgcccggaaggccattgtgcgacacgacttctccacggtgctcaccgtcttccccatcctgcgacacctcaagcagaccaagcctgagtttgaccaggtgctccagggcacggctgccagcacaaagaacaagctgcctggcctcatcacatccatggagaccatcggtgccaaagcgctggaggacttcgcagacaacatcaagaatgacccggacaaggagtacaacatgccgaaggacggcaccgtacacgagctcaccagcaatgccatcctcttcctgcagcagcttttggacttccaggagacggcaggcgccatgctggcctcccaagttcttggggacacatacaatattcctttagacccccgagagaccagctcttcggccaccagctacagctctgagttcagcaagcggctgctaagcacctatatctgtaaagtgctgggcaacctgcagttgaacttgctgagcaagtccaaggtgtacgaggacccagctctgagcgccatcttcctgcacaacaactacaattacatcctcaagtccctggagaagtctgaactgatccagctggtggcagtgacacagaagactgctgagcgctcctaccgggagcacattgagcagcagatccagacctaccagcgcagctggttaaaggtgactgattacatcgcagagaagaatctacctgtgttccagccgggagtcaagctccgggacaaggagcggcagattatcaaggagcgttttaagggcttcaatgatggcctcgaagaactgtgcaaaatccagaaggcctgggctattccagacacagagcagagggacaggattcgccaggcccagaagaccattgtcaaggagacctacggggcctttctacagaagtttggcagcgtgcccttcaccaagaacccggagaagtacatcaagtacggggtggagcaggtgggcgacatgatcgatcgccttttcgacacctctgcctgagcctgctgctagccctgcctggttccaccagactggcgtgtcattggacagataaaccagtgttagcttgcctctgggctgggtgagcttgaagtcctctgggacagagacctgtctccacgcctccgg

SEQ ID NO: 131536 - DNA, 645 bp, Homo sapiens
  Payload ID: 5670
  Gene Symbol: EXOC7
  Gene Name: exocyst complex component 7
  ENST ID: ENST00000592559
  CDS Start-End: 1-102
tctggggttccctactcccctgctatccccaacaagaggaaagacacacctaccaagaagccagtcaagcggccaggatgccctggatgggctgatgcttgaaggggagaacatcgtgtctgctgcccggaaggccattgtgcgacacgacttctccacggtgctcaccgtcttccccatcctgcgacacctcaagcagaccaagcctgagtttgaccaggtgctccagggcacggctgccagcacaaagaacaagctgcctggcctcatcacatccatggagaccatcggtgccaaagcgctggaggacttcgcagacaacatcaagaatgacccggacaaggagtacaacatgccgaaggacggcaccgtacacgagctcaccagcaatgccatcctcttcctgcagcagcttttggacttccaggagacggcaggcgccatgctggcctcccaagagaccagctcttcggccaccagctacagctctgagttcagcaagcggctgctaagcacctatatctgtaaagtgctgggcaacctgcagttgaacttgctgagcaagtccaaggtgtacgaggacccagctctgagcgccatcttcctgcacaacaactacaattacatcctcaagtccctggagaa

SEQ ID NO: 131537 - DNA, 820 bp, Homo sapiens
  Payload ID: 5670
  Gene Symbol: EXOC7
  Gene Name: exocyst complex component 7
  ENST ID: ENST00000589507
  CDS Start-End: 317-820
gcccgggctcgcctcacctccccgcctgcttaagccctcccggagcgctcggggttcgacccccgagcacggcgggaggagggcgcccccctgcggcacagccacgtccacgaagcccctcccggggttctagaaagcggaggcctccgaaggaaagaccaagatgcagagagatgtctaaaaggtgccagaaggtgactatccagccctggtatcactgcctggtgatttcgtttctttgatcttcacgaatggcctcactggctgtgatttggacagaaatcagctgccacgtgcaacattctcccatgggaacatgtgtccgcagtacctatctcagagcccaaatccttcctgccccacagccttctcctggaacctgccttgggaggcatccgctcgacggcgggagattgaggacaagctgaagcaggaggaggagactctgtccttcatccgagacagcctggagaagagcgaccagctcactaagaacatggtgtctatcttatcatcctttgagagccgccttatgaagctggagaactccatcatccctgtgcacaagcagacggagaatctgcagcggctgcaggagaatgttgagaagacgctgtcctgcctggaccatgtcatcagctactaccatgtggccagtgacactgagaagatcatcagagagggccccacaggtaggctggaagagtacctgggaagcatggccaagattcagaaggcagtggagtatttccaggacaacagcccagacagcccggaactcaacaaagtgaaactgctctttgagcgcgggaaggaggcc

SEQ ID NO: 131538 - DNA, 4751 bp, Homo sapiens
  Payload ID: 5670
  Gene Symbol: EXOC7
  Gene Name: exocyst complex component 7
  Uniprot ID: Q9UPT5
  ENST ID: ENST00000589210
  CDS Start-End: 67-2121
ggacgggggcccggtgggcccgcggaggaaagatactggggagtgggagccgcggggttcagagcgatgattcccccacaggaggcatccgctcgacggcgggagattgaggacaagctgaagcaggaggaggagactctgtccttcatccgagacagcctggagaagagcgaccagctcactaagaacatggtgtctatcttatcatcctttgagagccgccttatgaagctggagaactccatcatccctgtgcacaagcagacggagaatctgcagcggctgcaggagaatgttgagaagacgctgtcctgcctggaccatgtcatcagctactaccatgtggccagtgacactgagaagatcatcagagagggccccacaggtaggctggaagagtacctgggaagcatggccaagattcagaaggcagtggagtatttccaggacaacagcccagacagcccggaactcaacaaagtgaaactgctctttgagcgcgggaaggaggccctggagtccgaatttcgcagcctgatgacgcggcacagtaaggtcgtctcgcccgtgctcatcttggatctgatcagtggtgacgatgatctggaggcccaggaggacgtgaccctggagcacctgcccgagagcgtgctccaggatgtcattcgcatctcccgctggctggtggaatatggccgcaaccaagatttcatgaacgtctactaccagatacgctccagccagctggaccgctccatcaaaggactgaaggagcatttccataagagcagttcttcctctggggttccctactcccctgctatccccaacaagaggaaagacacacctaccaagaagccagtcaagcggccagggacgatccgtaaggctcagaaccttctgaaacagtattcccagcatggtctagatgggaaaaaggggggctctaacctcattcctctggaagggagagatgacatgctggacgtggagaccgatgcctacatccactgcgtcagtgccttcgtcaagctggcgcagagcgagtaccagctgctggccgacatcatccccgagcaccaccagaagaagaccttcgactccctgatacaggatgccctggatgggctgatgcttgaaggggagaacatcgtgtctgctgcccggaaggccattgtgcgacacgacttctccacggtgctcaccgtcttccccatcctgcgacacctcaagcagaccaagcctgagtttgaccaggtgctccagggcacggctgccagcacaaagaacaagctgcctggcctcatcacatccatggagaccatcggtgccaaagcgctggaggacttcgcagacaacatcaagaatgacccggacaaggagtacaacatgccgaaggacggcaccgtacacgagctcaccagcaatgccatcctcttcctgcagcagcttttggacttccaggagacggcaggcgccatgctggcctcccaagagaccagctcttcggccaccagctacagctctgagttcagcaagcggctgctaagcacctatatctgtaaagtgctgggcaacctgcagttgaacttgctgagcaagtccaaggtgtacgaggacccagctctgagcgccatcttcctgcacaacaactacaattacatcctcaagtccctggagaagtctgaactgatccagctggtggcagtgacacagaagactgctgagcgctcctaccgggagcacattgagcagcagatccagacctaccagcgcagctggttaaaggtgactgattacatcgcagagaagaatctacctgtgttccagccgggagtcaagctccgggacaaggagcggcagattatcaaggagcgttttaagggcttcaatgatggcctcgaagaactgtgcaaaatccagaaggcctgggctattccagacacagagcagagggacaggattcgccaggcccagaagaccattgtcaaggagacctacggggcctttctacagaagtttggcagcgtgcccttcaccaagaacccggagaagtacatcaagtacggggtggagcaggtgggcgacatgatcgatcgccttttcgacacctctgcctgagcctgctgctagccctgcctggttccaccagactggcgtgtcattggacagataaaccagtgttagcttgcctctgggctgggtgagcttgaagtcctctgggacagagacctgtctccacgcctccgggagctgtgtccctgagccccctagtcctggctcctgctttttccccacagcccgtgttcccagccgaaccagcactctcccggaagcctggggtccctccacaccttggcttttatgaccctgatggcttctgaaacaggaaaagagagaaggaagacagaggcctgtgcccactgctgctccatgtgtaccaagagcagcagggcagaagggccctccctccagcctaggtcagaggtggggacagagaactcccctacagcccagagatgtggcagggctcagagaagcagccagagctcctggaggaaaggcagtcgggactgaccccctctcttaaaacacattcccgcccgcccacaggcctgaggtctgggacctttccctcccaggagtcccctaggtggctgggggaggcaggctcactggccattttccctagagtccagcacactgcaggaggcgttcggaggaggagttccgccccaccctctacagccttcctcaggcccctgtctctggcccccagcctcagtgcctcttggcccagggccaggcagtcgtggttgcagaaggagcaattaggctgcctgcctgtgggctgggagacagggacaatggggaaaagttaaggagcaaaatgggggttggaagcaaaaaatagggccccacctatttaggacgagattgaagactgacccttgaggcacacttgcactggagatgggtttatttcacgctctgtgcttgtgtgctagcggagggagagctcagggtggcttaatccagaggccctgtcatggcccgcccccagccatgggaaagcaaacttcatcctaaggtgtgcagcccaggccctgcccctttacagtctaggccgcctgccatggggtgcagcctctccaggggctgcgtcagacttgcacgctgcccacatccagattcctgcaaagacgaattgggtgcacagcaccccaaccacatacacgaggaagaagatgcggtcagcagtctcaggccagcttctctgtgacccctttactcctctggagggctctgtggggagagatacagggaaaggagctgttcttcaaggtcccctcaacatgagcggaagagcgaaccccaggggtcatcagcctgtatcgcttcctttcttagattctcagctgatgaaaatttgggtctggcccatttcaggccatcttcagttgaagaaacaccctcttaggctgtgcaaggcatgggttatcaggggattgaggtcacctgggacttcagggaggctcagcttgctccctgccccagacctgtttcttctaagggaggaggacatggtggagaccagggacaggagagccagcagggtggatgcaaggggcctctacccacacctggacctccgtgccctcaccccagccctaggtgtgcacctaggcctcattccttaccccccagcccctgcccaccttcagcaggatgaggccctgggttgccgtgctctcgctgttcccctctcggggctgggctggggccgctcttggccccaaggttgccccgggccagcagcccagccagcagcacagtctctatggtgctgaggaagagcagcagcagcaggatggtgaagtagtaaactgggggaggcagggcacagggagatgctcaggggccagtccctgtgtctctggtgcccagcgagctgagcaccagtgggtgaccggggagaaacagggcagactgggtaagggagcagggcttactgagcagtgggttgcaggaggaggagctgggcagggcctgcaccagggaggagtggaggacgaggtaactcagcagcaatgtcaccttgtagcctatgcgctcaatggcccggaggggcagcaaccccccgcacacgtcagccaacagcagtgcctctgcaggcaccaagagagcgatgatggacttgagcgccgtgttcttcagcctcagctggaaggggaaaagtcagggccttcccggcgggggggaaggaggtgggcatcgggggcatggggcctggcctctggccgtgcatcctcactcccacccgcctccagcagccctctgtcggcctcctcccgacttgactcaccgtcacctggaagcagggcaccagctgctggggtgggacttgggtcttcagatcataaactacgtattccctcttgacactcacaatctcgttcaccacgtgggcctggaactctaactccatcgctgaggggtgggaatgagaactatgaaccaggaaggagagatcccagctgccaagtctgggggtagcagactggagcccaggggtgatggagacttttgatggcttttggcagggacagacttggacacaaaaccgatccatagaagggcttcccaaaccttgttttgcaacatcccaaattgtctccagttgaaggaaggcctttatcagattcatagatgagctttcattgtaaaaataaatgtactttgcaccactt

SEQ ID NO: 131539 - DNA, 3353 bp, Homo sapiens
  Payload ID: 5670
  Gene Symbol: EXOC7
  Gene Name:: exocyst complex component 7
  ENST ID: ENST00000607838
  CDS Start-End: 127-2097
gcgatgattcccccacaggaggcatccgctcgacggcgggagattgaggacaagctgaagcaggaggaggagactctgtccttcatccgagacagcctggagaagagcgaccagctcactaagaacatggtgtctatcttatcatcctttgagagccgccttatgaagctggagaactccatcatccctgtgcacaagcagacggagaatctgcagcggctgcaggagaatgttgagaagacgctgtcctgcctggaccatgtcatcagctactaccatgtggccagtgacactgagaagatcatcagagagggccccacaggtaggctggaagagtacctgggaagcatggccaagattcagaaggcagtggagtatttccaggacaacagcccagacagcccggaactcaacaaagtgaaactgctctttgagcgcgggaaggaggccctggagtccgaatttcgcagcctgatgacgcggcacagtaaggtcgtctcgcccgtgctcatcttggatctgatcagtggtgacgatgatctggaggcccaggaggacgtgaccctggagcacctgcccgagagcgtgctccaggatgtcattcgcatctcccgctggctggtggaatatggccgcaaccaagatttcatgaacgtctactaccagatacgctccagccagctggaccgctccatcaaaggactgaaggagcatttccataagagcagttcttcctctggggttccctactcccctgctatccccaacaagaggaaagacacacctaccaagaagccagtcaagcggccagggacgatccgtaaggctcagaaccttctgaaacagtattcccagcatggtctagatgggaaaaaggggggctctaacctcattcctctggaagggagagatgacatgctggacgtggagaccgatgcctacatccactgcgtcagtgccttcgtcaagctggcgcagagcgagtaccagctgctggccgacatcatccccgagcaccaccagaagaagaccttcgactccctgatacaggatgccctggatgggctgatgcttgaaggggagaacatcgtgtctgctgcccggaaggccattgtgcgacacgacttctccacggtgctcaccgtcttccccatcctgcgacacctcaagcagaccaagcctgagtttgaccaggtgctccagggcacggctgccagcacaaagaacaagctgcctggcctcatcacatccatggagaccatcggtgccaaagcgctggaggacttcgcagacaacatcaagaatgacccggacaaggagtacaacatgccgaaggacggcaccgtacacgagctcaccagcaatgccatcctcttcctgcagcagcttttggacttccaggagacggcaggcgccatgctggcctcccaagttcttggggacacatacaatattcctttagacccccgagagaccagctcttcggccaccagctacagctctgagttcagcaagcggctgctaagcacctatatctgtaaagtgctgggcaacctgcagttgaacttgctgagcaagtccaaggtgtacgaggacccagctctgagcgccatcttcctgcacaacaactacaattacatcctcaagtccctggagaagtctgaactgatccagctggtggcagtgacacagaagactgctgagcgctcctaccgggagcacattgagcagcagatccagacctaccagcgcagctggttaaaggtgactgattacatcgcagagaagaatctacctgtgttccagccgggagtcaagctccgggacaaggagcggcagattatcaaggagcgttttaagggcttcaatgatggcctcgaagaactgtgcaaaatccagaaggcctgggctattccagacacagagcagagggacaggattcgccaggcccagaagaccattgtcaaggagacctacggggcctttctacagaagtttggcagcgtgcccttcaccaagaacccggagaagtacatcaagtacggggtggagcaggtgggcgacatgatcgatcgccttttcgacacctctgcctgagcctgctgctagccctgcctggttccaccagactggcgtgtcattggacagataaaccagtgttagcttgcctctgggctgggtgagcttgaagtcctctgggacagagacctgtctccacgcctccgggagctgtgtccctgagccccctagtcctggctcctgctttttccccacagcccgtgttcccagccgaaccagcactctcccggaagcctggggtccctccacaccttggcttttatgaccctgatggcttctgaaacaggaaaagagagaaggaagacagaggcctgtgcccactgctgctccatgtgtaccaagagcagcagggcagaagggccctccctccagcctaggtcagaggtggggacagagaactcccctacagcccagagatgtggcagggctcagagaagcagccagagctcctggaggaaaggcagtcgggactgaccccctctcttaaaacacattcccgcccgcccacaggcctgaggtctgggacctttccctcccaggagtcccctaggtggctgggggaggcaggctcactggccattttccctagagtccagcacactgcaggaggcgttcggaggaggagttccgccccaccctctacagccttcctcaggcccctgtctctggcccccagcctcagtgcctcttggcccagggccaggcagtcgtggttgcagaaggagcaattaggctgcctgcctgtgggctgggagacagggacaatggggaaaagttaaggagcaaaatgggggttggaagcaaaaaatagggccccacctatttaggacgagattgaagactgacccttgaggcacacttgcactggagatgggtttatttcacgctctgtgcttgtgtgctagcggagggagagctcagggtggcttaatccagaggccctgtcatggcccgcccccagccatgggaaagcaaacttcatcctaaggtgtgcagcccaggccctgcccctttacagtctaggccgcctgccatggggtgcagcctctccaggggctgcgtcagacttgcacgctgcccacatccagattcctgcaaagacgaattgggtgcacagcaccccaaccacatacacgaggaagaagatgcggtcagcagtctcaggccagcttctctgtgacccctttactcctctggagggctctgtggggagagatacagggaaaggagctgttcttcaaggtcccctcaacatgagcggaagagcgaacccc

SEQ ID NO: 131540 - DNA, 2124 bp, Homo sapiens
  Payload ID: 5670
  Gene Symbol: EXOC7
  Gene Name: exocyst complex component 7
  ENST ID: ENST00000634349
  CDS Start-End: 1-2124
atgattcccccacaggaggcatccgctcgacggcgggagattgaggacaagctgaagcaggaggaggagactctgtccttcatccgagacagcctggagaagagcgaccagctcactaagaacatggtgtctatcttatcatcctttgagagccgccttatgaagctggagaactccatcatccctgtgcacaagcagacggagaatctgcagcggctgcaggagaatgttgagaagacgctgtcctgcctggaccatgtcatcagctactaccatgtggccagtgacactgagaagatcatcagagagggccccacaggtaggctggaagagtacctgggaagcatggccaagattcagaaggcagtggagtatttccaggacaacagcccagacagcccggaactcaacaaagtgaaactgctctttgagcgcgggaaggaggccctggagtccgaatttcgcagcctgatgacgcggcacagtaaggtcgtctcgcccgtgctcatcttggatctgatcagtggtgacgatgatctggaggcccaggaggacgtgaccctggagcacctgcccgagagcgtgctccaggatgtcattcgcatctcccgctggctggtggaatatggccgcaaccaagatttcatgaacgtctactaccagatacgctccagccagctggaccgctccatcaaaggactgaaggagcatttccataagagcagttcttcctctggggttccctactcccctgctatccccaacaagaggaaagacacacctaccaagaagccagtcaagcggccagggacgatccgtaaggctcagaaccttctgaaacagtattcccagcatggtctagatgggaaaaaggggggctctaacctcattcctctggaaggtcacgagcatgatttccgagttaagcacctgtccgaggccttgaacgacaagcacgggccgctggccgggagagatgacatgctggacgtggagaccgatgcctacatccactgcgtcagtgccttcgtcaagctggcgcagagcgagtaccagctgctggccgacatcatccccgagcaccaccagaagaagaccttcgactccctgatacaggatgccctggatgggctgatgcttgaaggggagaacatcgtgtctgctgcccggaaggccattgtgcgacacgacttctccacggtgctcaccgtcttccccatcctgcgacacctcaagcagaccaagcctgagtttgaccaggtgctccagggcacggctgccagcacaaagaacaagctgcctggcctcatcacatccatggagaccatcggtgccaaagcgctggaggacttcgcagacaacatcaagaatgacccggacaaggagtacaacatgccgaaggacggcaccgtacacgagctcaccagcaatgccatcctcttcctgcagcagcttttggacttccaggagacggcaggcgccatgctggcctcccaagagaccagctcttcggccaccagctacagctctgagttcagcaagcggctgctaagcacctatatctgtaaagtgctgggcaacctgcagttgaacttgctgagcaagtccaaggtgtacgaggacccagctctgagcgccatcttcctgcacaacaactacaattacatcctcaagtccctggagaagtctgaactgatccagctggtggcagtgacacagaagactgctgagcgctcctaccgggagcacattgagcagcagatccagacctaccagcgcagctggttaaaggtgactgattacatcgcagagaagaatctacctgtgttccagccgggagtcaagctccgggacaaggagcggcagattatcaaggagcgttttaagggcttcaatgatggcctcgaagaactgtgcaaaatccagaaggcctgggctattccagacacagagcagagggacaggattcgccaggcccagaagaccattgtcaaggagacctacggggcctttctacagaagtttggcagcgtgcccttcaccaagaacccggagaagtacatcaagtacggggtggagcaggtgggcgacatgatcgatcgccttttcgacacctctgcctga

SEQ ID NO: 131541 - DNA, 5100 bp, Homo sapiens
  Payload ID: 5671
  Gene Symbol: EXOC8
  Gene Name: exocyst complex component 8
  Uniprot ID: Q8IYI6
  ENST ID: ENST00000366645
  CDS Start-End: 108-2285
attcctgcttcctcagcccaggagctcggttggccttgggtgggtctagacagccgcggcggctgcggcgccgatagtgacagtgagtgcgtgagacccggagagaaatggcgatggcgatgtcggacagtggggcgagccgcctgcgtcggcagctggagtcagggggttttgaggcgcggctgtacgtgaagcagctctcgcagcagtcggatggggaccgggacctccaggagcaccggcagcgcatccaggcgctggcggaggagacggcgcagaacctgaagcgcaacgtctaccagaactaccggcagttcatagagacggcccgcgagatctcctacctggagagcgagatgtaccagctcagccatttgctgaccgagcagaaaagcagcctggagagcatcccgcttacgttgctgcctgccgctgctgccgccggagccgccgccgcctctggaggggaggagggagtcggtggggcggggggccgagaccacctccgaggccaggccggctttttctccacccccgggggtgcctcccgcgacggctccggtccaggcgaggaaggaaagcagcgcactctcaccaccctgcttgagaaggtggaaggctgcaggcatctgctggagacgccgggacagtacttggtgtacaatggggacctagtggaatacgatgcggaccacatggcccaactgcagcgggtgcacggctttctcatgaacgattgcttgttggtggctacctggctgcctcagcggcgtgggatgtatcgctacaacgctctctattccctagatggtttggccgtagtcaatgtcaaggacaacccgcccatgaaggacatgttcaagctgcttatgttccccgagagccgtattttccaggccgaaaatgctaaaatcaaacgagagtggctggaagtgctggaggacaccaagagggccctcagtgagaaaaggcgaagggagcaggaggaggcagcggcccctcgagggccaccccaagtgacttccaaggccactaacccatttgaggatgacgaagaagaagaaccagctgttcctgaggtagaggaagagaaggtggacctctccatggaatggatccaggagttacctgaagacctggatgtctgcattgcgcagagagactttgaaggggcggttgacctgctggataaattgaaccattacctggaagataaacctagcccacctcctgtaaaagaactaagggccaaagtggaggagcgagttcgacagctcactgaggtgctagttttcgaactctccccagatcgttccctgagaggtggtccgaaggctactcgcagagcagtttcgcaactgatccggctgggccagtgcacgaaggcctgtgagctatttttgagaaacagggcagccgctgttcatactgcaattcgtcagcttcgcatcgaaggtgccactttactctatattcataagctgtgccatgtcttctttaccagccttctcgagactgcaagagaatttgagatcgattttgcaggcactgacagcggctgctactctgcctttgtggtctgggcaagatcagccatgggcatgttcgtggatgcttttagcaagcaggtgtttgatagtaaggagagcctctctacagcagctgagtgtgtaaaagtggctaaggagcattgccagcaactgggtgatatcggactggatctcaccttcatcatccatgcccttctggtgaaagacatccaaggggccttgcacagttacaaagaaatcatcattgaagccactaaacatcgcaactctgaagagatgtggaggaggatgaacttgatgacgccagaagccctgggtaagctcaaagaagagatgaaaagttgtggggtaagtaactttgagcagtacacaggggatgactgctgggtgaacctaagttacacagtggttgctttcaccaaacagaccatgggcttcttggaagaggccctgaagctgtatttcccagagctgcacatggtacttttggagagcctggtggaaatcattttggttgctgttcagcatgtggattatagtcttcgatgtgagcaggatccagagaagaaagcttttatcagacagaatgcatcctttttatatgaaacagtcctccctgtggtggagaaaaggtttgaagaaggtgtggggaaacctgccaagcaactccaagatctgaggaatgcatctagacttattcgtgtgaatcctgaaagtacaacatcagtggtctaatgcttgggtctgtttatatgtgtatatatgcagagagagagcttatatattatttatatttatattaagttgtattagcatactctatagtttcaaacacaacttgaaaattaaaagtgccctcttaaaaatacaaaaatcaaaaagaggaaaataagttaaattaagcccaagtaacaaaaatactggaattattaaaacgtatagtatgctagctatccttttaaattatgctaattctcttcttctgaaattatggtcacactatatactatagcatttcggttttatcctttgataaaacttttcttttttcttttttttttttgagacagggtctcaccccgtcgcacaggctggagtgcagtggcaaagtctcgactcactgcagccttgacctcccgggcccaggtagtcctcccacctcagcctcccatgtagcaggaaccacaggcaggcaccaccatacccagctaatttttgtattttttgtagagatggggtttcgccatgttgcccaggctagtcttttctttcttctttttttttttccccacagtatatattatacagcagtcataatatctataaatacatagagtttatgttgtgaagtttcccagttcactgaaatgttaggtttcctaaagggtacagtgccgtataaaacaacctgcctcatatatttctcctcaaaacgttggactatttgggaaaaggaaaagagttgggaaaattggttttaaggtaagttttagtcaaaagaattctttcttgaaactagctggtttgtggattcagatactctgatccttacagaatccaagaggaagctttcataaaaacaattcagcaaatatttccaatataatttgaatggctaattttcagttgctaattaattagcagctttgtaatacttgatttgggagcatttacttggaaatcctaaggactataataaaagttttcaacatatttctaaattgtgtgagtttccagctgtagcttttgtctttgtcacattttaaaaaataataagcaagacacattggggacactggcagcagttgccaggttttagctgccaccgcttcagtatgagatatagctgtcccatcttcccccattcagggtaggagatatagtgacccagacttcatgcaaatggaaaaaaagttttaactgaaatatttatttagatttcagggtctagatggatgggaaagtagaaaaacatatgcaaatctcagtgttctcactatgaccactctgagcagagatttggttttgtttccttttgtaacaaagtgaaaacaggtgagacaatgtgcccaaaacaaagggaagaagagaaccttctgtgactcctaaaatgttccatgctgcatttttgtttcattttttatttttccttgctttgtttttaaacatgaatataatgcttacttcaaattgtttagtaaaacaaaataactaaagaaatgtgagcttcccaaggtttctaaactatcgctgttgtatattctatagcgttccttattctttgagggaaactgtgcttgctgtgatccattttgtctctagcttctagttgtgattcttgtccataagcaccaaatttgatgcccatgatttcaaaaggtcatttcttttatctgaatgaaaatggtggtactaagactgtgaaaattatgtgaaacctaaagtagttgccaaagtggctcagggttgtaaaattcattgacttaattattcatgtgccagatcaacccctttattttctctttagctgtgcatatttaaaatattggaaagtatcagatttacagattttctttgactaatttttttcacataactttaggattttcgaaagttgtaaccataactggatatcttagctgagcaaaggcggttataatttgtctttttaagatcactggaaattgataaaattttgtgataattatgattattctgtgccatttacagtttctaatactatactgtatgaaatatgtataaatatatgatgctgagtctgtggaatgatacttctgaaatcaaaattcctcataaggcatgaagttgtaaaaacttgaatgtgtatagttagatatttaaatggttgcttcttcatagaattgtctgctttttaaaactggaagtacaggattttcttcaggtaaaatctgtgtgttccaattacagttgtagctgaaggaagtatgctttggtgagtcaattagtatgggaacttgactaaagacccccagtgttgtaacgtacctttgtacccagacaaaacaattatgttacattcctcaaagtggcatgggctttcttctctaattcttctgttttattagacccaagacaagttctaaaaattgaatgcaatgagagattgtccagaaatgtaatatatactaaaatataccacttaagcattgattgccttttcttgtttgcttcaagaatataaaacttgttacttgagcttggaatcatgggcttgattgaattaattactcttggggaaaaaagacaccttgtggcattaagtcttgctttggttaaagccttatttcacataattgctaaaaactcatttttgtttaatatactacctatagtttaattatcggcacttgtattttgtaacttgatatcttacctaggattgggaatttgggacatgacatgtactataaaagtcagtctatgtacatactgcttattgatgtgctgtgatatgagggaatctgaaatgtttcataaaaataaagcttaaaaattgtcttacactgga

SEQ ID NO: 131542 - DNA, 3192 bp, Homo sapiens
  Payload ID: 5672
  Gene Symbol: EXO1
  Gene Name: exonuclease 1
  Uniprot ID: Q9UQ84
  ENST ID: ENST00000348581
  CDS Start-End: 315-2855
gcctaaggaaacgtgtcgtctggaatgggcttgggggccacgcctgcacatctccgcgagacagagggataaagtgaagatggtgctgttattgttacctcgagtgccacatgcgacctctgagatatgtacacagtcattcttactatcgcactcagccattcttactacgctaaagaagaaataattattcgaggatatttgcctggcccagaagaaacttatgtaaatttcatgaactattatatccgttttcctcggagtgagagaaaactctttttagatatcatctgagaggtagttaatttggcaccatggggatacagggattgctacaatttatcaaagaagcttcagaacccatccatgtgaggaagtataaagggcaggtagtagctgtggatacatattgctggcttcacaaaggagctattgcttgtgctgaaaaactagccaaaggtgaacctactgataggtatgtaggattttgtatgaaatttgtaaatatgttactatctcatgggatcaagcctattctcgtatttgatggatgtactttaccttctaaaaaggaagtagagagatctagaagagaaagacgacaagccaatcttcttaagggaaagcaacttcttcgtgaggggaaagtctcggaagctcgagagtgtttcacccggtctatcaatatcacacatgccatggcccacaaagtaattaaagctgcccggtctcagggggtagattgcctcgtggctccctatgaagctgatgcgcagttggcctatcttaacaaagcgggaattgtgcaagccataattacagaggactcggatctcctagcttttggctgtaaaaaggtaattttaaagatggaccagtttggaaatggacttgaaattgatcaagctcggctaggaatgtgcagacagcttggggatgtattcacggaagagaagtttcgttacatgtgtattctttcaggttgtgactacctgtcatcactgcgtgggattggattagcaaaggcatgcaaagtcctaagactagccaataatccagatatagtaaaggttatcaagaaaattggacattatctcaagatgaatatcacggtaccagaggattacatcaacgggtttattcgggccaacaataccttcctctatcagctagtttttgatcccatcaaaaggaaacttattcctctgaacgcctatgaagatgatgttgatcctgaaacactaagctacgctgggcaatatgttgatgattccatagctcttcaaatagcacttggaaataaagatataaatacttttgaacagatcgatgactacaatccagacactgctatgcctgcccattcaagaagtcatagttgggatgacaaaacatgtcaaaagtcagctaatgttagcagcatttggcataggaattactctcccagaccagagtcgggtactgtttcagatgccccacaattgaaggaaaatccaagtactgtgggagtggaacgagtgattagtactaaagggttaaatctcccaaggaaatcatccattgtgaaaagaccaagaagtgcagagctgtcagaagatgacctgttgagtcagtattctctttcatttacgaagaagaccaagaaaaatagctctgaaggcaataaatcattgagcttttctgaagtgtttgtgcctgacctggtaaatggacctactaacaaaaagagtgtaagcactccacctaggacgagaaataaatttgcaacatttttacaaaggaaaaatgaagaaagtggtgcagttgtggttccagggaccagaagcaggtttttttgcagttcagattctactgactgtgtatcaaacaaagtgagcatccagcctctggatgaaactgctgtcacagataaagagaacaatctgcatgaatcagagtatggagaccaagaaggcaagagactggttgacacagatgtagcacgtaattcaagtgatgacattccgaataatcatattccaggtgatcatattccagacaaggcaacagtgtttacagatgaagagtcctactcttttgagagcagcaaatttacaaggaccatttcaccacccactttgggaacactaagaagttgttttagttggtctggaggtcttggagatttttcaagaacgccgagcccctctccaagcacagcattgcagcagttccgaagaaagagcgattcccccacctctttgcctgagaataatatgtctgatgtgtcgcagttaaagagcgaggagtccagtgacgatgagtctcatcccttacgagaagaggcatgttcttcacagtcccaggaaagtggagaattctcactgcagagttcaaatgcatcaaagctttctcagtgctctagtaaggactctgattcagaggaatctgattgcaatattaagttacttgacagtcaaagtgaccagacctccaagctacgtttatctcatttctcaaaaaaagacacacctctaaggaacaaggttcctgggctatataagtccagttctgcagactctctttctacaaccaagatcaaacctctaggacctgccagagccagtgggctgagcaagaagccggcaagcatccagaagagaaagcatcataatgccgagaacaagccggggttacagatcaaactcaatgagctctggaaaaactttggatttaaaaaagattctgaaaagcttcctccttgtaagaaacccctgtccccagtcagagataacatccaactaactccagaagcggaagaggatatatttaacaaacctgaatgtggccgtgttcaaagagcaatattccagtaaatgcagactgctgcaaagcttttgcctgcaagagaatctgatcaatttgaagtccctgtttgggaatgaggcacttatcagcatgaagaattttttctcattctgtgccattttaaaaatagaatacattttgtatattaactttataattgggttgtggtttttttgctcagctttttatatttttataagaagctaaatagaagaataattgtatctctgacaggtttttggaggttttagtgttaattgggaaaatcctctggagtttataaaagtctactctaaatatttctgtaatgttgtcaagtagaaagatagtaaatggagaaactac

SEQ ID NO: 131543 - DNA, 3473 bp, Homo sapiens
  Payload ID: 5672
  Gene Symbol: EXO1
  Gene Name: exonuclease 1
  Uniprot ID: Q9UQ84
  ENST ID: ENST00000366548
  CDS Start-End: 594-3134
ggaacccgcgcaaattgaaaggtcagcctttcgcgcgctgtgtaggcaagttacccgtgttctgcgttgccggccgtgggtgctctggccacagtgagttaggggcgtcggagcgggtttctccaaccgcaatcggctccgctcaaggggaggaggagagtcccttctcggaaggcctaaggaaacgtgtcgtctggaatgggcttgggggccacgcctgcacatctccgcgagacagagggataaagtgaagatggtgctgttattgttacctcgagtgccacatgcgacctctgagatatgtacacagtcattcttactatcgcactcagccattcttactacgctaaagaagaaataattattcgaggatatttgcctggcccagaagaaacttatgtaaatttcatgaactattatatccgttttcctcggagtgagagaaaactctttttagatatcatctgagagaactagtgaatcccagtcactgagtggagttgagagtctaagaacctctgaaatttgagaactgctggaccagagcctttagagctctgataaggtgtcaacagggtagttaatttggcaccatggggatacagggattgctacaatttatcaaagaagcttcagaacccatccatgtgaggaagtataaagggcaggtagtagctgtggatacatattgctggcttcacaaaggagctattgcttgtgctgaaaaactagccaaaggtgaacctactgataggtatgtaggattttgtatgaaatttgtaaatatgttactatctcatgggatcaagcctattctcgtatttgatggatgtactttaccttctaaaaaggaagtagagagatctagaagagaaagacgacaagccaatcttcttaagggaaagcaacttcttcgtgaggggaaagtctcggaagctcgagagtgtttcacccggtctatcaatatcacacatgccatggcccacaaagtaattaaagctgcccggtctcagggggtagattgcctcgtggctccctatgaagctgatgcgcagttggcctatcttaacaaagcgggaattgtgcaagccataattacagaggactcggatctcctagcttttggctgtaaaaaggtaattttaaagatggaccagtttggaaatggacttgaaattgatcaagctcggctaggaatgtgcagacagcttggggatgtattcacggaagagaagtttcgttacatgtgtattctttcaggttgtgactacctgtcatcactgcgtgggattggattagcaaaggcatgcaaagtcctaagactagccaataatccagatatagtaaaggttatcaagaaaattggacattatctcaagatgaatatcacggtaccagaggattacatcaacgggtttattcgggccaacaataccttcctctatcagctagtttttgatcccatcaaaaggaaacttattcctctgaacgcctatgaagatgatgttgatcctgaaacactaagctacgctgggcaatatgttgatgattccatagctcttcaaatagcacttggaaataaagatataaatacttttgaacagatcgatgactacaatccagacactgctatgcctgcccattcaagaagtcatagttgggatgacaaaacatgtcaaaagtcagctaatgttagcagcatttggcataggaattactctcccagaccagagtcgggtactgtttcagatgccccacaattgaaggaaaatccaagtactgtgggagtggaacgagtgattagtactaaagggttaaatctcccaaggaaatcatccattgtgaaaagaccaagaagtgcagagctgtcagaagatgacctgttgagtcagtattctctttcatttacgaagaagaccaagaaaaatagctctgaaggcaataaatcattgagcttttctgaagtgtttgtgcctgacctggtaaatggacctactaacaaaaagagtgtaagcactccacctaggacgagaaataaatttgcaacatttttacaaaggaaaaatgaagaaagtggtgcagttgtggttccagggaccagaagcaggtttttttgcagttcagattctactgactgtgtatcaaacaaagtgagcatccagcctctggatgaaactgctgtcacagataaagagaacaatctgcatgaatcagagtatggagaccaagaaggcaagagactggttgacacagatgtagcacgtaattcaagtgatgacattccgaataatcatattccaggtgatcatattccagacaaggcaacagtgtttacagatgaagagtcctactcttttgagagcagcaaatttacaaggaccatttcaccacccactttgggaacactaagaagttgttttagttggtctggaggtcttggagatttttcaagaacgccgagcccctctccaagcacagcattgcagcagttccgaagaaagagcgattcccccacctctttgcctgagaataatatgtctgatgtgtcgcagttaaagagcgaggagtccagtgacgatgagtctcatcccttacgagaagaggcatgttcttcacagtcccaggaaagtggagaattctcactgcagagttcaaatgcatcaaagctttctcagtgctctagtaaggactctgattcagaggaatctgattgcaatattaagttacttgacagtcaaagtgaccagacctccaagctacgtttatctcatttctcaaaaaaagacacacctctaaggaacaaggttcctgggctatataagtccagttctgcagactctctttctacaaccaagatcaaacctctaggacctgccagagccagtgggctgagcaagaagccggcaagcatccagaagagaaagcatcataatgccgagaacaagccggggttacagatcaaactcaatgagctctggaaaaactttggatttaaaaaagattctgaaaagcttcctccttgtaagaaacccctgtccccagtcagagataacatccaactaactccagaagcggaagaggatatatttaacaaacctgaatgtggccgtgttcaaagagcaatattccagtaaatgcagactgctgcaaagcttttgcctgcaagagaatctgatcaatttgaagtccctgtttgggaatgaggcacttatcagcatgaagaattttttctcattctgtgccattttaaaaatagaatacattttgtatattaactttataattgggttgtggtttttttgctcagctttttatatttttataagaagctaaatagaagaataattgtatctctgacaggtttttggaggttttagtgttaattgggaaaatcctctggagtttataaaagtctactctaaatatttctgtaatgttgtcaagtagaaagatagtaaatggagaaactacaa

SEQ ID NO: 131544 - DNA, 607 bp, Homo sapiens
  Payload ID: 5672
  Gene Symbol: EXO1
  Gene Name: exonuclease 1
  ENST ID: ENST00000450748
  CDS Start-End: 203-607
cttatgtaaatttcatgaactattatatccgttttcctcggagtgagagaaaactctttttagatatcatctgagagcagaactagtgaatcccagtcactgagtggagttgagagtctaagaacctctgaaatttgagaactgctggaccagagcctttagagctctgataaggtgtcaacagggtagttaatttggcaccatggggatacagggattgctacaatttatcaaagaagcttcagaacccatccatgtgaggaagtataaagggcaggtagtagctgtggatacatattgctggcttcacaaaggagctattgcttgtgctgaaaaactagccaaaggtgaacctactgataggtatgtaggattttgtatgaaatttgtaaatatgttactatctcatgggatcaagcctattctcgtatttgatggatgtactttaccttctaaaaaggaagtagagagatctagaagagaaagacgacaagccaatcttcttaagggaaagcaacttcttcgtgaggggaaagtctcggaagctcgagagtgtttcacccggtctatcaatatcacacatgccatggcccacaaagtaattaaa

SEQ ID NO: 131545 - DNA, 593 bp, Homo sapiens
  Payload ID: 5672
  Gene Symbol: EXO1
  Gene Name: exonuclease 1
  ENST ID: ENST00000437497
  CDS Start-End: 96-593
acttatgtaaatttcatgaactattatatccgttttcctcggagtgagagaaaactctttttagatatcatctgagaggtagttaatttggcaccatggggatacagggattgctacaatttatcaaagaagcttcagaacccatccatgtgaggaagtataaagggcaggtagtagctgtggatacatattgctggcttcacaaaggagctattgcttgtgctgaaaaactagccaaaggtgaacctactgatagaagacgacaagccaatcttcttaagggaaagcaacttcttcgtgaggggaaagtctcggaagctcgagagtgtttcacccggtctatcaatatcacacatgccatggcccacaaagctgcccggtctcagggggtagattgcctcgtggctccctatgaagctgatgcgcagttggcctatcttaacaaagcgggaattgtgcaagccataattacagaggactcggatctcctagcttttggctgtaaaaaggtaattttaaagatggaccagtttggaaatggacttgaaattgatcaagctcggctaggaatgtgcagacagcttggggatgta

SEQ ID NO: 131546 - DNA, 950 bp, Homo sapiens
  Payload ID: 5672
  Gene Symbol: EXO1
  Gene Name: exonuclease 1
  ENST ID: ENST00000423131
  CDS Start-End: 444-950
gcaagttacccgtgttctgcgttgccggccgtgggtgctctggccacagtgagttaggggcgtcggagcgggtttctccaaccgcaatcggctccgctcaaggggaggaggagagtcccttctcggaaggcctaaggaaacgtgtcgtctggaatgggcttgggggccacgcctgcacatctccgcgagacagagggataaagtgaagatggtgctgttattgttacctcgagtgccacatgcgacctctgagatatgtacacagtcattcttactatcgcactcagccattcttactacgctaaagaagaaataattattcgaggatatttgcctggcccagaagaaacttatgtaaatttcatgaactattatatccgttttcctcggagtgagagaaaactctttttagatatcatctgagaggtagttaatttggcaccatggggatacagggattgctacaatttatcaaagaagcttcagaacccatccatgtgaggaagtataaagggcaggtagtagctgtggatacatattgctggcttcacaaaggagctattgcttgtgctgaaaaactagccaaaggtgaacctactgatagaagacgacaagccaatcttcttaagggaaagcaacttcttcgtgaggggaaagtctcggaagctcgagagtgtttcacccggtctatcaatatcacacatgccatggcccacaaagtaattaaagctgcccggtctcagggggtagattgcctcgtggctccctatgaagctgatgcgcagttggcctatcttaacaaagcgggaattgtgcaagccataattacagaggactcggatctcctagcttttggctgtaaaaaggtaattttaaagatggaccagtttggaaatggacttgaaattgatcaagctcggctaggaatgtgcagacagcttggggatgta

SEQ ID NO: 131547 - DNA, 628 bp, Homo sapiens
  Payload ID: 5672
  Gene Symbol: EXO1
  Gene Name: exonuclease 1
  ENST ID: ENST00000521202
  CDS Start-End: 1-623
gggaacactaagaagttgttttagttggtctggaggtcttggagatttttcaagaacgccgagcccctctccaagcacagcattgcagcagttccgaagaaagagcgattcccccacctctttgcctgagaataatatgtctgatgtgtcgcagttaaagagcgaggagtccagtgacgatgagtctcatcccttacgagaagaggcatgttcttcacagtcccaggaaagtggagaattctcactgcagagttcaaatgcatcaaagctttctcagtgctctagtaaggactctgattcagaggttcctgggctatataagtccagttctgcagactctctttctacaaccaagatcaaacctctaggacctgccagagccagtgggctgagcaagaagccggcaagcatccagaagagaaagcatcataatgccgagaacaagccggggttacagatcaaactcaatgagctctggaaaaactttggatttaaaaaagattctgaaaagcttcctccttgtaagaaacccctgtccccagtcagagataacatccaactaactccagaagcggaagaggatatatttaacaaacctgaatgtggccgtgttcaaagagcaatattc

SEQ ID NO: 131548 - DNA, 583 bp, Homo sapiens
  Payload ID: 5672
  Gene Symbol: EXO1
  Gene Name: exonuclease 1
  ENST ID: ENST00000519225
  CDS Start-End: 549-583
accatcggccatcagcgccagtgccactcgcgccctcaagaagccgcacggagttcgggccggcagcagcggctgcagtcgtatggcagtgagccgctgtctacccagcgagacggagagctcaggacgcaaccctatgagttggaagccgcaggaggcggaaccgggttgcgggatacgcgttgacgtcacatcctctgggcggggccgcaaggaacccgcgcaaattgaaaggcctaaggaaacgtgtcgtctggaatgggcttgggggccacgcctgcacatctccgcgagacagagggataaagtgaagatggtgctgttattgttacctcgagtgccacatgcgacctctgagatatgtacacagtcattcttactatcgcactcagccattcttactacgctaaagaagaaataattattcgaggatatttgcctggcccagaagaaacttatgtaaatttcatgaactattatatccgttttcctcggagtgagagaaaactctttttagatatcatctgagaggtagttaatttggcaccatggggatacagggattgctacaatttatcaaaga

SEQ ID NO: 131549 - DNA, 621 bp, Homo sapiens
  Payload ID: 5672
  Gene Symbol: EXO1
  Gene Name: exonuclease 1
  ENST ID: ENST00000523590
  CDS Start-End: 337-621
ggccgtgggtgctctggccacagcctaaggaaacgtgtcgtctggaatgggcttgggggccacgcctgcacatctccgcgagacagagggataaagtgaagatggtgctgttattgttacctcgagtgccacatgcgacctctgagatatgtacacagtcattcttactatcgcactcagccattcttactacgctaaagaagaaataattattcgaggatatttgcctggcccagaagaaacttatgtaaatttcatgaactattatatccgttttcctcggagtgagagaaaactctttttagatatcatctgagaggtagttaatttggcaccatggggatacagggattgctacaatttatcaaagaagcttcagaacccatccatgtgaggaagtataaagggcaggtagtagctgtggatacatattgctggcttcacaaaggagctattgcttgtgctgaaaaactagccaaaggtgaacctactgatagaagacgacaagccaatcttcttaagggaaagcaacttcttcgtgaggggaaagtctcggaagctcgagagtgtttcacccggtctatcaatatcacacatgccatggcccacaaagtaattaaa

SEQ ID NO: 131550 - DNA, 2899 bp, Homo sapiens
  Payload ID: 5672
  Gene Symbol: EXO1
  Gene Name: exonuclease 1
  Uniprot ID: Q9UQ84
  ENST ID: ENST00000518483
  CDS Start-End: 215-2626
cgagtgccacatgcgacctctgagatatgtacacagtcattcttactatcgcactcagccattcttactacgctaaagaagaaataattattcgaggatatttgcctggcccagaagaaacttatgtaaatttcatgaactattatatccgttttcctcggagtgagagaaaactctttttagatatcatctgagaggtagttaatttggcaccatggggatacagggattgctacaatttatcaaagaagcttcagaacccatccatgtgaggaagtataaagggcaggtagtagctgtggatacatattgctggcttcacaaaggagctattgcttgtgctgaaaaactagccaaaggtgaacctactgataggtatgtaggattttgtatgaaatttgtaaatatgttactatctcatgggatcaagcctattctcgtatttgatggatgtactttaccttctaaaaaggaagtagagagatctagaagagaaagacgacaagccaatcttcttaagggaaagcaacttcttcgtgaggggaaagtctcggaagctcgagagtgtttcacccggtctatcaatatcacacatgccatggcccacaaagtaattaaagctgcccggtctcagggggtagattgcctcgtggctccctatgaagctgatgcgcagttggcctatcttaacaaagcgggaattgtgcaagccataattacagaggactcggatctcctagcttttggctgtaaaaaggtaattttaaagatggaccagtttggaaatggacttgaaattgatcaagctcggctaggaatgtgcagacagcttggggatgtattcacggaagagaagtttcgttacatgtgtattctttcaggttgtgactacctgtcatcactgcgtgggattggattagcaaaggcatgcaaagtcctaagactagccaataatccagatatagtaaaggttatcaagaaaattggacattatctcaagatgaatatcacggtaccagaggattacatcaacgggtttattcgggccaacaataccttcctctatcagctagtttttgatcccatcaaaaggaaacttattcctctgaacgcctatgaagatgatgttgatcctgaaacactaagctacgctgggcaatatgttgatgattccatagctcttcaaatagcacttggaaataaagatataaatacttttgaacagatcgatgactacaatccagacactgctatgcctgcccattcaagaagtcatagttgggatgacaaaacatgtcaaaagtcagctaatgttagcagcatttggcataggaattactctcccagaccagagtcgggtactgtttcagatgccccacaattgaaggaaaatccaagtactgtgggagtggaacgagtgattagtactaaagggttaaatctcccaaggaaatcatccattgtgaaaagaccaagaagtgcagagctgtcagaagatgacctgttgagtcagtattctctttcatttacgaagaagaccaagaaaaatagctctgaaggcaataaatcattgagcttttctgaagtgtttgtgcctgacctggtaaatggacctactaacaaaaagagtgtaagcactccacctaggacgagaaataaatttgcaacatttttacaaaggaaaaatgaagaaagtggtgcagttgtggttccagggaccagaagcaggtttttttgcagttcagattctactgactgtgtatcaaacaaagtgagcatccagcctctggatgaaactgctgtcacagataaagagaacaatctgcatgaatcagagtatggagaccaagaaggcaagagactggttgacacagatgtagcacgtaattcaagtgatgacattccgaataatcatattccaggtgatcatattccagacaaggcaacagtgtttacagatgaagagtcctactcttttgagagcagcaaatttacaaggaccatttcaccacccactttgggaacactaagaagttgttttagttggtctggaggtcttggagatttttcaagaacgccgagcccctctccaagcacagcattgcagcagttccgaagaaagagcgattcccccacctctttgcctgagaataatatgtctgatgtgtcgcagttaaagagcgaggagtccagtgacgatgagtctcatcccttacgagaagaggcatgttcttcacagtcccaggaaagtggagaattctcactgcagagttcaaatgcatcaaagctttctcagtgctctagtaaggactctgattcagaggaatctgattgcaatattaagttacttgacagtcaaagtgaccagacctccaagctacgtttatctcatttctcaaaaaaagacacacctctaaggaacaaggttcctgggctatataagtccagttctgcagactctctttctacaaccaagatcaaacctctaggacctgccagagccagtgggctgagcaagaagccggcaagcatccagaagagaaagcatcataatgccgagaacaagccggggttacagatcaaactcaatgagctctggaaaaactttggatttaaaaaattctgaaaagcttcctccttgtaagaaacccctgtccccagtcagagataacatccaactaactccagaagcggaagaggatatatttaacaaacctgaatgtggccgtgttcaaagagcaatattccagtaaatgcagactgctgcaaagcttttgcctgcaagagaatctgatcaatttgaagtccctgtttgggaatgaggcacttatcagcatgaagaattttttctcattctgtgccattttaaaaatagaatacattttgtatattaacttta

SEQ ID NO: 131551 - DNA, 2942 bp, Homo sapiens
  Payload ID: 5673
  Gene Symbol: EXD1
  Gene Name: exonuclease 3'-5' domain containing 1
  Uniprot ID: Q8NHP7
  ENST ID: ENST00000314992
  CDS Start-End: 192-1736
gcggacctttctccaggttttcagcctgtgatttgataaccgccgccgggtggcgtggagcgtcccgagacttcttccttcattgcagcccctcttcttttagttctagactgaagttcgaggaacgcaccacttggctgaaattaggatccagatttcccaaacttccttcggaggaaaaagccctaacgatggaggacagtgaattcctagcttatgtggaactactagatgaagtggaacaaggctcagtgagagcaaaagcatcttctgttagtctacatgcagaaagaacctggatggagaaaatgaaagttgaagacctaaatgtatgtgagcctgcttctcctgcccctgaagcaccagctacctctctgctgaatgacctcaagtacagcccatcagaggaagaggaggtgacatacacagtcattaatcaattccagcagaagtttggtgctgcgatactccatatcaagaagcagaatgtcctgagtgtggcagcagaaggagcgaatgtatgtcgccatggcaaactgtgctggctgcaggtggccacaaattgccgagtttacttatttgacattttccttctgggaagtcgagctttccacaatggacttcagatgatactagaagacaagagaattttgaaggttatccatgattgtcgttggctttctgattgcctctctcatcagtatggaattttgctgaataatgtctttgacacacaggtagcagatgtacttcagttttccatggaaacgggtggctatcttccaaactgcatcactactttgcaggagagtttaatcaaacaccttcaagtagcccctaaatatctctcctttctagaaaagagacaaaaactaattcaggaaaatccagaagtatggttcatccgacctgtttcaccctctttactgaaaattttggccctggaagctacctacctgttaccccttcgcttggcactcctagatgagatgatgtctgacctaaccaccctggtggatggttacctaaacacgtatcgcgaagggtctgcagaccggcttggaggcactgagcctacatgtatggagctgccagaggaactgcttcaactcaaggacttccagaagcagcgcagggagaaagctgcaagagaatatagggtgaatgcacagggactcctgataaggacagtgctacagccaaagaaattagtgacagagacagcagggaaagaggagaaagtcaaaggcttcttatttggtaaaaattttaggatagataaagctccaagttttacatctcaagactttcacggggatgtgaatttactgaaagaagaatctttgaataaacaagctacaaatcctcaacatctacctcccacagaggaaggggaaaccagtgaggattccagtaacaaactcatttgcacaaagtcaaaggggtcagaggaccagagaataactcagaaagaacactttatgacacccaaacatgagtttcaggcaagtttatctttgaaagaggagacagaacagttattgatggtggaaaacaaggaagatttaaaatgcacaaaacaggctgtttcaatgtcttcctttcctcaggaaaccagagtgtctccaagtgacactttttatcctatcagaaagactgtggtttccacactccctccctgtccagccttggagaagatcgattcctggataagtccttttctaaatctgccctagagatgggcagtttgttcttaaggccatacagatggcttatttcctttgccatcagggctttccacagtgcccaggtttctcatgttgtaaatgtagtaatgcttcagtcacaggggaaaattatatcctcttgcttactcctgtgttcctggtatgcggagaatgagaatgaataagttaaataatggaagaagtataatttctgattatgtcactgtgtagaaatgttctcagtgaccagagtgcattatttttcataatttgggtttagaggatttgaagaaaggaagaatcttgggcttagtatcaggaagactccatcattttcaaattttgttttgcttcttgacttttggattcctttgaagagacctggtaaaactattaacaattcatttaaaaaattggtacctgataactttaccagtacttttttcctttttatttatttgttttatttatttttttttaccgctccttgtggagcagggctacaccataggcagtgtgcccagagtaaccacttttttcctttttaaaatataatattaactttatgtttgaatgttgaatgttttgtctgtctcttaggcaaataatgttataggaatcaataatttaatttttgttttatttgttttttgatggagtctcactctgtcacccaggctggagtgtagtggtgtaatctctgctcactgcaacctccgcctcccgggttcaagcaattctcctgcctcagcctcctgagtagctgggattacaggtgcgtgccaccacgcccggctaatttttgtatttttagtagagatggggtttcaccatgttggccaggctggtctcgaactcctgactgaccttgtggtccacctgcctttggcttccaaagtgctgggattacaggtgtgaggcacggtgcccagccaatatctttattttaatttgtttttatttcctttatttttagctggttttgtccattttcctaacaaagcagggaccctgggtttctttttagtctgtctgttatataaacttgaagcctgactccattctatttgcctggagttagtatactttcttagggtgaaaggaaggcagcttgtattgagccttttaaagtattgaatgcttgcaaattgctaacattcttttgtgtaaaataaccaataaacctgttttgtcatactctacttaaaaaaacaa

SEQ ID NO: 131552 - DNA, 2177 bp, Homo sapiens
  Payload ID: 5673
  Gene Symbol: EXD1
  Gene Name: exonuclease 3'-5' domain containing 1
  Uniprot ID: Q8NHP7
  ENST ID: ENST00000458580
  CDS Start-End: 267-1985
ctttctccaggttttcagcctgtgatttgataaccgccgccgggtggcgtggagcgtcccgagacttcttccttcattgcagcccctcttcttttagttctagactgaagttcgaggaacgcaccacttggctgaaattaggatccagatttcccaaacttccttcggaggaaaaagccctaacgatggaggacagtgaattcctagcttatgtgtttggatgcttaaagaagattatttgaagacggcttttggaatcaattagcatggaccccagcagtgactaccatttcctcagccagattttgtggaagagggtgaaactcacattggtctgtggtgtcttcgagggtgtgcttcagcatgttgaccctaataagattgttgtcctgaagaaagtgaagaatgtggagacaggtcgaagtgtcccaggagtgaagttgttttttgggcatgagattgtgaatgtggaactactagatgaagtggaacaaggctcagtgagagcaaaagcatcttctgttagtctacatgcagaaagaacctggatggagaaaatgaaagttgaagacctaaatgtatgtgagcctgcttctcctgcccctgaagcaccagctacctctctgctgaatgacctcaagtacagcccatcagaggaagaggaggtgacatacacagtcattaatcaattccagcagaagtttggtgctgcgatactccatatcaagaagcagaatgtcctgagtgtggcagcagaaggagcgaatgtatgtcgccatggcaaactgtgctggctgcaggtggccacaaattgccgagtttacttatttgacattttccttctgggaagtcgagctttccacaatggacttcagatgatactagaagacaagagaattttgaaggttatccatgattgtcgttggctttctgattgcctctctcatcagtatggaattttgctgaataatgtctttgacacacaggtagcagatgtacttcagttttccatggaaacgggtggctatcttccaaactgcatcactactttgcaggagagtttaatcaaacaccttcaagtagcccctaaatatctctcctttctagaaaagagacaaaaactaattcaggaaaatccagaagtatggttcatccgacctgtttcaccctctttactgaaaattttggccctggaagctacctacctgttaccccttcgcttggcactcctagatgagatgatgtctgacctaaccaccctggtggatggttacctaaacacgtatcgcgaagggtctgcagaccggcttggaggcactgagcctacatgtatggagctgccagaggaactgcttcaactcaaggacttccagaagcagcgcagggagaaagctgcaagagaatatagggtgaatgcacagggactcctgataaggacagtgctacagccaaagaaattagtgacagagacagcagggaaagaggagaaagtcaaaggcttcttatttggtaaaaattttaggatagataaagctccaagttttacatctcaagactttcacggggatgtgaatttactgaaagaagaatctttgaataaacaagctacaaatcctcaacatctacctcccacagaggaaggggaaaccagtgaggattccagtaacaaactcatttgcacaaagtcaaaggggtcagaggaccagagaataactcagaaagaacactttatgacacccaaacatgagtttcaggcaagtttatctttgaaagaggagacagaacagttattgatggtggaaaacaaggaagatttaaaatgcacaaaacaggctgtttcaatgtcttcctttcctcaggaaaccagagtgtctccaagtgacactttttatcctatcagaaagactgtggtttccacactccctccctgtccagccttggagaagatcgattcctggataagtccttttctaaatctgccctagagatgggcagtttgttcttaaggccatacagatggcttatttcctttgccatcagggctttccacagtgcccaggtttctcatgttgtaaatgtagtaatgcttcagtcacaggggaaaattatatcctcttgcttactcctgtgttcctggtatgcggagaatgagaatgaataagttaaataatggaaga

SEQ ID NO: 131553 - DNA, 483 bp, Homo sapiens
  Payload ID: 5673
  Gene Symbol: EXD1
  Gene Name: exonuclease 3'-5' domain containing 1
  ENST ID: ENST00000558396
  CDS Start-End: 319-483
gttgggccgggcgggcgtcgcctctgcggcgtgtgtccccggcgtcgcggacctttctccaggttttcagcctgtgatttgataaccgccgccgggtggcgtggagcgtcccgagacttcttccttcattgcagcccctcttcttttagttctagactgaagttcgaggaacgcaccacttggctgaaattaggatccagatttcccaaacttccttcggaggaaaaagccctaacgatggaggacagtgaattcctagcttatgtgtttggatgcttaaagaagattatttgaagacggcttttggaatcaattagcatggaccccagcagtgactaccatttcctcagccagattttgtggaagagggtgaaactcacattggtctgtggtgtcttcgagggtgtgcttcagcatgttgaccctaataagattgttgtcctgaagaaagtggaactactagatgaagtggaacaaggctca

SEQ ID NO: 131554 - DNA, 5107 bp, Homo sapiens
  Payload ID: 5674
  Gene Symbol: EXD2
  Gene Name: exonuclease 3'-5' domain containing 2
  Uniprot ID: Q9NVH0
  ENST ID: ENST00000312994
  CDS Start-End: 322-2187
ccctcggcgtgaccccctcgcccccgtcgcacacggcggggcggttcagcacccaggtgcgcaaggagggcctcacccctgcccgcggcctcccacgccctccttgggcctctcctttcgacccccttaccctctccctgggagactctaccagaccttcgaggctgcgtgtcccagtcagctaaaaaggaggccccgcccgcggcacctggtagctcctcgggcgctgcgggttcgacgcggcaacagctgctgttttctctcctggattcgtattgtgggattagtgatatgcttttctaaagagtagaaaagtcgaagatgtctagacagaacttagtggctttgacagtgactacccttctgggtgtggctgtaggggggtttgtcctctggaaaggcatccagcgccgccgaaggagtaaaacgagtcctgtgacccaacagccacagcagaaagtgctgggcagtagagagctgccccctccagaagatgatcagctgcactccagtgcccccagatcctcgtggaaggaacggatccttaaagcaaaggtggtgacggtgtctcaggaggcagagtgggatcaaatcgagcccttgcttagaagtgaattagaagattttccagtacttggaattgactgtgagtgggtaaatttggaaggcaaagccagccctctgtcacttctacaaatggcctccccaagtggcctgtgtgtcttggttcgcctgcccaagctaatctgtggaggaaaaacactaccaagaacgttattggatattttggcagatggcaccattttgaaagttggagtgggatgctcagaagatgccagcaagcttctgcaggattatggcctcgttgttagggggtgcctggacctccgatacctagccatgcggcagagaaacaatttgctctgtaatgggcttagcctgaagtccctcgctgagactgttttgaactttccccttgacaagtcccttctacttcgttgcagcaactgggatgctgagactctcacagaggaccaggtaatttatgctgccagggatgcccagatttcagtggctctctttcttcatcttcttggataccctttctctaggaattcacctggagaaaaaaacgatgaccacagtagctggagaaaagtcttggaaaaatgccagggtgtggtcgacatcccatttcgaagcaaaggaatgagcagattgggagaagaggttaatggggaagcaacagaatctcagcagaagccaagaaataagaagtctaagatggatgggatggtgccaggcaaccaccaagggagagaccccagaaaacataaaagaaagcctctgggggtgggctattctgccagaaaatcacctctttatgataactgctttctccatgctcctgatggacagcccctctgcacttgtgatagaagaaaagctcagtggtacctggacaaaggcattggtgagctggtgagtgaagagccctttgtggtgaagctacggtttgaacctgcaggaaggcccgaatctcctggagactattacttgatggttaaagagaacctgtgtgtagtgtgtggcaagagagactcctacattcggaagaacgtgattccacatgagtaccggaagcacttccccatcgagatgaaggaccacaactcccacgatgtgctgctgctctgcacctcctgccatgccatttccaactactatgacaaccatctgaagcagcagctggccaaggagttccaggcccccatcggctctgaggagggcttgcgcctgctggaagatcctgagcgccggcaggtgcgttctggggccagggccctgctcaacgcggagagcctgcctactcagcgaaaggaggagctgctgcaagcactcagagagttttataacacagacgtggtcacagaggagatgcttcaagaggctgccagcctggagaccagaatctccaatgaaaactatgttcctcacgggctgaaggtggtgcagtgtcacagccagggtggcctgcgctccctcatgcagctggagagccgctggcgtcagcacttcctggactccatgcagcccaagcacctgccccagcagtggtcagtggaccacaaccatcagaagctgctccggaaattcggggaagatcttcccatccagctgtcttgatagctgctttcctcccagttaggacaagtgggaagctggagccaaggttgaagagtcacctcttcccattttagtacatcattaattgtcaaagcctgtgtgacacaactcagaatactaacctagactaatcccaggatgcttctgctggagcaaagatattgtttgaaggagagtttatggttttggattttaaacgggcagggtcttttttcctctcatttttgtggacaagagaggccttcgcctttatttttactctccctcttctgctgtccctgtgcagaggaaaaatgaagaattctcccagaagtgacttgtcaagacttaaaaaaaatgtttttaatgcatttcttccttgtctagtgcctcggtttatctctaacaggggctgtccagtatatcggtcctgttaggaggggagaaaaagttcttccaaaggctggagaagtgaacaaggagtcaaatttattttcccaattcaacttcataattatcatttctttggcttcatgctctcccgtaactcatgtggttgggatccatcccatctgggtcacttcagtctacttcacgtacttgaaaaggctttcctttacacttccaggaccaaacagcaacttcctgccacacacttccaccctatcactgggagaaatccttttctggacatgagcctttgacctgggtggggcagaaagaaccacaaactccatctcccaatagaactttgaaattcactcagcttttcctttcatgctgtttgttgcctgcttgttgcactcctcctgccccagaactgcaagatttttagcttcacccctttctgagagtaatgttatcttttatcagaatcagtatcagttcccctgtattctgtgcttcatcgaatttgcaagactgacctcttttaagcatttaattcactcccagagtcatctggtcaggttgcaatatgaggacttctctgtctcctctgaagcctgggacactgagcttacttaatacattagatgttcaaaagaggagcgttgtttcatctttcaaaatgttaggccattactttgagtataaaatcgacttattaatgattagtaatttttctaaagtattgggaaaactttcttattttataagatcttaacaagcttaaaaaagaattttatgaccagaatccaacaagagctctattttggaattgtgcccaagttggtgatgtttactctaaaattaataataaaactacttgtaagcacaaggctcactggatgtaaatgtaaaacttcgcgactttataaaactggcattcctaggggaggggctatttatcctacaggtccctgcctcctggcagtgccatggtatgtgtgcatggatataccagacacagtcaccatcggccatcagtagcagcccatgaacccacgtgcacatcctgcatcttgctcttctgacccttcattcccacttgtcttcaggcaggcatttctgggatctaaactagaaatccttgaaaacaaatagtaccagccactttgaggaatgtgcattcactgtagtgggttattatggggtctctgcctcctggctgtgttatgcggagcccaggagtggaggagagccgtggaaatagacagggagaggctggtacttgggttgtggtaatagtcaggcttgccacaagagggcactcatagatttgtttttatattcattcttgagaaaaaagcaactggttactgaacgtaactcatgacttatgtttcaaattttgcatagctgattttaagtcattttgatagctttgcaagaaaaatttttcctttgaaacaagggagtagggctgtttcattttctttccttctaatcctcatgccaagaggtgagaaacacttaaggtcatttaaggtgctagggaaagggttttcccatggagctttctgtgaggcgcagtaaaatagagccagcagcaaagtagaggaaaaagccagactgcgtcacacaagatttctcatccttttcaggagagagtcactgtgtagatttgaatcttttttctttgagtctgctttgaactttagcaggcttttcctaagactgacaattgtcgtcttaaatcagagatttgagggtagacttattttatggcaaatgtctatttttctgatataaaagtaacaatgctcattacagaagaatctaaacaaagaataaaaattagccatcttctctccatctaaaacagagctaaactttgctgatatgtttatgaatttcctttcagtattaaaaagtgcatataaggtgtatatttacacaaaattgaaggtcatacatagatacaggttggtatcctaactttaccctctcactgattaacatggtatcacgagtaacttcctatgtttttaaatctttgaaaatagatttctagtggttctaccttatccatccccacactgttgaaaattttggttgtttcagatacttttattatcaatgatgatgtgataaagtttcttgtatatatctctttggctctatctttggtaatttcttaagaatggaatcttagaattggactgtgaagagggggattcacattgctggggctaagtacaaattgacatcaccttttaggaatgaaatgcttctctttgaccctttagctccagtgtcccagcatagtcactgggcttcataggagtagcagtgagaggacagtgtcacagcaagggcctctctgcatgctccctgatcattgtgtttgcaggttcagcatttcttcttgagtccttcccttcttccaaccttattgcctcatttcccccttgtagtcaatgttttttggaaacactgtttattttaaaataaaaatgtaaaaaaaaggtaaaaaaataaaattttaaattttaaaata

SEQ ID NO: 131555 - DNA, 2688 bp, Homo sapiens
  Payload ID: 5674
  Gene Symbol: EXD2
  Gene Name: exonuclease 3'-5' domain containing 2
  Uniprot ID: Q9NVH0
  ENST ID: ENST00000409949
  CDS Start-End: 781-2271
ccctcggcgtgaccccctcgcccccgtcgcacacggcggggcggttcagcacccaggtgcgcaaggagggcctcacccctgcccgcggcctcccacgccctccttgggcctctcctttcgacccccttaccctctccctgggagactctaccagaccttcgaggctgcgtgtcccagtcagctaaaaaggaggccccgcccgcggcacctggtagctcctcgggcgctgcgggttcgacgcggcaacagctgctgttttctctcctggattcgtatgaggagactgtccttcctgtttcgcagatgaggaaactgaggcttagagaagtttggcaaattggctaagttcctacagctaattgtgggattagtgatatgcttttctaaagagtagaaaagtcgaagatgtctagacagaacttagtggctttgacagtgactacccttctgggtgtggctgtaggggggtttgtcctctggaaaggcatccagcgccgccgaaggagtaaaacgagtcctgtgacccaacagccacagcagaaagtgctgggcagtagagagctgccccctccagaagatgatcagctgcactccagtgcccccagatcctcgtggaaggaacggatccttaaagcaaaggtggtgacggtgtctcaggaggcagagtgggatcaaatcgagcccttgcttagaagtgaattagaagattttccagtacttggaattgactgtgagtgggtaaatttggaaggcaaagccagccctctgtcacttctacaaatggcctccccaagtggcctgtgtgtcttggttcgcctgcccaagctaatctgtggaggaaaaacactaccaagaacgttattggatattttggcagatggcaccattttgaaagttggagtgggatgctcagaagatgccagcaagcttctgcaggattatggcctcgttgttagggggtgcctggacctccgatacctagccatgcggcagagaaacaatttgctctgtaatgggcttagcctgaagtccctcgctgagactgttttgaactttccccttgacaagtcccttctacttcgttgcagcaactgggatgctgagactctcacagaggaccaggtaatttatgctgccagggatgcccagatttcagtggctctctttcttcatcttcttggataccctttctctaggaattcacctggagaaaaaaacgatgaccacagtagctggagaaaagtcttggaaaaatgccagggtgtggtcgacatcccatttcgaagcaaaggaatgagcagattgggagaagaggttaatggggaagcaacagaatctcagcagaagccaagaaataagaagtctaagatggatgggatggtgccaggcaaccaccaagggagagaccccagaaaacataaaagaaagcctctgggggtgggctattctgccagaaaatcacctctttatgataactgctttctccatgctcctgatggacagcccctctgcacttgtgatagaagaaaagctcagtggtacctggacaaaggcattggtgagctggtgagtgaagagccctttgtggtgaagctacggtttgaacctgcaggaaggcccgaatctcctggagactattacttgatggttaaagagaacctgtgtgtagtgtgtggcaagagagactcctacattcggaagaacgtgattccacatgagtaccggaagcacttccccatcgagatgaaggaccacaactcccacgatgtgctgctgctctgcacctcctgccatgccatttccaactactatgacaaccatctgaagcagcagctggccaaggagttccaggcccccatcggctctgaggagggcttgcgcctgctggaagatcctgagcgccggcaggtgcgttctggggccagggccctgctcaacgcggagagcctgcctactcagcgaaaggaggagctgctgcaagcactcagagagttttataacacagacgtggtcacagaggagatgcttcaagaggctgccagcctggagaccagaatctccaatgaaaactatgttcctcacgggctgaaggtggtgcagtgtcacagccagggtggcctgcgctccctcatgcagctggagagccgctggcgtcagcacttcctggactccatgcagcccaagcacctgccccagcagtggtcagtggaccacaaccatcagaagctgctccggaaattcggggaagatcttcccatccagctgtcttgatagctgctttcctcccagttaggacaagtgggaagctggagccaaggttgaagagtcacctcttcccattttagtacatcattaattgtcaaagcctgtgtgacacaactcagaatactaacctagactaatcccaggatgcttctgctggagcaaagatattgtttgaaggagagtttatggttttggattttaaacgggcagggtcttttttcctctcatttttgtggacaagagaggccttcgcctttatttttactctccctcttctgctgtccctgtgcagaggaaaaatgaagaattctcccagaagtgacttgtcaagacttaaaaaaaatgtttttaatgcatttcttccttgtctagtgcctcggtttatctctaacaggggctgtccagtatatcggtcctgttagg

SEQ ID NO: 131556 - DNA, 2828 bp, Homo sapiens
  Payload ID: 5674
  Gene Symbol: EXD2
  Gene Name: exonuclease 3'-5' domain containing 2
  Uniprot ID: Q9NVH0
  ENST ID: ENST00000409675
  CDS Start-End: 80-1570
gcccgctgcaggtgtgcggcccagtccgagacagcaggtaaatttggaaggcaaagccagccctctgtcacttctacaaatggcctccccaagtggcctgtgtgtcttggttcgcctgcccaagctaatctgtggaggaaaaacactaccaagaacgttattggatattttggcagatggcaccattttgaaagttggagtgggatgctcagaagatgccagcaagcttctgcaggattatggcctcgttgttagggggtgcctggacctccgatacctagccatgcggcagagaaacaatttgctctgtaatgggcttagcctgaagtccctcgctgagactgttttgaactttccccttgacaagtcccttctacttcgttgcagcaactgggatgctgagactctcacagaggaccaggtaatttatgctgccagggatgcccagatttcagtggctctctttcttcatcttcttggataccctttctctaggaattcacctggagaaaaaaacgatgaccacagtagctggagaaaagtcttggaaaaatgccagggtgtggtcgacatcccatttcgaagcaaaggaatgagcagattgggagaagaggttaatggggaagcaacagaatctcagcagaagccaagaaataagaagtctaagatggatgggatggtgccaggcaaccaccaagggagagaccccagaaaacataaaagaaagcctctgggggtgggctattctgccagaaaatcacctctttatgataactgctttctccatgctcctgatggacagcccctctgcacttgtgatagaagaaaagctcagtggtacctggacaaaggcattggtgagctggtgagtgaagagccctttgtggtgaagctacggtttgaacctgcaggaaggcccgaatctcctggagactattacttgatggttaaagagaacctgtgtgtagtgtgtggcaagagagactcctacattcggaagaacgtgattccacatgagtaccggaagcacttccccatcgagatgaaggaccacaactcccacgatgtgctgctgctctgcacctcctgccatgccatttccaactactatgacaaccatctgaagcagcagctggccaaggagttccaggcccccatcggctctgaggagggcttgcgcctgctggaagatcctgagcgccggcaggtgcgttctggggccagggccctgctcaacgcggagagcctgcctactcagcgaaaggaggagctgctgcaagcactcagagagttttataacacagacgtggtcacagaggagatgcttcaagaggctgccagcctggagaccagaatctccaatgaaaactatgttcctcacgggctgaaggtggtgcagtgtcacagccagggtggcctgcgctccctcatgcagctggagagccgctggcgtcagcacttcctggactccatgcagcccaagcacctgccccagcagtggtcagtggaccacaaccatcagaagctgctccggaaattcggggaagatcttcccatccagctgtcttgatagctgctttcctcccagttaggacaagtgggaagctggagccaaggttgaagagtcacctcttcccattttagtacatcattaattgtcaaagcctgtgtgacacaactcagaatactaacctagactaatcccaggatgcttctgctggagcaaagatattgtttgaaggagagtttatggttttggattttaaacgggcagggtcttttttcctctcatttttgtggacaagagaggccttcgcctttatttttactctccctcttctgctgtccctgtgcagaggaaaaatgaagaattctcccagaagtgacttgtcaagacttaaaaaaaatgtttttaatgcatttcttccttgtctagtgcctcggtttatctctaacaggggctgtccagtatatcggtcctgttaggaggggagaaaaagttcttccaaaggctggagaagtgaacaaggagtcaaatttattttcccaattcaacttcataattatcatttctttggcttcatgctctcccgtaactcatgtggttgggatccatcccatctgggtcacttcagtctacttcacgtacttgaaaaggctttcctttacacttccaggaccaaacagcaacttcctgccacacacttccaccctatcactgggagaaatccttttctggacatgagcctttgacctgggtggggcagaaagaaccacaaactccatctcccaatagaactttgaaattcactcagcttttcctttcatgctgtttgttgcctgcttgttgcactcctcctgccccagaactgcaagatttttagcttcacccctttctgagagtaatgttatcttttatcagaatcagtatcagttcccctgtattctgtgcttcatcgaatttgcaagactgacctcttttaagcatttaattcactcccagagtcatctggtcaggttgcaatatgaggacttctctgtctcctctgaagcctgggacactgagcttacttaatacattagatgttcaaaagaggagcgttgtttcatctttcaaaatgttaggccattactttgagtataaaatcgacttattaatgattagtaatttttctaaagtattgggaaaactttcttattttataagatcttaacaagcttaaaaaagaattttatgaccagaatccaacaagagctctattttggaattgtgcccaagttggtgatgtttactctaaaattaataataaaactacttgtaagcacaa

SEQ ID NO: 131557 - DNA, 2496 bp, Homo sapiens
  Payload ID: 5674
  Gene Symbol: EXD2
  Gene Name: exonuclease 3'-5' domain containing 2
  Uniprot ID: Q9NVH0
  ENST ID: ENST00000409242
  CDS Start-End: 657-2147
gcggttcagcacccaggtgcgcaaggagggcctcacccctgcccgcggcctcccacgccctccttgggcctctcctttcgacccccttaccctctccctgggagactctaccagaccttcgaggctgcgtgtcccagtcagctaaaaaggaggccccgcccgcggcacctggtagctcctcgggcgctgcgggttcgacgcggcaacagctgctgttttctctcctggattcgtattgtgggattagtgatatgcttttctaaagagtagaaaagtcgaagatgtctagacagaacttagtggctttgacagtgactacccttctgggtgtggctgtaggggggtttgtcctctggaaaggcatccagcgccgccgaaggagtaaaacgagtcctgtgacccaacagccacagcagaaagtgctgggcagtagagagctgccccctccagaagatgatcagctgcactccagtgcccccagatcctcgtggaaggaacggatccttaaagcaaaggtggtgacggtgtctcaggaggcagagtgggatcaaatcgagcccttgcttagaagtgaattagaagattttccagtacttggaattgactgtgagtgggtaaatttggaaggcaaagccagccctctgtcacttctacaaatggcctccccaagtggcctgtgtgtcttggttcgcctgcccaagctaatctgtggaggaaaaacactaccaagaacgttattggatattttggcagatggcaccattttgaaagttggagtgggatgctcagaagatgccagcaagcttctgcaggattatggcctcgttgttagggggtgcctggacctccgatacctagccatgcggcagagaaacaatttgctctgtaatgggcttagcctgaagtccctcgctgagactgttttgaactttccccttgacaagtcccttctacttcgttgcagcaactgggatgctgagactctcacagaggaccaggtaatttatgctgccagggatgcccagatttcagtggctctctttcttcatcttcttggataccctttctctaggaattcacctggagaaaaaaacgatgaccacagtagctggagaaaagtcttggaaaaatgccagggtgtggtcgacatcccatttcgaagcaaaggaatgagcagattgggagaagaggttaatggggaagcaacagaatctcagcagaagccaagaaataagaagtctaagatggatgggatggtgccaggcaaccaccaagggagagaccccagaaaacataaaagaaagcctctgggggtgggctattctgccagaaaatcacctctttatgataactgctttctccatgctcctgatggacagcccctctgcacttgtgatagaagaaaagctcagtggtacctggacaaaggcattggtgagctggtgagtgaagagccctttgtggtgaagctacggtttgaacctgcaggaaggcccgaatctcctggagactattacttgatggttaaagagaacctgtgtgtagtgtgtggcaagagagactcctacattcggaagaacgtgattccacatgagtaccggaagcacttccccatcgagatgaaggaccacaactcccacgatgtgctgctgctctgcacctcctgccatgccatttccaactactatgacaaccatctgaagcagcagctggccaaggagttccaggcccccatcggctctgaggagggcttgcgcctgctggaagatcctgagcgccggcaggtgcgttctggggccagggccctgctcaacgcggagagcctgcctactcagcgaaaggaggagctgctgcaagcactcagagagttttataacacagacgtggtcacagaggagatgcttcaagaggctgccagcctggagaccagaatctccaatgaaaactatgttcctcacgggctgaaggtggtgcagtgtcacagccagggtggcctgcgctccctcatgcagctggagagccgctggcgtcagcacttcctggactccatgcagcccaagcacctgccccagcagtggtcagtggaccacaaccatcagaagctgctccggaaattcggggaagatcttcccatccagctgtcttgatagctgctttcctcccagttaggacaagtgggaagctggagccaaggttgaagagtcacctcttcccattttagtacatcattaattgtcaaagcctgtgtgacacaactcagaatactaacctagactaatcccaggatgcttctgctggagcaaagatattgtttgaaggagagtttatggttttggattttaaacgggcagggtcttttttcctctcatttttgtggacaagagaggccttcgcctttatttttactctccctcttctgctgtccctgtgcagaggaaaaatgaagaattctcccagaagtgacttgtcaagacttaaaaaaaatgtttttaatgc

SEQ ID NO: 131558 - DNA, 3404 bp, Homo sapiens
  Payload ID: 5674
  Gene Symbol: EXD2
  Gene Name: exonuclease 3'-5' domain containing 2
  Uniprot ID: Q9NVH0
  ENST ID: ENST00000409014
  CDS Start-End: 658-2148
acaggttccaggtctttaacgtgagcccgctgcaggtgtgcggcccagtccgagacagcagatgaggagactgtccttcctgtttcgcagatgaggaaactgaggcttagagaagtttggcaaattggctaagttcctacagctaattgtgggattagtgatatgcttttctaaagagtagaaaagtcgaagatgtctagacagaacttagtggctttgacagtgactacccttctgggtgtggctgtaggggggtttgtcctctggaaaggcatccagcgccgccgaaggagtaaaacgagtcctgtgacccaacagccacagcagaaagtgctgggcagtagagagctgccccctccagaagatgatcagctgcactccagtgcccccagatcctcgtggaaggaacggatccttaaagcaaaggtggtgacggtgtctcaggaggcagagtgggatcaaatcgagcccttgcttagaagtgaattagaagattttccagtacttggaattgactgtgagtgggaacgtcatggtacctacctccagtggcttttctaaggattcaaatagatcacccccataaaggattcagcacagtgtgaacatatagtagtaaatttggaaggcaaagccagccctctgtcacttctacaaatggcctccccaagtggcctgtgtgtcttggttcgcctgcccaagctaatctgtggaggaaaaacactaccaagaacgttattggatattttggcagatggcaccattttgaaagttggagtgggatgctcagaagatgccagcaagcttctgcaggattatggcctcgttgttagggggtgcctggacctccgatacctagccatgcggcagagaaacaatttgctctgtaatgggcttagcctgaagtccctcgctgagactgttttgaactttccccttgacaagtcccttctacttcgttgcagcaactgggatgctgagactctcacagaggaccaggtaatttatgctgccagggatgcccagatttcagtggctctctttcttcatcttcttggataccctttctctaggaattcacctggagaaaaaaacgatgaccacagtagctggagaaaagtcttggaaaaatgccagggtgtggtcgacatcccatttcgaagcaaaggaatgagcagattgggagaagaggttaatggggaagcaacagaatctcagcagaagccaagaaataagaagtctaagatggatgggatggtgccaggcaaccaccaagggagagaccccagaaaacataaaagaaagcctctgggggtgggctattctgccagaaaatcacctctttatgataactgctttctccatgctcctgatggacagcccctctgcacttgtgatagaagaaaagctcagtggtacctggacaaaggcattggtgagctggtgagtgaagagccctttgtggtgaagctacggtttgaacctgcaggaaggcccgaatctcctggagactattacttgatggttaaagagaacctgtgtgtagtgtgtggcaagagagactcctacattcggaagaacgtgattccacatgagtaccggaagcacttccccatcgagatgaaggaccacaactcccacgatgtgctgctgctctgcacctcctgccatgccatttccaactactatgacaaccatctgaagcagcagctggccaaggagttccaggcccccatcggctctgaggagggcttgcgcctgctggaagatcctgagcgccggcaggtgcgttctggggccagggccctgctcaacgcggagagcctgcctactcagcgaaaggaggagctgctgcaagcactcagagagttttataacacagacgtggtcacagaggagatgcttcaagaggctgccagcctggagaccagaatctccaatgaaaactatgttcctcacgggctgaaggtggtgcagtgtcacagccagggtggcctgcgctccctcatgcagctggagagccgctggcgtcagcacttcctggactccatgcagcccaagcacctgccccagcagtggtcagtggaccacaaccatcagaagctgctccggaaattcggggaagatcttcccatccagctgtcttgatagctgctttcctcccagttaggacaagtgggaagctggagccaaggttgaagagtcacctcttcccattttagtacatcattaattgtcaaagcctgtgtgacacaactcagaatactaacctagactaatcccaggatgcttctgctggagcaaagatattgtttgaaggagagtttatggttttggattttaaacgggcagggtcttttttcctctcatttttgtggacaagagaggccttcgcctttatttttactctccctcttctgctgtccctgtgcagaggaaaaatgaagaattctcccagaagtgacttgtcaagacttaaaaaaaatgtttttaatgcatttcttccttgtctagtgcctcggtttatctctaacaggggctgtccagtatatcggtcctgttaggaggggagaaaaagttcttccaaaggctggagaagtgaacaaggagtcaaatttattttcccaattcaacttcataattatcatttctttggcttcatgctctcccgtaactcatgtggttgggatccatcccatctgggtcacttcagtctacttcacgtacttgaaaaggctttcctttacacttccaggaccaaacagcaacttcctgccacacacttccaccctatcactgggagaaatccttttctggacatgagcctttgacctgggtggggcagaaagaaccacaaactccatctcccaatagaactttgaaattcactcagcttttcctttcatgctgtttgttgcctgcttgttgcactcctcctgccccagaactgcaagatttttagcttcacccctttctgagagtaatgttatcttttatcagaatcagtatcagttcccctgtattctgtgcttcatcgaatttgcaagactgacctcttttaagcatttaattcactcccagagtcatctggtcaggttgcaatatgaggacttctctgtctcctctgaagcctgggacactgagcttacttaatacattagatgttcaaaagaggagcgttgtttcatctttcaaaatgttaggccattactttgagtataaaatcgacttattaatgattagtaatttttctaaagtattgggaaaactttcttattttataagatcttaacaagcttaaaaaagaattttatgaccagaatccaacaagagctctattttggaattgtgcccaagttggtgatgtttactctaaaattaataataaaactacttgtaagcac

SEQ ID NO: 131559 - DNA, 3252 bp, Homo sapiens
  Payload ID: 5674
  Gene Symbol: EXD2
  Gene Name: exonuclease 3'-5' domain containing 2
  Uniprot ID: Q9NVH0
  ENST ID: ENST00000409018
  CDS Start-End: 129-1994
gggtgcgcgcaggcggccgcacaggttccaggtctttaacgtgagcccgctgcaggtgtgcggcccagtccgagacagcagattgtgggattagtgatatgcttttctaaagagtagaaaagtcgaagatgtctagacagaacttagtggctttgacagtgactacccttctgggtgtggctgtaggggggtttgtcctctggaaaggcatccagcgccgccgaaggagtaaaacgagtcctgtgacccaacagccacagcagaaagtgctgggcagtagagagctgccccctccagaagatgatcagctgcactccagtgcccccagatcctcgtggaaggaacggatccttaaagcaaaggtggtgacggtgtctcaggaggcagagtgggatcaaatcgagcccttgcttagaagtgaattagaagattttccagtacttggaattgactgtgagtgggtaaatttggaaggcaaagccagccctctgtcacttctacaaatggcctccccaagtggcctgtgtgtcttggttcgcctgcccaagctaatctgtggaggaaaaacactaccaagaacgttattggatattttggcagatggcaccattttgaaagttggagtgggatgctcagaagatgccagcaagcttctgcaggattatggcctcgttgttagggggtgcctggacctccgatacctagccatgcggcagagaaacaatttgctctgtaatgggcttagcctgaagtccctcgctgagactgttttgaactttccccttgacaagtcccttctacttcgttgcagcaactgggatgctgagactctcacagaggaccaggtaatttatgctgccagggatgcccagatttcagtggctctctttcttcatcttcttggataccctttctctaggaattcacctggagaaaaaaacgatgaccacagtagctggagaaaagtcttggaaaaatgccagggtgtggtcgacatcccatttcgaagcaaaggaatgagcagattgggagaagaggttaatggggaagcaacagaatctcagcagaagccaagaaataagaagtctaagatggatgggatggtgccaggcaaccaccaagggagagaccccagaaaacataaaagaaagcctctgggggtgggctattctgccagaaaatcacctctttatgataactgctttctccatgctcctgatggacagcccctctgcacttgtgatagaagaaaagctcagtggtacctggacaaaggcattggtgagctggtgagtgaagagccctttgtggtgaagctacggtttgaacctgcaggaaggcccgaatctcctggagactattacttgatggttaaagagaacctgtgtgtagtgtgtggcaagagagactcctacattcggaagaacgtgattccacatgagtaccggaagcacttccccatcgagatgaaggaccacaactcccacgatgtgctgctgctctgcacctcctgccatgccatttccaactactatgacaaccatctgaagcagcagctggccaaggagttccaggcccccatcggctctgaggagggcttgcgcctgctggaagatcctgagcgccggcaggtgcgttctggggccagggccctgctcaacgcggagagcctgcctactcagcgaaaggaggagctgctgcaagcactcagagagttttataacacagacgtggtcacagaggagatgcttcaagaggctgccagcctggagaccagaatctccaatgaaaactatgttcctcacgggctgaaggtggtgcagtgtcacagccagggtggcctgcgctccctcatgcagctggagagccgctggcgtcagcacttcctggactccatgcagcccaagcacctgccccagcagtggtcagtggaccacaaccatcagaagctgctccggaaattcggggaagatcttcccatccagctgtcttgatagctgctttcctcccagttaggacaagtgggaagctggagccaaggttgaagagtcacctcttcccattttagtacatcattaattgtcaaagcctgtgtgacacaactcagaatactaacctagactaatcccaggatgcttctgctggagcaaagatattgtttgaaggagagtttatggttttggattttaaacgggcagggtcttttttcctctcatttttgtggacaagagaggccttcgcctttatttttactctccctcttctgctgtccctgtgcagaggaaaaatgaagaattctcccagaagtgacttgtcaagacttaaaaaaaatgtttttaatgcatttcttccttgtctagtgcctcggtttatctctaacaggggctgtccagtatatcggtcctgttaggaggggagaaaaagttcttccaaaggctggagaagtgaacaaggagtcaaatttattttcccaattcaacttcataattatcatttctttggcttcatgctctcccgtaactcatgtggttgggatccatcccatctgggtcacttcagtctacttcacgtacttgaaaaggctttcctttacacttccaggaccaaacagcaacttcctgccacacacttccaccctatcactgggagaaatccttttctggacatgagcctttgacctgggtggggcagaaagaaccacaaactccatctcccaatagaactttgaaattcactcagcttttcctttcatgctgtttgttgcctgcttgttgcactcctcctgccccagaactgcaagatttttagcttcacccctttctgagagtaatgttatcttttatcagaatcagtatcagttcccctgtattctgtgcttcatcgaatttgcaagactgacctcttttaagcatttaattcactcccagagtcatctggtcaggttgcaatatgaggacttctctgtctcctctgaagcctgggacactgagcttacttaatacattagatgttcaaaagaggagcgttgtttcatctttcaaaatgttaggccattactttgagtataaaatcgacttattaatgattagtaatttttctaaagtattgggaaaactttcttattttataagatcttaacaagcttaaaaaagaattttatgaccagaatccaacaagagctctattttggaattgtgcccaagttggtgatgtttactctaaaattaataataaaactacttgtaagcacaa

SEQ ID NO: 131560 - DNA, 1143 bp, Homo sapiens
  Payload ID: 5674
  Gene Symbol: EXD2
  Gene Name: exonuclease 3'-5' domain containing 2
  ENST ID: ENST00000413191
  CDS Start-End: 802-1143
gcctcacccctgcccgcggcctcccacgccctccttgggcctctcctttcgacccccttaccctctccctgggagactctaccagaccttcgaggctgcgtgtcccagtcagctaaaaaggaggccccgcccgcggcacctggtagctcctcgggcgctgcgggttcgacgcggcaacagctgctgttttctctcctggattcgtatgaggagactgtccttcctgtttcgcagatgaggaaactgaggcttagagaagtttggcaaattggctaagttcctacagctaattgtgggattagtgatatgcttttctaaagagtagaaaagtcgaagatgtctagacagaacttagtggctttgacagtgactacccttctgggtgtggctgtaggggggtttgtcctctggaaaggcatccagcgccgccgaaggagtaaaacgagtcctgtgacccaacagccacagcagaaagtgctgggcagtagagagctgccccctccagaagatgatcagctgcactccagtgcccccagatcctcgtggaaggaacggatccttaaagcaaaggtggtgacggtgtctcaggaggcagagtgggatcaaatcgagcccttgcttagaagtgaattagaagattttccagtacttggaattgactgtgagtgggaacgtcatggtacctacctccagtggcttttctaaggattcaaatagatcacccccataaaggattcagcacagtgtgaacatatagtagtaaatttggaaggcaaagccagccctctgtcacttctacaaatggcctccccaagtggcctgtgtgtcttggttcgcctgcccaagctaatctgtggaggaaaaacactaccaagaacgttattggatattttggcagatggcaccattttgaaagttggagtgggatgctcagaagatgccagcaagcttctgcaggattatggcctcgttgttagggggtgcctggacctccgatacctagccatgcggcagagaaacaatttgctctgtaatgggcttagcctgaagtccctcgctgagactgttttgaactttccccttgacaagtcccttctacttcgttgcagcaactgggatgctgagactctcacagaggaccag

SEQ ID NO: 131561 - DNA, 2872 bp, Homo sapiens
  Payload ID: 5675
  Gene Symbol: EXD3
  Gene Name: exonuclease 3'-5' domain containing 3
  Uniprot ID: Q8N9H8
  ENST ID: ENST00000340951
  CDS Start-End: 197-2827
acttccgccgggagctttgtgcgcccggcttcctcgccccgcccgcgctggccttggtgcgccggataaagccctccgggccagcggctgcggtcgggccaaggttccgcgccgggcgtggacggtgtggggcggtcccggccccgcagatcctcgttcctagctgcctgccagcgtcctcggcccggccctgaggatggacccaggagatcccgctggtgaccctgccgctggcgagcgccaccgcatgggccgggaccccctcctgctcctgcaggccctgcagaccctgtggtccacgcgggagcggaagcagctccgggaggaagcctggcgggggtttgctgccttggacgaccccctggccgggcttctggacatgctggagagctgccggggccagcggggagagggcccctccctggcggcctggatctcccaccagctgcagtgctggctacaggcacagccatgcccgagcctggcccagcacagcctgaggctgaagcagctgcaggcccgagcggtcaaagtcctcactgagagcccccccagccttgcggcaccactggccagcatcttccagctgcaggatgcagacaggagctgcctgctggcacacgtccaccgcctccaccacgagggcaggttcagagaagcagccacgctgggcgcgacgttgaagctgcagtcggagcttggcgttgaaaagatgagcatcccactgctcctccaggacaaggtggccctcgtggagcgctatgtggccggcttcccggacctccagaggaggctgctggtcctcatggattcctggtgccagcccggctttgacatcaaggacgttgccagacggtaccctgaggtgacctccttgagcctggagaagctgagtccgaaggcgctgagcaggcaggtcttgcgtctgcaggagcggtacggcgtagccccagcgctgtgtcccaacgcggccattcagcagcgcctggcggccctgcggcacctgtgccacaagcggtttgtggagaagagcctgtcacaggagaactggaccgaccatgtgcagggcctggtggggcagagcccgtggcttcaggagcagctgtctcagctgctggtctcccacagtgacccagtcacggccgcccagtgtgccatggaactcttgctgcccgaggagcggctgccggctgcggtggctgtggaactccgccggttcaggctccaggggagggcgactgaggctgactcgaggctggaggtgaaggacatgaaggaccgttactaccagctgcccatccccagggagaacgtccacctcctggcctcgtgggaagacctgaccagacacgagggtgcactcctgcagtgccaccaagtggttggtgtagacgtggagtggacacctgtgtttgttgctgggggccggcctcggccgtcactcctgcaggtggccgtggagggccacgtgttccttctggacgtcctggcactctcgcagccaccaacagggcagggagcccaggccttttcccggctggtggcccagctcctctcggacccctctatcaccaagctgggctacgggatggtgggggacctgcaaaaactgggcacgtcctgccccgccctggcccatgtggagaagcagattctgggcggcatggacctgctgctggtgcacagacagatgcgggtggcgagcgtgccagccccagccgtggacagggccagggagctgaggggcctgagcctcctggtgcagcaggtgctgggcacagccctggacaagacgcagcagctgtccaactgggaccggaggccgctctgcgaggagcaggtcatctacgcagctgccgacgcctactgcctgctggaggtgcaccaagccctgtgcagagagcccgcccgcttccacctgtcggaggacctggctgggagccggaggcccaggcacagagagagaccaggggcacggaagccacccggcctgcagaaagcgtcagcaccggccgcacccaggcaggtccctgtggctgtggctgtgtctgagggcgctgcccctcagattccggccagggccttccgtgtggtgtgtgacaacatgctgcaggggctggcacggagcctccgctgtctcggtgtggatgcacgcatgctgggcaatggtgaagaccaccgcagggcggccgaggttgccaggcaggaggggaggatcattctgacgtcggggcagccattccacaagctccgggcccaggtcggggctgggcgctgcctctcggtcgactgctccctgaaggcccagcagcaggccaaggctgtgctcaagcatttcaacgtgcgtgtcacccacgcagacatcttcagccgctgccaggcctgtaactgtgaccagtacctaaaggtctccagggacatgatgaagcagctcatgtggctcagcagtcaccaggaggggcccaggagctcaggtgacgaggccacccagagccaggcggtgcaggagccaggcccagccccagacgcagcccctgagggctgcacctatgaccgcccctgccgctggctgcagatggctgacctgcgggcggagacaccggacatgctggccgacggcacccggctgcagctggcaggggtcccggtgggtgtgctgaggacacctgggctgcggtgcttctactgctgcacgggctgtggaaaggtcttctgggacggctcccacctgggtcgtgttgccacccacttccgagacatgctggagagcgcccccagcccctgcgagccgagcccagcccccagcccggccagcagtcccttctgaggacagccagacaataaacatggaaagtgcccgactgctgggccc

SEQ ID NO: 131562 - DNA, 962 bp, Homo sapiens
  Payload ID: 5675
  Gene Symbol: EXD3
  Gene Name: exonuclease 3'-5' domain containing 3
  Uniprot ID: Q8N9H8
  ENST ID: ENST00000479452
  CDS Start-End: 90-830
cgcgccgggcgtggacggtgtggggcggtcccggccccgcagatcctcgttcctagctgcctgccagcgtcctcggcccggccctgaggatggacccaggagatcccgctggtgaccctgccgctggcgagcgccaccgcatgggccgggaccccctcctgctcctgcaggccctgcagaccctgtggtccacgcgggagcggaagcagctccgggaggaagcctggcgggggtttgctgccttggacgaccccctggccgggcttctggacatgctggagagctgccggggccagcggggagagggcccctccctggcggcctggatctcccaccagctgcagtgctggctacaggcacagccatgcccgagcctggcccagcacagcctgaggctgaagcagctgcaggcccgagcggtcaaagtcctcactgagagcccccccagccttgcggcaccactggccagcatcttccagctgcaggatgcagacaggagctgcctgctggcacacgtccaccgcctccaccacgagggcaggttcagagaagcagccacgctgggcgcgacgttgaagctgcagtcggagcttggcgttgaaaagatgagcatcccactgctcctccaggacaaggtggccctcgtggagcgctatgtggccggcttcccggacctccagaggaggctgctggtcctcatggattcctggtgccagcccggctttgacatcaaggacgttgccagctgccatgtgactgcagctggagcagctgcctctggagaggagcggctggggctggcaggagcacagccctcttctcccgagtgaaaagagttaactgctcttagaagaacgaaaataattctccgtggtggctcttctcatgcaggcatggcaaccgtactgctttcttgttcatccattcctttgttctttcatctaataaagtttttggaagca

SEQ ID NO: 131563 - DNA, 1585 bp, Homo sapiens
  Payload ID: 5675
  Gene Symbol: EXD3
  Gene Name: exonuclease 3'-5' domain containing 3
  ENST ID: ENST00000465160
  CDS Start-End: 97-267
aaggttccgcgccgggcgtggacggtgtggggcggtcccggccccgcagatcctcgttcctagctgcctgccagcgtcctcggcccggccctgaggatggacccaggagatcccgctggtgaccctgccgctggcgagcgccaccgcatgggcacccacaggcttctacagcctcttctccacctaagcagagtgggatgttttcaaagtgcaacaccccagctagcagggcccctggaacagcctcggcgccccctggaacactaatggccctccctggaacagacacggcacccccaccgagaacagcctcggtgccccctggaacagcctcagcaccccctggaacactaatggccctccctggaacagacacggcacccccaccgagaacagcctcggtgccccctggaacagcctcagcaccccctggaacactaatggccctccctggaacagatacggccccccgccagaacagacatggtgcccgctggaacactaatggtcctccctggaacagcctcggtgccccctggaacactaatggccctccctggaacagacacggcgcccccccacagaacagcctcgatgccccctggaacagcctcggtgccccctggaacagcctcggtgccccctggaacagcctggtgctcctggaacagacacagcccccccagaacagacacagcaccccctggaacagcctggcgcttcctggaatggccacatccccccatcctttctgtgctgctttaggcatctgcccttacatggttcgtgtccagctctgtcaacaaggccagctccacaagaggccccagctcagccctccccagtgggctcccctactcaggctctgggtcagcttcttcccaggaggtgtcctggcccctgtgctggccccgcctcgctgcctggacacctgtccgtgccaccctggtcactgagcaggacatccgcgtctgtggcccctgggaccctgcccccgacagccaggcctgggtttgtccttttaggtagagtgcctggtccaggtcattggaggagagtccacatggccacctctggcgtgttctagagaggccctcccgcgctgggtcaggaggcatcatcgggacaggagaagggggctgagctcctgttcctctctccctcccccgaggccaagaaacattcccatccgaatgtccactgcgctcacagattcctttcctcctaaaacttcagccttggccaggctcacggccaggattatggtggctcacgcctgtaatcccagtactgtgggaggccgaggcaggaggatcacgaggtcagaagatcgagaccatcctggccaacatggtgaaaccccgtctctactaaaaatacaaaaattagctggacatggtggcgggcgcctgtattcccagctactggggaggctgaggcaggagaatggcttggaggcagtagaactgcttgaaccctggaggcggaggttacagttatccgaggttgtgtcattgcactccagcctggggaacagagcgagactccatctcaaaaaaaataaaaaacttcagcttttgcatga

SEQ ID NO: 131564 - DNA, 2932 bp, Homo sapiens
  Payload ID: 5675
  Gene Symbol: EXD3
  Gene Name: exonuclease 3'-5' domain containing 3
  ENST ID: ENST00000478344
  CDS Start-End: 1-110
tcatggattcctggtgccagcccggctttgacatcaaggacgttgccagtttttggaagcacttggtgtgtgacgtctgtcagcaattacagagaaaaggcagcacctgacaaggagcccatatggtgcctgtatggattcagggaagccatgtgcatgtgtgtgcatgtgtgtgcatgtatgtgtgtgcccatgtgcatgtgtgcctgcaggtgtgcatgtgtgtgtctctgtgtgtgcacgtgatatgtgcgtgtgtgcacgtttgtgtgtgcctgtaggtgtgcatgtgtgtgcatgtatgtgtgtgcctgcaggtgtgtgtgtgtgcatgtatatctgtgtgtgcattgtgttcgtttgtgcaggtgtgtatgtctgcgtgcatatgatgtgtacatgtgtgtgcctgcaggtgtacgtgtgttttcgtgcatgtggtgtgtgtgtgcatgtatgtgtgtgcctgtaggtgtgtgtttgtatgtgtgtgtgcatgggtgtgtacgtgtgtgcatgtgtgcctgtgcatgtgtgtgcgtgtggtgtgtgtacatgtatgtgtgtgcacgtgtgtgtgcctgcaggtgtgcgtgtgtgtgcatgtgtgtgcgtgtgtacctgtgtgtgcactgtgttcatgtttgtgcaggtctgtgtgtgcatgcatgtgtgtgtacgtgtgtgtgcctgcaggtgtgcatgtgtgtgtgtgtgagatatgagggatgacatctgggaggggaggggcttcctgctctatatctggtcaaggtgccccgagagtgaagcaagctgaaaggtctgtgaaggctccagggcccatccactggcaggcagatcccggcctccattccccacacagccccagggttgtctcactggagagtcacaggcttggacttggacgtcaggccgtcccgggcccatcctcctccacttgtcctccaagtcacttccactttctgagtttgtttcctcattcgcacaatggggctgagtccacctgactcaaagcttgctaagacttttcatcagagggagcaggcagcagccgcacagcgtcaggccaggcacagacggtaccctgaggtgacctccttgagcctggagaagctgagtccgaaggcgctgagcaggcaggtcttgcgtctgcaggagcggtacggcgtagccccagaagagcctgtcacaggagaactggaccgaccatgtgcagggcctggtggggcagagcccgtggcttcaggagcagctgtctcagctgctggtctcccacagtgacccagtcacggccgcccagtgtgccatggaactcttgctgcccgaggagcggctgccggctgcggtggctgtggaactccgccggttcaggctccaggggagggcgactgaggctgactcgaggctggaggtgaaggacatgaaggaccgttactaccagctgcccatccccagggagaacgtccacctcctggcctcgtgggaagacctgaccagacacgagggtgcactcctgcagtgccaccaagtggttggtgtagacgtggagtggacacctgtgtttgttgctgggggccggcctcggccgtcactcctgcaggtggccgtggagggccacgtgttccttctggacgtcctggcactctcgcagccaccaacagggcagggagcccaggccttttcccggctggtggcccagctcctctcggacccctctatcaccaagctgggctacgggatggtgggggacctgcaaaaactgggcacgtcctgccccgccctggcccatgtggagaagcagattctgggcggcatggacctgctgctggtgcacagacagatgcgggtggcgagcgtgccagccccagccgtggacagggccagggagctgaggggcctgagcctcctggtgcagcaggtgctgggcacagccctggacaagacgcagcagctgtccaactgggaccggaggccgctctgcgaggagcaggtcatctacgcagctgccgacgcctactgcctgctggaggtgcaccaagccctgtgcagagagcccgcccgcttccacctgtcggaggacctggctgggagccggaggcccaggcacagagagagaccaggggcacggaagccacccggcctgcagaaagcgtcagcaccggccgcacccaggcaggtccctgtggctgtggctgtgtctgagggcgctgcccctcagattccggccagggccttccgtgtggtgtgtgacaacatgctgcaggggctggcacggagcctccgctgtctcggtgtggatgcacgcatgctgggcaatggtgaagaccaccgcagggcggccgaggtcttctgttccaagctcttagtgaattctgtatttttaggacttgctctacaaatagtacagctttattttcaccctcatttgttttctgcagcttcaaggattgtctgtttatgtcggtctaggatgttctagacaggtgttcacatttgtgaccaccttactcacaggtgcagtgatctcacagaggcagacatagattcatgcattttctggagagaacatttttgaagaagggaagctttgaagcacagattctgacataacaagtatttgctacttccaagcactgcagtcaaactaatggatataatgggatgggctggttgctcctaactgtgctggagaaggtgggaaagaaaaagatgagctcagctccacacgaaggacctgcaagcttctatcttggcccagaagaagcccttattccctgtagctgcagaagtaaaattgctgaacaccatgcctagagtttaatcctgtgagcagctgaattacaacagaaattaaattcacaactgatgttattaaactttgtccacttggccagtcctatccatgtaaaattacatttcattgtctttg

SEQ ID NO: 131565 - DNA, 2176 bp, Homo sapiens
  Payload ID: 5675
  Gene Symbol: EXD3
  Gene Name: exonuclease 3'-5' domain containing 3
  ENST ID: ENST00000491734
  CDS Start-End: 1-423
atgagcatcccactgctcctccaggacaaggtggccctcgtggagcgctatgtggccggcttcccggacctccagaggaggctgctggtcctcatggattcctggtgccagcccggctttgacatcaaggacgttgccagacggtaccctgaggtgacctccttgagcctggagaagctgagtccgaaggcgctgagcaggcaggtcttgcgtctgcaggagcggtacggcgtagccccagcgctgtgtcccaacgcggccattcagcagcgcctggcggccctgcggcacctgtgccacaagcggtttgtggaggttcgtgagcaggagggggtcctgggggcagccagccgcggcctgagccacagagtttggcctgggatactcactgcgcactgcagggtgcacagacatatcaagtaggagctgcttcttgccccagagctggaagagcctgtcacaggagaactggaccgaccatgtgcagggcctggtggggcagagcccgtggcttcaggagcagctgtctcagctgctggtctcccacagtgacccagtcacggccgcccagtgtgccatggaactcttgctgcccgaggagcggctgccggctgcggtggctgtggaactccgccggttcaggctccaggggagggcgactgaggctgactcgaggctggaggtgaaggacatgaaggaccgttactaccagctgcccatccccagggagaacgtccacctcctggcctcgtgggaagacctgaccagacacgagggtgcactcctgcagtgccaccaagtggttggtgtagacgtggagtggacacctgtgtttgttgctgggggccggcctcggccgtcactcctgcaggtggccgtggagggccacgtgttccttctggacgtcctggcactctcgcagccaccaacagggcagggagcccaggccttttcccggctggtggcccagctcctctcggacccctctatcaccaagctgggctacgggatggtgggggacctgcaaaaactgggcacgtcctgccccgccctggcccatgtggagaagcagattctgggcggcatggacctgctgctggtgcacagacagatgcgggtggcgagcgtgccagccccagccgtggacagggccagggagctgaggggcctgagcctcctggtgcagcaggtgctgggcacagccctggacaagacgcagcagctgtccaactgggaccggaggccgctctgcgaggagcaggtcatctacgcagctgccgacgcctactgcctgctggaggtgcaccaagccctgtgcagagagcccgcccgcttccacctgtcggaggacctggctgggagccggaggcccaggcacagagagagaccaggggcacggaagccacccggcctgcagaaagcgtcagcaccggccgcacccaggcaggggctggcacggagcctccgctgtctcggtgtggatgcacgcatgctgggcaatggtgaagaccaccgcagggcggccgaggttgccaggcaggaggggaggatcattctgacgtcggggcagccattccacaagctccgggcccaggtcggggctgggcgctgcctctcggtcgactgctccctgaaggcccagcagcaggccaaggctgtgctcaagcatttcaacgtgcgtgtcacccacgcagacatcttcagccgctgccaggcctgtaactgtgaccagtacctaaaggtctccagggacatgatgaagcagctcatgtggctcagcagtcaccaggaggggcccaggagctcaggcccagccccagacgcagcccctgagggctgcacctatgaccgcccctgccgctggctgcagatggctgacctgcgggcggagacaccggacatgctggccgacggcacccggctgcagctggcaggggtcccggtgggtgtgctgaggacacctgggctgcggtgcttctactgctgcacgggctgtggaaaggtcttctgggacggctcccacctgggtcgtgttgccacccacttccgagacatgctggagagcgcccccagcccctgcgagccgagcccagcccccagcccggccagcagtcccttctgaggacagccagacaataaacatggaaagtgcccgactgctgggcccatggccgtg

SEQ ID NO: 131566 - DNA, 1432 bp, Homo sapiens
  Payload ID: 5675
  Gene Symbol: EXD3
  Gene Name: exonuclease 3'-5' domain containing 3
  ENST ID: ENST00000460390
  CDS Start-End: 146-268
ccttggtgcgccggataaagccctccgggccagcggctgcggtcgggccaaggttccgcgccgggcgtggacggtgtggggcggtcccggccccgcagatcctcgttcctagctgcctgccagcgtcctcggcccggccctgaggatggacccaggagatcccgctggtgaccctgccgctggcgagcgccaccgcatgggccgggaccccctcctgctcctgcaggccctgcagaccctgtggtccacgcgggagcggaagcagtagagacggagtttcaccatgttggccaggctgttctcgaactcctgacctcagagacggagttccgctatgttgcacagacttgtcttgaactcctgagctcaagccatcggcctgcctcgtcttctcaaagtgctgggattccgggcgtggccactgcgcctggctgatgcgttgttcctgcatttgcccaccgactctctgtgtttggctgtaaccacgttgcacgctcagtcagtcgcttgctgctcacagagtccagagtcccgagggacagagaagctgcctttcaccctgtctggccactttccccgaggggcatcctttggagggtctggactttgcagccttgcctcccgcgcctttgggcatggcaccctcctggacagcgctgaggtctcctcacacactcatctccgggaggaagcctggcgggggtttgctgccttggacgaccccctggccgggcttctggacatgctggagagctgccggggccagcggggagagggcccctccctggcggcctggatctcccaccagctgcagtgctggctacaggcacagccatgcccgagcctggcccagcacagcctgaggctgaagcagctgcaggcccgagcggtcaaagtcctcactgagagcccccccagccttgcggcaccactggccagcatcttccagctgcaggatgcagacaggagctgcctgctggcacacgtccaccgcctccaccacgagggcaggttcagagaagcagccacgctgggcgcgacgttgaagctgcagtcggagcttggcgttgaaaagatgagcatcccactgctcctccaggacaaggtggccctcgtggagcgctatgtggccggcttcccggacctccagaggaggctgctggtcctcatggattcctggtgccagcccggctttgacatcaaggacgttgccagctgccatgtgactgcagctggagcagctgcctctggagaggagcggctggggctggcaggagcacagccctcttctcccgagtgaaaagagttaactgctcttagaagaacgaaaataattctccgtggtggctcttctcatgcaggcatggcaaccgtactgctttcttgttcatccattcctttgttctttcatctaataaagtttttggaagca

SEQ ID NO: 131567 - DNA, 2217 bp, Homo sapiens
  Payload ID: 5676
  Gene Symbol: EXO5
  Gene Name: exonuclease 5
  Uniprot ID: Q9H790
  ENST ID: ENST00000296380
  CDS Start-End: 206-1327
ttttttgcgagtggcgggccgactgtgtagtccgctccggcagcgcgctctgcccggcttcctcagtctcctcgccgggagcgtccgggagcagctccgaggccgcggcgaaaccagccttgtcatttcagcattctggccttccctatgaggaggaagatcaacgaagtcacagggcccttctagcccaatccagagctgtaccatggcagagacaagagaagaggagacagtgtcagcagaagcctcagggttctcagacttgagtgactcagagttcctggagtttctggacctagaagatgcccaagagtcaaaggctttagttaacatgcctggcccatcttctgaatcccttgggaaggatgacaaacccataagcttacaaaactggaaaagaggattggatatattatcacccatggagagattccaccttaaatatttatatgtcactgacctggctactcagaactggtgtgaactgcaaacagcatatgggaaggagcttcctggtttcttggcacctgagaaggcagctgtgttggacactggtgccagcatacacctagctagagaactagaacttcatgatcttgtgactgtcccagtcaccactaaagaagatgcttgggcaattaagtttctgaacatacttttgctgattcctaccctgcagtcagaagggcacatcagagagtttccagtgtttggggaaggggagggtgtacttcttgttggagtgattgatgagctgcactatacagccaagggggaactggagctggcggaactcaagacacgcaggcgccctatgctccctctggaagctcagaagaagaaagactgttttcaagtcagcctatacaaatatatctttgatgccatggtacaaggaaaagtgacccctgctagcctaatccaccacacaaagttgtgtctagaaaagccactggggccatcagtgctgaggcatgcccagcagggaggcttctctgtgaagtctttgggtgacctcatggaacttgtcttcttgtctctaacactgtcagacctcccagttattgatatcttgaagattgagtatatccaccaagagactgccactgtgctgggtactgagattgtagccttcaaagagaaggaggtgagagccaaggtgcagcattatatggcctactggatgggccaccgagagccccagggagttgacgtggaggaggcttggaagtgccggacgtgtacctatgcagacatttgtgagtggagaaagggcagtggagtgctcagctctacactggcgccccaagtcaaaaaagccaaatgaatagaaggtatgctttcaagaatgttgatccttcctgctcctgttgtacctaagcaaaagaggaccagtctctgagcttggcttttatggagagtgttcttattttggttcttttttttatttccacaacctctaaccacattcagtccaggaccaaggctcagggatgagtgggagagatgggttatactgtccctggagcttcatcatgattgcctgagaagacagatgctcatcatggctggaatgaaggtatccttcagtaaactttgctttcctaagaaaattcttcagtttctgataagtcatccctatttttatcttgatcaaggctttctacagttacataataaaatgaaatgctgtccaggacagttgaactgatggttttttcataactgcagtccttcaaagatgaccaccatatatagttgtgtacgtgttattccaagcctttaaatatatacataaacatattttggaatcagaatgagcagaccaaaacataaacaataaatattctcaaagagacaagggaagatgaagtagaaacaggaagtcataaatattagatacgaaaaacataatacatggctgggtgcggtggcacatgcctgtaatcccagcactttgggaagctgagatgggtggatcacctgagctcaggagttcaagagcaacctgaccaatacggtgaaagcccgtctctactaaaaatacaaaaattagcctggggtggtggcgtgcgcctgtagtcccagctacttgggaggctgagagaggagaatagcttgaacctgagaggcagaggttacagtgagctgagatcatgccactgcactccagcctgggcaacagagtgagactctgtcttaaaaaaaaaaaaaaaa

SEQ ID NO: 131568 - DNA, 1892 bp, Homo sapiens
  Payload ID: 5676
  Gene Symbol: EXO5
  Gene Name: exonuclease 5
  Uniprot ID: Q9H790
  ENST ID: ENST00000358527
  CDS Start-End: 401-1522
gggactgggctctgggcggcttttttgcgagtggcgggccgactgtgtagtccgctccggcagcgcgctctgcccggcttcctcagtctcctcgccgggagcgtccgggagcagctccgaggccgcggcgaaaccagggagcagggattggatcaagtcattgcatctagagtacgggggaacgaagaaatcatggagagagtttgccccaggagagaggcgagcgttatgtaacctaggatctggggtgggtaacagtctgtgcagtgtcaatgtgagaggagaaaacacccaacgtgagggaatggtcagccttgtcatttcagcattctggccttccctatgaggaggaagatcaacgaagtcacagggcccttctagcccaatccagagctgtaccatggcagagacaagagaagaggagacagtgtcagcagaagcctcagggttctcagacttgagtgactcagagttcctggagtttctggacctagaagatgcccaagagtcaaaggctttagttaacatgcctggcccatcttctgaatcccttgggaaggatgacaaacccataagcttacaaaactggaaaagaggattggatatattatcacccatggagagattccaccttaaatatttatatgtcactgacctggctactcagaactggtgtgaactgcaaacagcatatgggaaggagcttcctggtttcttggcacctgagaaggcagctgtgttggacactggtgccagcatacacctagctagagaactagaacttcatgatcttgtgactgtcccagtcaccactaaagaagatgcttgggcaattaagtttctgaacatacttttgctgattcctaccctgcagtcagaagggcacatcagagagtttccagtgtttggggaaggggagggtgtacttcttgttggagtgattgatgagctgcactatacagccaagggggaactggagctggcggaactcaagacacgcaggcgccctatgctccctctggaagctcagaagaagaaagactgttttcaagtcagcctatacaaatatatctttgatgccatggtacaaggaaaagtgacccctgctagcctaatccaccacacaaagttgtgtctagaaaagccactggggccatcagtgctgaggcatgcccagcagggaggcttctctgtgaagtctttgggtgacctcatggaacttgtcttcttgtctctaacactgtcagacctcccagttattgatatcttgaagattgagtatatccaccaagagactgccactgtgctgggtactgagattgtagccttcaaagagaaggaggtgagagccaaggtgcagcattatatggcctactggatgggccaccgagagccccagggagttgacgtggaggaggcttggaagtgccggacgtgtacctatgcagacatttgtgagtggagaaagggcagtggagtgctcagctctacactggcgccccaagtcaaaaaagccaaatgaatagaaggtatgctttcaagaatgttgatccttcctgctcctgttgtacctaagcaaaagaggaccagtctctgagcttggcttttatggagagtgttcttattttggttcttttttttatttccacaacctctaaccacattcagtccaggaccaaggctcagggatgagtgggagagatgggttatactgtccctggagcttcatcatgattgcctgagaagacagatgctcatcatggctggaatgaaggtatccttcagtaaactttgctttcctaagaaaattcttcagtttctgataagtcatccctatttttatcttgatcaaggctttctacagttacataataaaatgaaatgctgtccag

SEQ ID NO: 131569 - DNA, 2567 bp, Homo sapiens
  Payload ID: 5676
  Gene Symbol: EXO5
  Gene Name: exonuclease 5
  Uniprot ID: Q9H790
  ENST ID: ENST00000372703
  CDS Start-End: 1075-2196
gggctctgggcggcttttttgcgagtggcgggccgactgtgtagtccgctccggcagcgcgctctgcccggcttcctcagtctcctcgccgggagcgtccgggagcagctccgaggccgcggcgaaaccaggtggagtccgaggttcggaggagtatcagaggttaggggaaggccggagaatgggctgggaggctgcgtttcggagcttagggttctgtccctgcgatcgccgcgtctccctcccttggtgggcgcggctcccgggaagcggctcgtctcgtctcccctcacaggccgggttcccgttctggaccttcgccctcggaacacagtgctgttggccgggactccttcccgaggtggacggctccctgttcttattcctggctctgccagaactgtaggaagtgctcagtacactttagggcatgcatggcactccctgggagacagtgctttagggccagaggaaagatcttccctgaaggcaaacgcccgcggagcccacaagtccgggccgcactgaacaagtcaggatgttgccatcggcaattctgcagaaggcagtaacccatctgagagaaagagccgctgtcataaggtctcttgcttgagctgctgggttgagaatggagctggaagagggaactgatctcggagctccttggggatcttggttatgtctgacccttttactttcagggagcagggattggatcaagtcattgcatctagagtacgggggaacgaagaaatcatggagagagtttgccccaggagagaggcgagcgttatgtaacctaggatctggggtgggtaacagtctgtgcagtgtcaatgtgagaggagaaaacacccaacgtgagggaatggtcaggtaagaaaggaccagaagttccggttctaccatagcaaggacctaagttgctaatttaggttctttaatgcagacctggtctttcagaacttctttctcttccctagccttgtcatttcagcattctggccttccctatgaggaggaagatcaacgaagtcacagggcccttctagcccaatccagagctgtaccatggcagagacaagagaagaggagacagtgtcagcagaagcctcagggttctcagacttgagtgactcagagttcctggagtttctggacctagaagatgcccaagagtcaaaggctttagttaacatgcctggcccatcttctgaatcccttgggaaggatgacaaacccataagcttacaaaactggaaaagaggattggatatattatcacccatggagagattccaccttaaatatttatatgtcactgacctggctactcagaactggtgtgaactgcaaacagcatatgggaaggagcttcctggtttcttggcacctgagaaggcagctgtgttggacactggtgccagcatacacctagctagagaactagaacttcatgatcttgtgactgtcccagtcaccactaaagaagatgcttgggcaattaagtttctgaacatacttttgctgattcctaccctgcagtcagaagggcacatcagagagtttccagtgtttggggaaggggagggtgtacttcttgttggagtgattgatgagctgcactatacagccaagggggaactggagctggcggaactcaagacacgcaggcgccctatgctccctctggaagctcagaagaagaaagactgttttcaagtcagcctatacaaatatatctttgatgccatggtacaaggaaaagtgacccctgctagcctaatccaccacacaaagttgtgtctagaaaagccactggggccatcagtgctgaggcatgcccagcagggaggcttctctgtgaagtctttgggtgacctcatggaacttgtcttcttgtctctaacactgtcagacctcccagttattgatatcttgaagattgagtatatccaccaagagactgccactgtgctgggtactgagattgtagccttcaaagagaaggaggtgagagccaaggtgcagcattatatggcctactggatgggccaccgagagccccagggagttgacgtggaggaggcttggaagtgccggacgtgtacctatgcagacatttgtgagtggagaaagggcagtggagtgctcagctctacactggcgccccaagtcaaaaaagccaaatgaatagaaggtatgctttcaagaatgttgatccttcctgctcctgttgtacctaagcaaaagaggaccagtctctgagcttggcttttatggagagtgttcttattttggttcttttttttatttccacaacctctaaccacattcagtccaggaccaaggctcagggatgagtgggagagatgggttatactgtccctggagcttcatcatgattgcctgagaagacagatgctcatcatggctggaatgaaggtatccttcagtaaactttgctttcctaagaaaattcttcagtttctgataagtcatccctatttttatcttgatcaaggctttctacagttacataataaaatgaaatgctgtccagg

SEQ ID NO: 131570 - DNA, 805 bp, Homo sapiens
  Payload ID: 5676
  Gene Symbol: EXO5
  Gene Name: exonuclease 5
  ENST ID: ENST00000418186
  CDS Start-End: 134-805
cgggccgactgtgtagtccgctccggcagcgcgctctgcccggcttcctcagtctcctcgccgggagcgtccgggagcagctccgaggccgcggcgaaaccagggcccttctagcccaatccagagctgtaccatggcagagacaagagaagaggagacagtgtcagcagaagcctcagggttctcagacttgagtgactcagagttcctggagtttctggacctagaagatgcccaagagtcaaaggctttagttaacatgcctggcccatcttctgaatcccttgggaaggatgacaaacccataagcttacaaaactggaaaagaggattggatatattatcacccatggagagattccaccttaaatatttatatgtcactgacctggctactcagaactggtgtgaactgcaaacagcatatgggaaggagcttcctggtttcttggcacctgagaaggcagctgtgttggacactggtgccagcatacacctagctagagaactagaacttcatgatcttgtgactgtcccagtcaccactaaagaagatgcttgggcaattaagtttctgaacatacttttgctgattcctaccctgcagtcagaagggcacatcagagagtttccagtgtttggggaaggggagggtgtacttcttgttggagtgattgatgagctgcactatacagccaagggggaactggagctggcggaactcaagacacgcaggcgccctatgctccctctggaagctcagaagaagaaagactgttttcaagtcagcctatacaaatatatc

SEQ ID NO: 131571 - DNA, 856 bp, Homo sapiens
  Payload ID: 5676
  Gene Symbol: EXO5
  Gene Name: exonuclease 5
  ENST ID: ENST00000419161
  CDS Start-End: 115-856
cgctctgcccggcttcctcagtctcctcgccgggagcgtccgggagcagctccgaggccgcggcgaaaccaggtggagtccgagggcccttctagcccaatccagagctgtaccatggcagagacaagagaagaggagacagtgtcagcagaagcctcagggttctcagacttgagtgactcagagttcctggagtttctggacctagaagatgcccaagagtcaaaggctttagttaacatgcctggcccatcttctgaatcccttgggaaggatgacaaacccataagcttacaaaactggaaaagaggattggatatattatcacccatggagagattccaccttaaatatttatatgtcactgacctggctactcagaactggtgtgaactgcaaacagcatatgggaaggagcttcctggtttcttggcacctgagaaggcagctgtgttggacactggtgccagcatacacctagctagagaactagaacttcatgatcttgtgactgtcccagtcaccactaaagaagatgcttgggcaattaagtttctgaacatacttttgctgattcctaccctgcagtcagaagggcacatcagagagtttccagtgtttggggaaggggagggtgtacttcttgttggagtgattgatgagctgcactatacagccaagggggaactggagctggcggaactcaagacacgcaggcgccctatgctccctctggaagctcagaagaagaaagactgttttcaagtcagcctatacaaatatatctttgatgccatggtacaaggaaaagtgacccctgctagcctaatccaccacacaaagttgtgtctagaaa

SEQ ID NO: 131572 - DNA, 863 bp, Homo sapiens
  Payload ID: 5676
  Gene Symbol: EXO5
  Gene Name: exonuclease 5
  ENST ID: ENST00000420209
  CDS Start-End: 186-863
gggcggcttttttgcgagtggcgggccgactgtgtagtccgctccggcagcgcgctctgcccggcttcctcagtctcctcgccgggagcgtccgggagcagctccgaggccgcggcgaaaccaggtggagtccgaggttcggaggagtatcagagggcccttctagcccaatccagagctgtaccatggcagagacaagagaagaggagacagtgtcagcagaagcctcagggttctcagacttgagtgactcagagttcctggagtttctggacctagaagatgcccaagagtcaaaggctttagttaacatgcctggcccatcttctgaatcccttgggaaggatgacaaacccataagcttacaaaactggaaaagaggattggatatattatcacccatggagagattccaccttaaatatttatatgtcactgacctggctactcagaactggtgtgaactgcaaacagcatatgggaaggagcttcctggtttcttggcacctgagaaggcagctgtgttggacactggtgccagcatacacctagctagagaactagaacttcatgatcttgtgactgtcccagtcaccactaaagaagatgcttgggcaattaagtttctgaacatacttttgctgattcctaccctgcagtcagaagggcacatcagagagtttccagtgtttggggaaggggagggtgtacttcttgttggagtgattgatgagctgcactatacagccaagggggaactggagctggcggaactcaagacacgcaggcgccctatgctccctctggaagctcagaagaagaaagactgttttcaagtcagcctatacaaatatatctttgat

SEQ ID NO: 131573 - DNA, 941 bp, Homo sapiens
  Payload ID: 5676
  Gene Symbol: EXO5
  Gene Name: exonuclease 5
  ENST ID: ENST00000443729
  CDS Start-End: 200-941
cggcagcgcgctctgcccggcttcctcagtctcctcgccgggagcgtccgggagcagctccgaggccgcggcgaaaccaggtggagtccgaggttcggaggagtatcagagccttgtcatttcagcattctggccttccctatgaggaggaagatcaacgaagtcacagggcccttctagcccaatccagagctgtaccatggcagagacaagagaagaggagacagtgtcagcagaagcctcagggttctcagacttgagtgactcagagttcctggagtttctggacctagaagatgcccaagagtcaaaggctttagttaacatgcctggcccatcttctgaatcccttgggaaggatgacaaacccataagcttacaaaactggaaaagaggattggatatattatcacccatggagagattccaccttaaatatttatatgtcactgacctggctactcagaactggtgtgaactgcaaacagcatatgggaaggagcttcctggtttcttggcacctgagaaggcagctgtgttggacactggtgccagcatacacctagctagagaactagaacttcatgatcttgtgactgtcccagtcaccactaaagaagatgcttgggcaattaagtttctgaacatacttttgctgattcctaccctgcagtcagaagggcacatcagagagtttccagtgtttggggaaggggagggtgtacttcttgttggagtgattgatgagctgcactatacagccaagggggaactggagctggcggaactcaagacacgcaggcgccctatgctccctctggaagctcagaagaagaaagactgttttcaagtcagcctatacaaatatatctttgatgccatggtacaaggaaaagtgacccctgctagcctaatccaccacacaaagttgtgtctagaaa

SEQ ID NO: 131574 - DNA, 865 bp, Homo sapiens
  Payload ID: 5676
  Gene Symbol: EXO5
  Gene Name: exonuclease 5
  ENST ID: ENST00000415550
  CDS Start-End: 383-865
gtccgctccggcagcgcgctctgcccggcttcctcagtctcctcgccgggagcgtccgggagcagctccgaggccgcggcgaaaccaggtggagtccgaggttcggaggagtatcagagggagcagggattggatcaagtcattgcatctagagtacgggggaacgaagaaatcatggagagagtttgccccaggagagaggcgagcgttatgtaacctaggatctggggtgggtaacagtctgtgcagtgtcaatgtgagaggagaaaacacccaacgtgagggaatggtcagccttgtcatttcagcattctggccttccctatgaggaggaagatcaacgaagtcacagggcccttctagcccaatccagagctgtaccatggcagagacaagagaagaggagacagtgtcagcagaagcctcagggttctcagacttgagtgactcagagttcctggagtttctggacctagaagatgcccaagagtcaaaggctttagttaacatgcctggcccatcttctgaatcccttgggaaggatgacaaacccataagcttacaaaactggaaaagaggattggatatattatcacccatggagagattccaccttaaatatttatatgtcactgacctggctactcagaactggtgtgaactgcaaacagcatatgggaaggagcttcctggtttcttggcacctgagaaggcagctgtgttggacactggtgccagcatacacctagctagagaactagaacttcatgatcttgtgactgtcccagtcaccactaaagaagatgcttgggcaattaagtttctgaacatacttttgctgattcctaccctgcagtcagaaggg

SEQ ID NO: 131575 - DNA, 688 bp, Homo sapiens
  Payload ID: 5676
  Gene Symbol: EXO5
  Gene Name: exonuclease 5
  ENST ID: ENST00000432259
  CDS Start-End: 387-688
gcgagtggcgggccgactgtgtagtccgctccggcagcgcgctctgcccggcttcctcagtctcctcgccgggagcgtccgggagcagctccgaggccgcggcgaaaccaggtggagtccgagggagcagggattggatcaagtcattgcatctagagtacgggggaacgaagaaatcatggagagagtttgccccaggagagaggcgagcgttatgtaacctaggatctggggtgggtaacagtctgtgcagtgtcaatgtgagaggagaaaacacccaacgtgagggaatggtcagccttgtcatttcagcattctggccttccctatgaggaggaagatcaacgaagtcacagggcccttctagcccaatccagagctgtaccatggcagagacaagagaagaggagacagtgtcagcagaagcctcagggttctcagacttgagtgactcagagttcctggagtttctggacctagaagatgcccaagagtcaaaggctttagttaacatgcctggcccatcttctgaatcccttgggaaggatgacaaacccataagcttacaaaactggaaaagaggattggatatattatcacccatggagagattccaccttaaatatttatatgtcactgacctggctactcagaactggtgtgaactgcaaacagcatatgggaagga

SEQ ID NO: 131576 - DNA, 10187 bp, Homo sapiens
  Payload ID: 5677
  Gene Symbol: EXPH5
  Gene Name: exophilin 5
  Uniprot ID: Q8NEV8
  ENST ID: ENST00000265843
  CDS Start-End: 112-6081
attattggctgtgggatcaagttcgtgaaactggtcttgtacaggttgaaaaatgccttcctaacaggaggcgccaaggagcttaagtgtaactcacacacagtaaagaaaatgacgaaagttcctccggcgtttgatttcagtttcttaaatgacgaagaggccaggaagatccttcaggtgctggaaaggaatgaggagttacagagggccgagaaggacaggatcagcaaacttcagaagacaaagagggatatcagatggcttcagggagtgactggtgaatggtttgaagaaattcaaagaaaaaagttttgcaatgaaacagatgttagccaaatgttaaaacaaccacttacatacaggctaagtaaggagatggcaaaaaatgatccgatagaattacctacatcaagatctaaaaatgtaactaatcaaaaaaagccgacacctttttcttcccggatgagcttcagatcgtcatttgcttccctgttctcattcaggaaatctggaaaggagacttcaaagcttccatcactgggacagaaaggatgtgatggccatgcaggacctcctatgcctgtgaggggagctgctgtgcaggcaaaaatatacaattcacctctggaaaatcatctagttgacagtacatttgtcccaaagccagcagtcatgagggaggagagtggcatgcctccaccgtgggatgcttcactgctggagaatgagtttttccaagttttagatgacttggatagcaaattggctcaggaacagtctgcaagctcagtgaataccagaacacccctcaactatggatcaagaacacagttcggtcacttttattccagtggtaacagacatggtaatatcacagaaaggcacaaaaaacactataatgaaacttccaatatgtctatctatgacatcctaagaccaggaactcctagggaaggttttaaaaccttttctcctaggacaagcacaatttatgatatgtataggacaagggagcccagagtctttaaagaagattatgtgcaaaagaatacttttggcagtacttcgctgtgttttgacagcaggcaacggtcggccttaccagccacagggcatttcacagcaagaagcttacattttccagccacaactcagagcaagagtgggtttataccaccaaggcaccagcagagtccaaagagaactcctttatcatccatcatatggaacagatcagattcctctagagacagggagaaccaggaagagttcctgagggcaccatcaccaatggaaattgatcccgctgacaagtatgtgtatcccaggggttttcaggagaataagagatatgaatcgtaccattcacagaatgtttaccaacgtgttagtttaaatgctcccatggagaatgcaatgagtcccgacacttttgagaactcagagaacatgccattctaccatcaaagcaacacatttaccagatctttcttcagcaatacctttggacgaagcggagaacagaggagatttggacaaggtcctttttggggccaagagaaaggacattctttctggtctgactttcatcgaagcaggaaatcattcagttcttctgacagagactttgaaatgatttccatggaagcaaatagtgtatcagccattcatggccataatgtttcttctgaacactgggaatcattttcttctggttatggaacagatgtttccagaggccaagaagagccacatccttggcagtttgattttcagagatccacactggatagcatggtggtatcacatggtaatgagacccagttgactcctcattttggcacaccaaatgtttgctccatgactggttcaagctatcacgtcaaatctagtgagttggtaagtcaacaggacagttctcctgtagaagtacatataaacaaagaagcttcctcatttggaattgctcagactctagcatcctcattcaaaacttccttttcccagatttctgatgacagaaggaatcctcagagtcccaacttgcagaatcccacagtcactttgcagaaaatttttccaaataagcctgcctctcatccaatgagaagccatacagaagtcactgtgaccagcagcaattcagttgactctctgcctcttgccaaaagccagcccaatatcttggtcacagaagtaaataatgagaaagacttaaatgaatctatttcagaagaagacaaacagctaagcaagatggaccagacaaacaaggcaggtgaaataccccaacctgtttcacagacagggatctcaaactctttacctgattttcaaaatcccttatcccaggactcagccaagagcaacgggtttggttttaatgcatctaccataataagttcaaaaaagtcacccagagtcttttccaggaaagatacctccaaaatgtatataccgcacacagataaatccaatgacattaaacaagataagaggtttactgaaaacagaaaacttggctcaacagcttcccttcctttcattcaggaacacagaacaccaccatctttccccaggacagaccaaggttgtcaccaggaattaactgtaaataatgaagatatttcaagaattattacaaataaccactggagctctgcactgactgatactcaaaatgcacaatactcaaaatgcaagttaactcctggccacaagacctcgtgtgattctttagatctgtcatcagctgcactaccagattcctcaccatcaaagaattcttcccttgatgctcctgtggttccatctactacagtgttctccaggagaagtccttcagacaaagatccatcgctaggagaaagagaagaaaaagacaatgctgggaagaaccaaaagaatcagtttattgtaagccactcagaaaaccaagagagaaatgatagtcctgtgcctacacatgatgaagtggttgatgtcaaatgccattcacactctccttttaggaatgaaagaggaaaaggaaaaataaggcatcatatatcctgtattgaaaagttaagcaaaacagaaagtatatcagtacccaccagtgatcacaggagcctcattgaagcaaatcaaagcaattccaaagtttctgaacttgacacaatttattgtaccttgccaagaaaatcaagcagttttctcatacatggcaggcagtcaggaagtaaaataatggctgcttcattgaggaatgggccacctcccttccaaatcaaaaataatgtggaagatgcaatggggaactatatgttaaacaaatttagtcccagttctcctgagtcagcgaatgaatgttccaaagtcctttcagactcagccctggaagcacctgaagccacagagagaatgacaaatgtaaaaagcagtggatctacttccgttagaaaaggaccacttccattcctcatcaacagggctatgtcatgtccctcaggggagccacatgcctcaactggaagagaaggaagaaaaaagccattgacctcaggcatggatgcttctgagctaacaccaagggcttgggagagaatcattagccctgtggaaagtgactcatctgttagagattgttctttaaccaaaagacaacaccaaaaggaaaacttccaagaatacactgagaaagagggtaaaatggctgcctccaggagaagtgtatttgctctttcaaatgaagaccctttacctttttgctcagacttgtcaggaaaagaacgtgggaaaacattacataaagttaagacgactagtacgttttctgtttctggtgatgaagataatgtaaaatgtctggaggtggtctcaatatattacactctaccgaggaaacccagcaaaaaattctgtaacctccttcaacagtatacacaaaatactaatttacttatagaatcacctcaagtggagactgaaacatttcctaacgctttagaaaaagacaaacagaattattctacacgagagcagtcaggaacaccttcatgtgaaaatctaaagatgtccgtcaactctgatcagacgctcaccactgaaaatatgactgccttccgattatcaaatagggggcccctagctcctacattacaggaaatggcttctgttgaggcagctgtttctcttcctgaagaggaatctaaagctagagagattttttcagataatttagctaaaacacctctaggtgattcagaaaacaagaaggaaagaggcaaaaagttgcaaagtgaaaccctgcatacttcattgatgcttcagagaaaaaatgtatccgaagaaaaatctgaaaattgtcaacaatccattaattcaagtaacagtggtccctctagtcttccagctctttcagaagttaatattggaaattcccaaactagaagaagttcttgggagtgtacagggagtggtagagccattccatttactggaagtggcaagtgtccccagaaagatcacacatccacagctgtaggtgatggctccagtggatcacagcctagggaaggcagaggggacattggaaccaactgccaaaaaatgactaataaaacactttctcactcagagagtcaagtctttgcccttactccagcattgcataaactacagcttggtgaggagactcagtcagatgaaccaaacttagagagtctgcagtctgaaccaagagaattacctcaaagaagtcaggaggcaaatatgacagagagcaggaaggctgaagatgaaatgcagaagtcagcttgggatcaaccttcacttcctgaaggaaacaaaaataaaaccaacttggatgacctagtaaagggggaaaatagatcttcagttaaacacagattggcagccatgtctaaagccagcagaaaattcccagctaaagatgtaagccccagaagacatgtagctactatcttcccccaaagtggaagcagatctggctttgaccatttatctcttggcacagtggagtgcaacccactgttccctgagcctactccaaaatctgcagagtccattggcgaaagcaggttgagtgagaacggaaagcatgtgaagaaatccgagaaccttctccccattactgtactacccaacagagaaccttctacacacgtcagcaaccagaagtctaacagcatttcacaacgacatcagaatgagtttaaaaacgtctcagaatcaccatcaaagcatgagaattctaaagacgtcacagcagctcagaatttagtaagagaatcaggagccccatcacccatcacattcaccagcctcagggaagcagaattctctgacaatcagaggaggctgagccctccttttccactggagcctgcacagaaatctagagtaagcagtccactggccagttttctgcagcaacaaaggagtgcttcatctctggagtgggaacctgagccacacctctatcgttcaaagagtttaaaaagcattaatgttcatggcgatctactacgaaaaagccatcctccaaaagtcagggagcgccatttttctgaaagcacttctattgacaatgccctgagtcgactgacccttgggaatgaattctctgtcaacaatgggtacagtcgaagattcagatctttttctgaactcccctcctgtgatggaaatgaaagttgggcttatcgcagcgggacaaaaacaggtcccaggtctgcaatatctatatacagacctatcgactatgggatctttgggaaagaacaacagttagctttcttagaaaatgtaaagaggtcacttacacaaggaagattatggaaaccaagttttcttaagaaccctggcttcctaaaagatgatttgaggaaccctcccaacccctcagagtcattaagctcaaattctcccagtagtcaggtgccagaagatggcttatctccaagtgaaccgcttaatatctatgaggatgacccagtggactcagattgtgacacagacacaaccacagatgatgaatactacctggatgaaaatgacaaagagtcagaactgtgaggctttttcaataaaatgctttacttttttcaccaaaagcttataatggaactaaggtgtacatgtgcatgtgcatggaaggataaaagatctagtctgggcagtgtctgctctgaaatgtcccacatctccttttttttcctccacaccctatatagacacttcctgaatgctagaacaatgaattcttgttttgagagagtctctgctattttctatctctgtaaatgttcttagcctgcctttccaccactcccacttaatccctgattcactgtctgatttgggctttctgctttacttccctcctaacatttttcatctttaattgtgatttacaaccctaatatcccaggcacatacaaaacttatgaattacccagcacaactgtgaaactctgtattgcttcttccggtccacaccctatactcatgacattaaataaaaggtagggatgataacagtggggtaaatattatcatcctgtttgactcatgaacatttaggaagtttaaggtggtgatcttctctttcaaacaaagataaaggaatttattttttaacctgagaaactgattgcaaaaaggaaaaaaaaaagataaaggaattttgtaagtacttcctgttatatccgtagtggagcctgggaggcacatggtcaaagcacatgttgaggttatagattaggacctgaatccctagtaagccaatagaaggttagcagtcctagaaattcctctgaaaccgtgggggactggctggattattaagggcttttagtcaagccaaggacttaggccaggcaacctgaccatacagaaagttgcctggtcacagaatttctgcttatgaagagaacatagctgaggagcagaggtaggaagtaggtatcccttcatgggaccgacttacctttactgcagttctctcagcaactggcttttcccatttcctcagaactatccattttcacattttcttttttttgtttttgttttttgtttggttttgttttgtttttgttttttggagacggagttttgctctgtcacccaggctggagtgcagtggcatgatctgggctcactgcaacctccgcctcccgggttcaagcgattctcctgcctcagcctccagagtagctgggatcacaggcgcacccaggcgcacgctgccacgcccagctaatatttttgtattttagtagagacggggtttcaccgtgttgcccaggctggtctcgaactcctgagctcaggcaatccgcccacttcagcctcccagagtgctaggattacaggcatgagctaccatgcccagtctttttttgttttgttttgtttttgtttttgttttgaggtggagtcttgttcttgttgctcaggctagagtgcaatggcatgatctcagcttactgcaacctcctcctcccaagttcaggcaattctcctgcctcagcctcccaagtagctgggactacaggcacccaccaccacacctggctaatttttttttttttttttttttttttggtatttttagtagagttggagtttcaccaggttggccaggctggtctcaaacttctgacctcaggtgatctgcccacctcggcctcccaaactgctgggattacaggcatgagccaccgtgcctggcccacattttctttaattgcaaggtagaacgcttcttttcaggtggggcattttagtcccaaatatcaagtgggaaccttggccaagtccctaaaatgccatcaagtcagatctgacaccctggaattcattctttgctgcaggatcatctacgaaacccttgggaaattctaaggcagagctcctaagggcttgtcactatgattcagtgatttatctagagtaaatcacttatgatacccactgatattttggctttcctaactctttatttgccatgcagaacctcgggggatttctctcctaattcaggataaagaccaatagatggcagtgaagataatctgctttaactacagacagcatggattcctggatctcaatactatgatagtcaacatgagtggattttatcttgcttggtttatatttgcttcgcgacctaatctaattttccattttttatacctagtctgtttcatcattataaactaagaataatgatagatgttggtgaagtgtatagagatctggaactgatagagagttaagaaagaactatgttgttgttatccttctaatcattcccttacatagacgcaaaatgcgtgggttactttacatggttcccatgcaactcaaagctaatgaacatgcggtaactaacatgaaagctattccctaaatctgtcaactattttaaacttcaagctctgaccaatcctgagctcagaaagctcaaaaatcaaatattgtgaacttttcaatgcaaatttgtatggtaaagaataaataacactatttcttggttaatatatgtttgtaaattctgcctttcctctttttctatttatctgattattattattattattattattttctttgagacagagtctcactctgttgcccaggctggagtgcaatggcgcaatctcggctcactgcaacctccgcctcccaggttcaagcgattctcctgcctcagcttcccgagtagctgggattacaggtgcccaccaccacgcccagctaatttttgtatttttagcagagacggggtttcgccatgttggccaggctggtttcgaactcctgacctcaggtgatccgcctgcctcagcctcccaaactgctgggattataggcatgagccacctcgccagccctatttatctgattatttaagtaaaactttaataaaccatgacctacattttctatgcaattttaagatactcagagttaatattttaatattgaggttcttgatttttttaatgatcagctttcaaattatatttcagtatatactctgagtctacgtgtatgctacaaaaggtgaaatgaagttagcttatttttcagtgagtttaggctatattaagagttaggtaagttaggtaagggtgaaactgctttggggcccagactgcgctggaatgtactgtttaaattcaaaggtaattgatggccagtgttcagttgctctatttgtaacgtttgcatgttggtctggctgaagtatcaggaaaacacaaaattcatgaaaatagcaccttttataattttatacttttataaagcacttgttaaagaagtatagcaaatttctatgtattttaacatacaagtcgctgcattttaatgttcatttttggtatagctatggtaacttataatagtcatttttatattcataacttgttttctgaaagatatagtcattattaaaataaacattcatgtaaatggagtaaatcataggggaatcaatcgtaataaataccttataaattataaacttgtttagatactagatttctataaccataaattttatactgtaaagtctgtttaaaatagggtttaatgaagttattttaatttttagagactcccctctaaataatttactcctacattgtaaatacattgatgccaacaaaattccaactgctactaacaaaggtttggttggtgataagctaataacagctactttgtgtaggaggtaaatatgtgtactggagggggtaaaaatccatttaggttatggcaaagatgggaatcaaactgtaaaactcatagccccataaaattaatattctttgttaagtgccagagggtttaagagaacttcttgcttagagtttattgataataataatgcttcagaatatcccatttaaatgtacagtgtaaatatgtaaaatattttacttcccaggcaagtttgtggctgtattgccacttagtggctctttgtgactggcagttctgtatatctgaaacaaataagctgtaagcacttttgttaaaactttgtcaaataatccttttatgtacttgttctcagacctgttctctggttatgaaatgtgttaaagacaaggtgcaaatttaaaacaatgcctgtattgaaataaatgacttaaacagatgca

SEQ ID NO: 131577 - DNA, 6542 bp, Homo sapiens
  Payload ID: 5677
  Gene Symbol: EXPH5
  Gene Name: exophilin 5
  Uniprot ID: Q8NEV8
  ENST ID: ENST00000525344
  CDS Start-End: 6-5954
gaaacatgtcattaagtttcttaaatgacgaagaggccaggaagatccttcaggtgctggaaaggaatgaggagttacagagggccgagaaggacaggatcagcaaacttcagaagacaaagagggatatcagatggcttcagggagtgactggtgaatggtttgaagaaattcaaagaaaaaagttttgcaatgaaacagatgttagccaaatgttaaaacaaccacttacatacaggctaagtaaggagatggcaaaaaatgatccgatagaattacctacatcaagatctaaaaatgtaactaatcaaaaaaagccgacacctttttcttcccggatgagcttcagatcgtcatttgcttccctgttctcattcaggaaatctggaaaggagacttcaaagcttccatcactgggacagaaaggatgtgatggccatgcaggacctcctatgcctgtgaggggagctgctgtgcaggcaaaaatatacaattcacctctggaaaatcatctagttgacagtacatttgtcccaaagccagcagtcatgagggaggagagtggcatgcctccaccgtgggatgcttcactgctggagaatgagtttttccaagttttagatgacttggatagcaaattggctcaggaacagtctgcaagctcagtgaataccagaacacccctcaactatggatcaagaacacagttcggtcacttttattccagtggtaacagacatggtaatatcacagaaaggcacaaaaaacactataatgaaacttccaatatgtctatctatgacatcctaagaccaggaactcctagggaaggttttaaaaccttttctcctaggacaagcacaatttatgatatgtataggacaagggagcccagagtctttaaagaagattatgtgcaaaagaatacttttggcagtacttcgctgtgttttgacagcaggcaacggtcggccttaccagccacagggcatttcacagcaagaagcttacattttccagccacaactcagagcaagagtgggtttataccaccaaggcaccagcagagtccaaagagaactcctttatcatccatcatatggaacagatcagattcctctagagacagggagaaccaggaagagttcctgagggcaccatcaccaatggaaattgatcccgctgacaagtatgtgtatcccaggggttttcaggagaataagagatatgaatcgtaccattcacagaatgtttaccaacgtgttagtttaaatgctcccatggagaatgcaatgagtcccgacacttttgagaactcagagaacatgccattctaccatcaaagcaacacatttaccagatctttcttcagcaatacctttggacgaagcggagaacagaggagatttggacaaggtcctttttggggccaagagaaaggacattctttctggtctgactttcatcgaagcaggaaatcattcagttcttctgacagagactttgaaatgatttccatggaagcaaatagtgtatcagccattcatggccataatgtttcttctgaacactgggaatcattttcttctggttatggaacagatgtttccagaggccaagaagagccacatccttggcagtttgattttcagagatccacactggatagcatggtggtatcacatggtaatgagacccagttgactcctcattttggcacaccaaatgtttgctccatgactggttcaagctatcacgtcaaatctagtgagttggtaagtcaacaggacagttctcctgtagaagtacatataaacaaagaagcttcctcatttggaattgctcagactctagcatcctcattcaaaacttccttttcccagatttctgatgacagaaggaatcctcagagtcccaacttgcagaatcccacagtcactttgcagaaaatttttccaaataagcctgcctctcatccaatgagaagccatacagaagtcactgtgaccagcagcaattcagttgactctctgcctcttgccaaaagccagcccaatatcttggtcacagaagtaaataatgagaaagacttaaatgaatctatttcagaagaagacaaacagctaagcaagatggaccagacaaacaaggcaggtgaaataccccaacctgtttcacagacagggatctcaaactctttacctgattttcaaaatcccttatcccaggactcagccaagagcaacgggtttggttttaatgcatctaccataataagttcaaaaaagtcacccagagtcttttccaggaaagatacctccaaaatgtatataccgcacacagataaatccaatgacattaaacaagataagaggtttactgaaaacagaaaacttggctcaacagcttcccttcctttcattcaggaacacagaacaccaccatctttccccaggacagaccaaggttgtcaccaggaattaactgtaaataatgaagatatttcaagaattattacaaataaccactggagctctgcactgactgatactcaaaatgcacaatactcaaaatgcaagttaactcctggccacaagacctcgtgtgattctttagatctgtcatcagctgcactaccagattcctcaccatcaaagaattcttcccttgatgctcctgtggttccatctactacagtgttctccaggagaagtccttcagacaaagatccatcgctaggagaaagagaagaaaaagacaatgctgggaagaaccaaaagaatcagtttattgtaagccactcagaaaaccaagagagaaatgatagtcctgtgcctacacatgatgaagtggttgatgtcaaatgccattcacactctccttttaggaatgaaagaggaaaaggaaaaataaggcatcatatatcctgtattgaaaagttaagcaaaacagaaagtatatcagtacccaccagtgatcacaggagcctcattgaagcaaatcaaagcaattccaaagtttctgaacttgacacaatttattgtaccttgccaagaaaatcaagcagttttctcatacatggcaggcagtcaggaagtaaaataatggctgcttcattgaggaatgggccacctcccttccaaatcaaaaataatgtggaagatgcaatggggaactatatgttaaacaaatttagtcccagttctcctgagtcagcgaatgaatgttccaaagtcctttcagactcagccctggaagcacctgaagccacagagagaatgacaaatgtaaaaagcagtggatctacttccgttagaaaaggaccacttccattcctcatcaacagggctatgtcatgtccctcaggggagccacatgcctcaactggaagagaaggaagaaaaaagccattgacctcaggcatggatgcttctgagctaacaccaagggcttgggagagaatcattagccctgtggaaagtgactcatctgttagagattgttctttaaccaaaagacaacaccaaaaggaaaacttccaagaatacactgagaaagagggtaaaatggctgcctccaggagaagtgtatttgctctttcaaatgaagaccctttacctttttgctcagacttgtcaggaaaagaacgtgggaaaacattacataaagttaagacgactagtacgttttctgtttctggtgatgaagataatgtaaaatgtctggaggtggtctcaatatattacactctaccgaggaaacccagcaaaaaattctgtaacctccttcaacagtatacacaaaatactaatttacttatagaatcacctcaagtggagactgaaacatttcctaacgctttagaaaaagacaaacagaattattctacacgagagcagtcaggaacaccttcatgtgaaaatctaaagatgtccgtcaactctgatcagacgctcaccactgaaaatatgactgccttccgattatcaaatagggggcccctagctcctacattacaggaaatggcttctgttgaggcagctgtttctcttcctgaagaggaatctaaagctagagagattttttcagataatttagctaaaacacctctaggtgattcagaaaacaagaaggaaagaggcaaaaagttgcaaagtgaaaccctgcatacttcattgatgcttcagagaaaaaatgtatccgaagaaaaatctgaaaattgtcaacaatccattaattcaagtaacagtggtccctctagtcttccagctctttcagaagttaatattggaaattcccaaactagaagaagttcttgggagtgtacagggagtggtagagccattccatttactggaagtggcaagtgtccccagaaagatcacacatccacagctgtaggtgatggctccagtggatcacagcctagggaaggcagaggggacattggaaccaactgccaaaaaatgactaataaaacactttctcactcagagagtcaagtctttgcccttactccagcattgcataaactacagcttggtgaggagactcagtcagatgaaccaaacttagagagtctgcagtctgaaccaagagaattacctcaaagaagtcaggaggcaaatatgacagagagcaggaaggctgaagatgaaatgcagaagtcagcttgggatcaaccttcacttcctgaaggaaacaaaaataaaaccaacttggatgacctagtaaagggggaaaatagatcttcagttaaacacagattggcagccatgtctaaagccagcagaaaattcccagctaaagatgtaagccccagaagacatgtagctactatcttcccccaaagtggaagcagatctggctttgaccatttatctcttggcacagtggagtgcaacccactgttccctgagcctactccaaaatctgcagagtccattggcgaaagcaggttgagtgagaacggaaagcatgtgaagaaatccgagaaccttctccccattactgtactacccaacagagaaccttctacacacgtcagcaaccagaagtctaacagcatttcacaacgacatcagaatgagtttaaaaacgtctcagaatcaccatcaaagcatgagaattctaaagacgtcacagcagctcagaatttagtaagagaatcaggagccccatcacccatcacattcaccagcctcagggaagcagaattctctgacaatcagaggaggctgagccctccttttccactggagcctgcacagaaatctagagtaagcagtccactggccagttttctgcagcaacaaaggagtgcttcatctctggagtgggaacctgagccacacctctatcgttcaaagagtttaaaaagcattaatgttcatggcgatctactacgaaaaagccatcctccaaaagtcagggagcgccatttttctgaaagcacttctattgacaatgccctgagtcgactgacccttgggaatgaattctctgtcaacaatgggtacagtcgaagattcagatctttttctgaactcccctcctgtgatggaaatgaaagttgggcttatcgcagcgggacaaaaacaggtcccaggtctgcaatatctatatacagacctatcgactatgggatctttgggaaagaacaacagttagctttcttagaaaatgtaaagaggtcacttacacaaggaagattatggaaaccaagttttcttaagaaccctggcttcctaaaagatgatttgaggaaccctcccaacccctcagagtcattaagctcaaattctcccagtagtcaggtgccagaagatggcttatctccaagtgaaccgcttaatatctatgaggatgacccagtggactcagattgtgacacagacacaaccacagatgatgaatactacctggatgaaaatgacaaagagtcagaactgtgaggctttttcaataaaatgctttacttttttcaccaaaagcttataatggaactaaggtgtacatgtgcatgtgcatggaaggataaaagatctagtctgggcagtgtctgctctgaaatgtcccacatctccttttttttcctccacaccctatatagacacttcctgaatgctagaacaatgaattcttgttttgagagagtctctgctattttctatctctgtaaatgttcttagcctgcctttccaccactcccacttaatccctgattcactgtctgatttgggctttctgctttacttccctcctaacatttttcatctttaattgtgatttacaaccctaatatcccaggcacatacaaaacttatgaattacccagcacaactgtgaaactctgtattgcttcttccggtccacaccctatactcatgacattaaataaaaggtagggatgataacagtggggtaaatattatcatcctgtttgactcatgaacatttaggaagtttaaggtggtgatcttctctttcaaacaaagataaaggaatttattttttaacctgagaaactgattgcaaaaagg

SEQ ID NO: 131578 - DNA, 5495 bp, Homo sapiens
  Payload ID: 5677
  Gene Symbol: EXPH5
  Gene Name: exophilin 5
  ENST ID: ENST00000526312
  CDS Start-End: 296-5495
gataaagctactggtgcagccactgaaccacagggctttctcttccttcactctgcctctttctgattgggaacacacaacagttgttttaaagctttccctggagggtgagtgataagaaacctattacctggaagtatcgcctttctaaagtaggagaacaaaaggccacactttccccagatgcaaacttcagaagacaaagagggatatcagatggcttcagggagtgactggtgaatggtttgaagaaattcaaagaaaaaagttttgcaatgaaacagatgttagccaaatgttaaaacaaccacttacatacaggctaagtaaggagatggcaaaaaatgatccgatagaattacctacatcaagatctaaaaatgtaactaatcaaaaaaagccgacacctttttcttcccggatgagcttcagatcgtcatttgcttccctgttctcattcaggaaatctggaaaggagacttcaaagcttccatcactgggacagaaaggatgtgatggccatgcaggacctcctatgcctgtgaggggagctgctgtgcaggcaaaaatatacaattcacctctggaaaatcatctagttgacagtacatttgtcccaaagccagcagtcatgagggaggagagtggcatgcctccaccgtgggatgcttcactgctggagaatgagtttttccaagttttagatgacttggatagcaaattggctcaggaacagtctgcaagctcagtgaataccagaacacccctcaactatggatcaagaacacagttcggtcacttttattccagtggtaacagacatggtaatatcacagaaaggcacaaaaaacactataatgaaacttccaatatgtctatctatgacatcctaagaccaggaactcctagggaaggttttaaaaccttttctcctaggacaagcacaatttatgatatgtataggacaagggagcccagagtctttaaagaagattatgtgcaaaagaatacttttggcagtacttcgctgtgttttgacagcaggcaacggtcggccttaccagccacagggcatttcacagcaagaagcttacattttccagccacaactcagagcaagagtgggtttataccaccaaggcaccagcagagtccaaagagaactcctttatcatccatcatatggaacagatcagattcctctagagacagggagaaccaggaagagttcctgagggcaccatcaccaatggaaattgatcccgctgacaagtatgtgtatcccaggggttttcaggagaataagagatatgaatcgtaccattcacagaatgtttaccaacgtgttagtttaaatgctcccatggagaatgcaatgagtcccgacacttttgagaactcagagaacatgccattctaccatcaaagcaacacatttaccagatctttcttcagcaatacctttggacgaagcggagaacagaggagatttggacaaggtcctttttggggccaagagaaaggacattctttctggtctgactttcatcgaagcaggaaatcattcagttcttctgacagagactttgaaatgatttccatggaagcaaatagtgtatcagccattcatggccataatgtttcttctgaacactgggaatcattttcttctggttatggaacagatgtttccagaggccaagaagagccacatccttggcagtttgattttcagagatccacactggatagcatggtggtatcacatggtaatgagacccagttgactcctcattttggcacaccaaatgtttgctccatgactggttcaagctatcacgtcaaatctagtgagttggtaagtcaacaggacagttctcctgtagaagtacatataaacaaagaagcttcctcatttggaattgctcagactctagcatcctcattcaaaacttccttttcccagatttctgatgacagaaggaatcctcagagtcccaacttgcagaatcccacagtcactttgcagaaaatttttccaaataagcctgcctctcatccaatgagaagccatacagaagtcactgtgaccagcagcaattcagttgactctctgcctcttgccaaaagccagcccaatatcttggtcacagaagtaaataatgagaaagacttaaatgaatctatttcagaagaagacaaacagctaagcaagatggaccagacaaacaaggcaggtgaaataccccaacctgtttcacagacagggatctcaaactctttacctgattttcaaaatcccttatcccaggactcagccaagagcaacgggtttggttttaatgcatctaccataataagttcaaaaaagtcacccagagtcttttccaggaaagatacctccaaaatgtatataccgcacacagataaatccaatgacattaaacaagataagaggtttactgaaaacagaaaacttggctcaacagcttcccttcctttcattcaggaacacagaacaccaccatctttccccaggacagaccaaggttgtcaccaggaattaactgtaaataatgaagatatttcaagaattattacaaataaccactggagctctgcactgactgatactcaaaatgcacaatactcaaaatgcaagttaactcctggccacaagacctcgtgtgattctttagatctgtcatcagctgcactaccagattcctcaccatcaaagaattcttcccttgatgctcctgtggttccatctactacagtgttctccaggagaagtccttcagacaaagatccatcgctaggagaaagagaagaaaaagacaatgctgggaagaaccaaaagaatcagtttattgtaagccactcagaaaaccaagagagaaatgatagtcctgtgcctacacatgatgaagtggttgatgtcaaatgccattcacactctccttttaggaatgaaagaggaaaaggaaaaataaggcatcatatatcctgtattgaaaagttaagcaaaacagaaagtatatcagtacccaccagtgatcacaggagcctcattgaagcaaatcaaagcaattccaaagtttctgaacttgacacaatttattgtaccttgccaagaaaatcaagcagttttctcatacatggcaggcagtcaggaagtaaaataatggctgcttcattgaggaatgggccacctcccttccaaatcaaaaataatgtggaagatgcaatggggaactatatgttaaacaaatttagtcccagttctcctgagtcagcgaatgaatgttccaaagtcctttcagactcagccctggaagcacctgaagccacagagagaatgacaaatgtaaaaagcagtggatctacttccgttagaaaaggaccacttccattcctcatcaacagggctatgtcatgtccctcaggggagccacatgcctcaactggaagagaaggaagaaaaaagccattgacctcaggcatggatgcttctgagctaacaccaagggcttgggagagaatcattagccctgtggaaagtgactcatctgttagagattgttctttaaccaaaagacaacaccaaaaggaaaacttccaagaatacactgagaaagagggtaaaatggctgcctccaggagaagtgtatttgctctttcaaatgaagaccctttacctttttgctcagacttgtcaggaaaagaacgtgggaaaacattacataaagttaagacgactagtacgttttctgtttctggtgatgaagataatgtaaaatgtctggaggtggtctcaatatattacactctaccgaggaaacccagcaaaaaattctgtaacctccttcaacagtatacacaaaatactaatttacttatagaatcacctcaagtggagactgaaacatttcctaacgctttagaaaaagacaaacagaattattctacacgagagcagtcaggaacaccttcatgtgaaaatctaaagatgtccgtcaactctgatcagacgctcaccactgaaaatatgactgccttccgattatcaaatagggggcccctagctcctacattacaggaaatggcttctgttgaggcagctgtttctcttcctgaagaggaatctaaagctagagagattttttcagataatttagctaaaacacctctaggtgattcagaaaacaagaaggaaagaggcaaaaagttgcaaagtgaaaccctgcatacttcattgatgcttcagagaaaaaatgtatccgaagaaaaatctgaaaattgtcaacaatccattaattcaagtaacagtggtccctctagtcttccagctctttcagaagttaatattggaaattcccaaactagaagaagttcttgggagtgtacagggagtggtagagccattccatttactggaagtggcaagtgtccccagaaagatcacacatccacagctgtaggtgatggctccagtggatcacagcctagggaaggcagaggggacattggaaccaactgccaaaaaatgactaataaaacactttctcactcagagagtcaagtctttgcccttactccagcattgcataaactacagcttggtgaggagactcagtcagatgaaccaaacttagagagtctgcagtctgaaccaagagaattacctcaaagaagtcaggaggcaaatatgacagagagcaggaaggctgaagatgaaatgcagaagtcagcttgggatcaaccttcacttcctgaaggaaacaaaaataaaaccaacttggatgacctagtaaagggggaaaatagatcttcagttaaacacagattggcagccatgtctaaagccagcagaaaattcccagctaaagatgtaagccccagaagacatgtagctactatcttcccccaaagtggaagcagatctggctttgaccatttatctcttggcacagtggagtgcaacccactgttccctgagcctactccaaaatctgcagagtccattggcgaaagcaggttgagtgagaacggaaagcatgtgaagaaatccgagaaccttctccccattactgtactacccaacagagaaccttctacacacgtcagcaaccagaagtctaacagcatttcacaacgacatcagaatgagtttaaaaacgtctcagaatcaccatcaaagcatgagaattctaaagacgtcacagcagctcagaatttagtaagagaatcaggagccccatcacccatcacattcaccagcctcagggaagcagaattctctgacaatcagaggaggctgagccctccttttccactggagcctgcacagaaatctagagtaagcagtccactggccagttttctgcagcaacaaaggagtgcttcatctctggagtgggaacctgagccacacctctatcgttcaaagagtttaaaaagcattaatgttcatggcgatctactacgaaaaa

SEQ ID NO: 131579 - DNA, 555 bp, Homo sapiens
  Payload ID: 5677
  Gene Symbol: EXPH5
  Gene Name: exophilin 5
  ENST ID: ENST00000531386
  CDS Start-End: 319-555
agtaacaagctggctttcaccggcaccctcccctttggtacggggtcagcagaagggtgttttgtcttcagcgagtcggaaaccccctgtcttcagtgtattctgcccaccaggatagggcactgtggattttggttttgaagcttgtccagagtcactcaagagagacaaagcggccattctactgtgtgctacccaacacccaccagcaaacttcagaagacaaagagggatatcagatggcttcagggagtgactggtgaatggtttgaagaaattcaaagaaaaaagttttgcaatgaaacagatgttagccaaatgttaaaacaaccacttacatacaggctaagtaaggagatggcaaaaaatgatccgatagaattacctacatcaagatctaaaaatgtaactaatcaaaaaaagccgacacctttttcttcccggatgagcttcagatcgtcatttgcttccctgttctcattcaggaaatctggaaaggagacttcaaagcttccatcactgggacagaaaggatgtgatggccatgcaggacct

SEQ ID NO: 131580 - DNA, 3893 bp, Homo sapiens
  Payload ID: 5677
  Gene Symbol: EXPH5
  Gene Name: exophilin 5
  ENST ID: ENST00000533052
  CDS Start-End: 318-3893
aaataaaaggtgttggaggtcactgtcgctgagaaacaagaggcagcaagcagctggtgggttgtgtgatgaggctgctggatttaacagaccactgtcctcccctcttgggtgaatggagggtttttcacttccagctttcacccgaggctgtttttgtctgatgaaagaaagagcagaccacaatgtagatttatgtgactgtagctaccagagtcactagcaaggaaatactcttcaaatagcaggcaaaaatatacaattcacctctggaaaatcatctagttgacagtacatttgtcccaaagccagcagtcatgagggaggagagtggcatgcctccaccgtgggatgcttcactgctggagaatgagtttttccaagttttagatgacttggatagcaaattggctcaggaacagtctgcaagctcagtgaataccagaacacccctcaactatggatcaagaacacagttcggtcacttttattccagtggtaacagacatggtaatatcacagaaaggcacaaaaaacactataatgaaacttccaatatgtctatctatgacatcctaagaccaggaactcctagggaaggttttaaaaccttttctcctaggacaagcacaatttatgatatgtataggacaagggagcccagagtctttaaagaagattatgtgcaaaagaatacttttggcagtacttcgctgtgttttgacagcaggcaacggtcggccttaccagccacagggcatttcacagcaagaagcttacattttccagccacaactcagagcaagagtgggtttataccaccaaggcaccagcagagtccaaagagaactcctttatcatccatcatatggaacagatcagattcctctagagacagggagaaccaggaagagttcctgagggcaccatcaccaatggaaattgatcccgctgacaagtatgtgtatcccaggggttttcaggagaataagagatatgaatcgtaccattcacagaatgtttaccaacgtgttagtttaaatgctcccatggagaatgcaatgagtcccgacacttttgagaactcagagaacatgccattctaccatcaaagcaacacatttaccagatctttcttcagcaatacctttggacgaagcggagaacagaggagatttggacaaggtcctttttggggccaagagaaaggacattctttctggtctgactttcatcgaagcaggaaatcattcagttcttctgacagagactttgaaatgatttccatggaagcaaatagtgtatcagccattcatggccataatgtttcttctgaacactgggaatcattttcttctggttatggaacagatgtttccagaggccaagaagagccacatccttggcagtttgattttcagagatccacactggatagcatggtggtatcacatggtaatgagacccagttgactcctcattttggcacaccaaatgtttgctccatgactggttcaagctatcacgtcaaatctagtgagttggtaagtcaacaggacagttctcctgtagaagtacatataaacaaagaagcttcctcatttggaattgctcagactctagcatcctcattcaaaacttccttttcccagatttctgatgacagaaggaatcctcagagtcccaacttgcagaatcccacagtcactttgcagaaaatttttccaaataagcctgcctctcatccaatgagaagccatacagaagtcactgtgaccagcagcaattcagttgactctctgcctcttgccaaaagccagcccaatatcttggtcacagaagtaaataatgagaaagacttaaatgaatctatttcagaagaagacaaacagctaagcaagatggaccagacaaacaaggcaggtgaaataccccaacctgtttcacagacagggatctcaaactctttacctgattttcaaaatcccttatcccaggactcagccaagagcaacgggtttggttttaatgcatctaccataataagttcaaaaaagtcacccagagtcttttccaggaaagatacctccaaaatgtatataccgcacacagataaatccaatgacattaaacaagataagaggtttactgaaaacagaaaacttggctcaacagcttcccttcctttcattcaggaacacagaacaccaccatctttccccaggacagaccaaggttgtcaccaggaattaactgtaaataatgaagatatttcaagaattattacaaataaccactggagctctgcactgactgatactcaaaatgcacaatactcaaaatgcaagttaactcctggccacaagacctcgtgtgattctttagatctgtcatcagctgcactaccagattcctcaccatcaaagaattcttcccttgatgctcctgtggttccatctactacagtgttctccaggagaagtccttcagacaaagatccatcgctaggagaaagagaagaaaaagacaatgctgggaagaaccaaaagaatcagtttattgtaagccactcagaaaaccaagagagaaatgatagtcctgtgcctacacatgatgaagtggttgatgtcaaatgccattcacactctccttttaggaatgaaagaggaaaaggaaaaataaggcatcatatatcctgtattgaaaagttaagcaaaacagaaagtatatcagtacccaccagtgatcacaggagcctcattgaagcaaatcaaagcaattccaaagtttctgaacttgacacaatttattgtaccttgccaagaaaatcaagcagttttctcatacatggcaggcagtcaggaagtaaaataatggctgcttcattgaggaatgggccacctcccttccaaatcaaaaataatgtggaagatgcaatggggaactatatgttaaacaaatttagtcccagttctcctgagtcagcgaatgaatgttccaaagtcctttcagactcagccctggaagcacctgaagccacagagagaatgacaaatgtaaaaagcagtggatctacttccgttagaaaaggaccacttccattcctcatcaacagggctatgtcatgtccctcaggggagccacatgcctcaactggaagagaaggaagaaaaaagccattgacctcaggcatggatgcttctgagctaacaccaagggcttgggagagaatcattagccctgtggaaagtgactcatctgttagagattgttctttaaccaaaagacaacaccaaaaggaaaacttccaagaatacactgagaaagagggtaaaatggctgcctccaggagaagtgtatttgctctttcaaatgaagaccctttacctttttgctcagacttgtcaggaaaagaacgtgggaaaacattacataaagttaagacgactagtacgttttctgtttctggtgatgaagataatgtaaaatgtctggaggtggtctcaatatattacactctaccgaggaaacccagcaaaaaattctgtaacctccttcaacagtatacacaaaatactaatttacttatagaatcacctcaagtggagactgaaacatttcctaacgctttagaaaaagacaaacagaattattctacacgagagcagtcaggaacaccttcatgtgaaaatctaaagatgtccgtcaactctgatcagacgctcaccactgaaaatatgactgccttccgattatcaaatagggggcccctagctcctacattacaggaaatggcttctgttgaggcagctgtttctcttcctgaagaggaatctaaagctagagagattttttcagataatttagctaaaacacctctaggtgattcagaa

SEQ ID NO: 131581 - DNA, 1882 bp, Homo sapiens
  Payload ID: 5677
  Gene Symbol: EXPH5
  Gene Name: exophilin 5
  ENST ID: ENST00000524840
  CDS Start-End: 251-1882
cactgtcgctgagaaacaagaggcagcaagcagctggtgggttgtgtgatgaggctgctggatttaacagaccactgtcctcccctcttgggtgaatggagggtttttcacttccagctttcacccgaggctgtttttgtctgatgaaagaaagagcagaccacaatgtagatttatgtgactgtagctaccagagtcactagcaaggaaatactcttcaaatagatgtgatggccatgcaggacctcctatgcctgtgaggggagctgctgtgcaggcaaaaatatacaattcacctctggaaaatcatctagttgacagtacatttgtcccaaagccagcagtcatgagggaggagagtggcatgcctccaccgtgggatgcttcactgctggagaatgagtttttccaagttttagatgacttggatagcaaattggctcaggaacagtctgcaagctcagtgaataccagaacacccctcaactatggatcaagaacacagttcggtcacttttattccagtggtaacagacatggtaatatcacagaaaggcacaaaaaacactataatgaaacttccaatatgtctatctatgacatcctaagaccaggaactcctagggaaggttttaaaaccttttctcctaggacaagcacaatttatgatatgtataggacaagggagcccagagtctttaaagaagattatgtgcaaaagaatacttttggcagtacttcgctgtgttttgacagcaggcaacggtcggccttaccagccacagggcatttcacagcaagaagcttacattttccagccacaactcagagcaagagtgggtttataccaccaaggcaccagcagagtccaaagagaactcctttatcatccatcatatggaacagatcagattcctctagagacagggagaaccaggaagagttcctgagggcaccatcaccaatggaaattgatcccgctgacaagtatgtgtatcccaggggttttcaggagaataagagatatgaatcgtaccattcacagaatgtttaccaacgtgttagtttaaatgctcccatggagaatgcaatgagtcccgacacttttgagaactcagagaacatgccattctaccatcaaagcaacacatttaccagatctttcttcagcaatacctttggacgaagcggagaacagaggagatttggacaaggtcctttttggggccaagagaaaggacattctttctggtctgactttcatcgaagcaggaaatcattcagttcttctgacagagactttgaaatgatttccatggaagcaaatagtgtatcagccattcatggccataatgtttcttctgaacactgggaatcattttcttctggttatggaacagatgtttccagaggccaagaagagccacatccttggcagtttgattttcagagatccacactggatagcatggtggtatcacatggtaatgagacccagttgactcctcattttggcacaccaaatgtttgctccatgactggttcaagctatcacgtcaaatctagtgagttggtaagtcaacaggacagttctcctgtagaagtacatataaacaaagaagcttcctcatttggaattgctcagactctagcatcctcattcaaaacttccttttcccagatttctgatgacagaaggaatcctcagagtcccaacttgcagaatcccacagtcactttgcagaaaatttttccaaataagcctgcctctcatccaatgagaagccatacagaagtcactgtgaccagcagcaattcagttgactctctgcctcttgccaaaagccagcccaatatcttggtcacagaagtaaataatgag

SEQ ID NO: 131582 - DNA, 4615 bp, Homo sapiens
  Payload ID: 5678
  Gene Symbol: ERI1
  Gene Name: exoribonuclease 1
  Uniprot ID: Q8IV48
  ENST ID: ENST00000250263
  CDS Start-End: 261-1310
cctccctcttgttcgtcctccctccccctgtggactgcggcgctggcgttccgcgcacgccggctcactgcgcctgcccggcgtgtggacgccacacgctcccggaagtgggaggtggccgctggagtttgtgtggccgccgccgcgggaacgcgagcccggtaatttttcaacggagaaaggcgaggctttcgggctctgcagagtgagagttagcaagtgtccggctccagcaactctcctctggcgtgacagccggcatggaggatccacagagtaaagagcctgccggcgaggccgtggctctcgcgctgctggagtcgccgcggccggagggcggggaggagccgccgcgtcccagtcccgaggaaactcaacagtgtaaatttgatggccaggagacaaaaggatccaagttcattacctccagtgcgagtgacttcagtgacccggtttacaaagagattgccattacgaatggctgtattaatagaatgagtaaggaagaactcagagctaagctttcagaattcaagcttgaaactagaggagtaaaggatgttctaaagaagagactgaaaaactattataagaagcagaagctgatgctgaaagagagcaattttgctgacagttattatgactacatttgtattattgactttgaagccacttgtgaagaaggaaacccacctgagtttgtacatgaaataattgaatttccggttgttttactgaatacgcatactttagaaatagaagacacgtttcagcagtatgtaagaccagagattaacacacagctgtctgatttctgcatcagtctaactggaattactcaggatcaggtagacagagctgataccttccctcaggtactaaaaaaagtaattgactggatgaaattgaaggaattaggaacaaagtataaatactcacttttaacagatggttcttgggatatgagtaagttcttgaacattcagtgtcaactcagcaggctcaaataccctccttttgcgaaaaagtggatcaatattcggaagtcatatggaaatttttacaaggttcctagaagccaaaccaaactgacaataatgcttgaaaaattaggaatggattatgatgggcggcctcactgtggtcttgatgactctaagaatatcgcccgaatagcagttcgaatgcttcaggatgggtgtgaactccgaatcaacgagaaaatgcatgcaggacagctaatgagtgtgtcctcttccttaccaatagagggcactccaccaccacaaatgccacattttagaaagtaacaacagttttgtgtgtggatcattccaattgaagttgctatgaagaggtagcagatgaatctcattgaattagtcctgtagtgcaaactttaagcaccttaaaacatttaaaatcttattacaggtgatagagatagatacatgtatgtgaacagattttgtaggaaggcatactgaattctttgtcaccagcacttttgatatgaacagtattcgttacatagtaacagttcctgcttacaactgaattttataatttaaggtgttcaagatatattctttttggttttaaaatgcaaaatcttattggctgttctgttgaatgtcatatcttactggtgtttaaatatgtaatgtgtttctttattaacatcactagatgaaaccatatcttaaaatgcagaaatgattggaaggtagatcttatctagcctttggatttcaagaatatcatagtccttttgattttcaaagtttatatgtgaagttcaccatgtatgtggtgaatttcgtaaggtacttggtatacatatctgcctatgtttcttttcaactcataattggaagaattatgatggattatagggtttggttaaaaatccagttactgaaggaattaatgaaaacgtagaagaaagtactaaaaggaatatcataagggctgtagctcaaacttcataatacataaatcactggggtctttttggatttggttgtttgattcgccttccttttttgacatatgtatgccttaattcttaaatctgagggaccatgctttgaaatagactgaaaattaagggtcaccacctaattttactttgtattcagtatcgtaagtgaggttaataaagtcaatactttctaccatatattacgtttttgttattaaaaaacttcattggccactagtgaagttagtcaataaaagacttgtttttctgattttacatagtaaatggctgctaagtattgagtaattcttaactaattctaaaaactaaaatgtgcatttcgacttgataaggtaaaactcttatctagaggctaaacccatgtattttcagaattgaatttttctccttgtagctttcagggaacaatttcattgacattgcttgcttcctgccttttaccttttaataaaaattgtgatgctactttattctaaagatttatattttataaccagatgaatttcctcaaaggtttccaaacctatatcatatagggtgaaaagcaggaaagtagacatttttcttggcgtgggaattctctacatagggcagtagatttcttaagccaatgaatttctgcttttcagcagtagtcatataatcagtatcataaagaataatgtgtaaataacagaaggcatatgagagtgtggtgttcctagatgaactgttacagattatagtaaaataaggaaatctaagtgctttaagtttatacagttaactcttaggataagagggatgtatgctgagatgtttgtgcatcccagatagcactgtacaataacctgtaaagtattactgaatactgaatagctgaaactgcaattggaaaatctgatgatgacgaggaaatattacgtttccagtttttttagctctatctgctaatttctttgcctgttttcactttcgccaagtaccaacaagctcatgttgtatttctttttaagaacttcaacattataagctctcagtaccctattttgttgttgttgttgtttgagacagagtttttgctcgtctgccaggatggagtgcagtggtgcgatcttggctcactgcaacctccgcctcctgggctcaggtgatcctcttgcctcagcctcctgagtagctcagattacaggcgcgtgccaccacacccgcctaatttttgtatttttggtagaggcggggtttcaccatgttggtcaggctggtcttgaactcctgacctcaagtgatttgcccaccttgacctcctacagacgtgagccactgcgctcagccatagattttactgtcttaacccattttaattcctctgttgagtctctgtcctcccctccaatttgatttgggattttgctgatgagatgatactaaacattgagagtactgctttttactctgacttttattgtgttgtctttgaaagacaaatagtacaactttttacaaggaaacacgtaagagatggatgtccatgaaaacaatattagtatattctattattgtttcttattaatagttacttagtatttacaaacaatttattattagctgtgttaacttttattctatgcttcatatgctctgacattgacatagtggatttctgctgatttttttcaaatccgcaatctttataaccaactgaagtatataatagagcattacattttatctttatttgtgttctgttggatcaagtatttaacatttgctctgaaaaaaatgtttttgtgatgtgtctttgttgccttgagatagatccatttatcctgcctcctagggagaagtttctgcctggattgaaacaaaaaaacacaggcgtcacaagcatgttacctattaagagagagagggtatctctgaagactaattaaaatggtaatttttaaaaagatgtgaccagttgacttttagtatatcatcccaagtattatccccaaaatgataatgcaaaacagaataatttggagaccaggagaaaaactggtatgattactggggaggggaagaagcacaggtggtcaagataataatgcatgtttggcctcagctgtagttgccaaagaaactacctgcctcacagatgagcacgcacgggtgcattgtcaaagtctgagaaggatgtattgtactttgaaggaagactttccatttctaagctaccatggagaagtatatgctcctcgagaccagagactgtgacttctgcatctttgattccagcgacatatgataaaatgttttgcacatagttgaatccagcgttgatacatgaaggacagcattacatcttttttctattatacttagaaatttcctctttgttctgcaccaccaacctgtatatcaagcctccttgccccacaaagcttccaaagcccgtaaatttgttaatctagagcaggggtcagcaaactaccacccatgggccaaatctggctgctgcctatttttgtatggcctacaaactatggtttttatattcccttttgttaatggctcaaaataatattttgtataatacgaaaattacgaaattttagtttctctaaataaagttttggaaagaac

SEQ ID NO: 131583 - DNA, 557 bp, Homo sapiens
  Payload ID: 5678
  Gene Symbol: ERI1
  Gene Name: exoribonuclease 1
  ENST ID: ENST00000521844
  CDS Start-End: 174-308
gacgccacacgctcccggaagtgggaggtggccgctggagtttgtgtggccgccgccgcgggaacgcgagcccggtaatttttcaacggagaaaggcgaggctttcgggctctgcagagtgagagttagcaagtgtccggctccagcaactctcctctggcgtgacagccggcatggaggatccacagagtaaagagcctgccggcgaggccgtggctctcgcgctgctggagtcgccgcggccggagggcggggaggagccgccgcgtcccagtcccgagtgcccctcgctgccttgtgttctttgacattggaaagaaggtctcgttaaggatctctgtatgttccttttgccctgtgtgcacttcctttggatccttgcaattatctttctccttctaaggttgttatttcaaagagtacttgcacatcccttctcttgtaaagaaccactcttccacctgcctccctcttcagcctgagatacgttgtcaatctcatcctgaaactcaacagtgtaaatttgatggccaggagacaaaaggatccaagttcat

SEQ ID NO: 131584 - DNA, 5036 bp, Homo sapiens
  Payload ID: 5678
  Gene Symbol: ERI1
  Gene Name: exoribonuclease 1
  Uniprot ID: Q8IV48
  ENST ID: ENST00000523898
  CDS Start-End: 680-1729
ttgttctttcctggccttgtggagtttcacgttttttattcagttaaagattcaaggtactcctaagcagatttctgaagctctttttccatgtaattccctcctctccagaattctgccctacaaattccaaccgacttggcctaccccaatttcgtcaactccaatctctgtcttttcaacccaggagatcctaggtttccatatgatttcctttcatcgcaccacagactggaaatcgcctctgggcaaaagggcaggatgatatacggctccttttatttcttttctctcaggaaacactgacgggaacacacgtgccggtgctaccctccagtgactggactagatccttgcgcaacttcaacccgcgctagctccgcctacggccggccacgccccgtcttctcaccggcgcgcctccctcttgttcgtcctccctccccctgtggactgcggcgctggcgttccgcgcacgccggctcactgcgcctgcccggcgtgtggacgccacacgctcccggaagtgggaggtggccgctggagtttgtgtggccgccgccgcgggaacgcgagcccggtaatttttcaacggagaaaggcgaggctttcgggctctgcagagtgagagttagcaagtgtccggctccagcaactctcctctggcgtgacagccggcatggaggatccacagagtaaagagcctgccggcgaggccgtggctctcgcgctgctggagtcgccgcggccggagggcggggaggagccgccgcgtcccagtcccgaggaaactcaacagtgtaaatttgatggccaggagacaaaaggatccaagttcattacctccagtgcgagtgacttcagtgacccggtttacaaagagattgccattacgaatggctgtattaatagaatgagtaaggaagaactcagagctaagctttcagaattcaagcttgaaactagaggagtaaaggatgttctaaagaagagactgaaaaactattataagaagcagaagctgatgctgaaagagagcaattttgctgacagttattatgactacatttgtattattgactttgaagccacttgtgaagaaggaaacccacctgagtttgtacatgaaataattgaatttccggttgttttactgaatacgcatactttagaaatagaagacacgtttcagcagtatgtaagaccagagattaacacacagctgtctgatttctgcatcagtctaactggaattactcaggatcaggtagacagagctgataccttccctcaggtactaaaaaaagtaattgactggatgaaattgaaggaattaggaacaaagtataaatactcacttttaacagatggttcttgggatatgagtaagttcttgaacattcagtgtcaactcagcaggctcaaataccctccttttgcgaaaaagtggatcaatattcggaagtcatatggaaatttttacaaggttcctagaagccaaaccaaactgacaataatgcttgaaaaattaggaatggattatgatgggcggcctcactgtggtcttgatgactctaagaatatcgcccgaatagcagttcgaatgcttcaggatgggtgtgaactccgaatcaacgagaaaatgcatgcaggacagctaatgagtgtgtcctcttccttaccaatagagggcactccaccaccacaaatgccacattttagaaagtaacaacagttttgtgtgtggatcattccaattgaagttgctatgaagaggtagcagatgaatctcattgaattagtcctgtagtgcaaactttaagcaccttaaaacatttaaaatcttattacaggtgatagagatagatacatgtatgtgaacagattttgtaggaaggcatactgaattctttgtcaccagcacttttgatatgaacagtattcgttacatagtaacagttcctgcttacaactgaattttataatttaaggtgttcaagatatattctttttggttttaaaatgcaaaatcttattggctgttctgttgaatgtcatatcttactggtgtttaaatatgtaatgtgtttctttattaacatcactagatgaaaccatatcttaaaatgcagaaatgattggaaggtagatcttatctagcctttggatttcaagaatatcatagtccttttgattttcaaagtttatatgtgaagttcaccatgtatgtggtgaatttcgtaaggtacttggtatacatatctgcctatgtttcttttcaactcataattggaagaattatgatggattatagggtttggttaaaaatccagttactgaaggaattaatgaaaacgtagaagaaagtactaaaaggaatatcataagggctgtagctcaaacttcataatacataaatcactggggtctttttggatttggttgtttgattcgccttccttttttgacatatgtatgccttaattcttaaatctgagggaccatgctttgaaatagactgaaaattaagggtcaccacctaattttactttgtattcagtatcgtaagtgaggttaataaagtcaatactttctaccatatattacgtttttgttattaaaaaacttcattggccactagtgaagttagtcaataaaagacttgtttttctgattttacatagtaaatggctgctaagtattgagtaattcttaactaattctaaaaactaaaatgtgcatttcgacttgataaggtaaaactcttatctagaggctaaacccatgtattttcagaattgaatttttctccttgtagctttcagggaacaatttcattgacattgcttgcttcctgccttttaccttttaataaaaattgtgatgctactttattctaaagatttatattttataaccagatgaatttcctcaaaggtttccaaacctatatcatatagggtgaaaagcaggaaagtagacatttttcttggcgtgggaattctctacatagggcagtagatttcttaagccaatgaatttctgcttttcagcagtagtcatataatcagtatcataaagaataatgtgtaaataacagaaggcatatgagagtgtggtgttcctagatgaactgttacagattatagtaaaataaggaaatctaagtgctttaagtttatacagttaactcttaggataagagggatgtatgctgagatgtttgtgcatcccagatagcactgtacaataacctgtaaagtattactgaatactgaatagctgaaactgcaattggaaaatctgatgatgacgaggaaatattacgtttccagtttttttagctctatctgctaatttctttgcctgttttcactttcgccaagtaccaacaagctcatgttgtatttctttttaagaacttcaacattataagctctcagtaccctattttgttgttgttgttgtttgagacagagtttttgctcgtctgccaggatggagtgcagtggtgcgatcttggctcactgcaacctccgcctcctgggctcaggtgatcctcttgcctcagcctcctgagtagctcagattacaggcgcgtgccaccacacccgcctaatttttgtatttttggtagaggcggggtttcaccatgttggtcaggctggtcttgaactcctgacctcaagtgatttgcccaccttgacctcctacagacgtgagccactgcgctcagccatagattttactgtcttaacccattttaattcctctgttgagtctctgtcctcccctccaatttgatttgggattttgctgatgagatgatactaaacattgagagtactgctttttactctgacttttattgtgttgtctttgaaagacaaatagtacaactttttacaaggaaacacgtaagagatggatgtccatgaaaacaatattagtatattctattattgtttcttattaatagttacttagtatttacaaacaatttattattagctgtgttaacttttattctatgcttcatatgctctgacattgacatagtggatttctgctgatttttttcaaatccgcaatctttataaccaactgaagtatataatagagcattacattttatctttatttgtgttctgttggatcaagtatttaacatttgctctgaaaaaaatgtttttgtgatgtgtctttgttgccttgagatagatccatttatcctgcctcctagggagaagtttctgcctggattgaaacaaaaaaacacaggcgtcacaagcatgttacctattaagagagagagggtatctctgaagactaattaaaatggtaatttttaaaaagatgtgaccagttgacttttagtatatcatcccaagtattatccccaaaatgataatgcaaaacagaataatttggagaccaggagaaaaactggtatgattactggggaggggaagaagcacaggtggtcaagataataatgcatgtttggcctcagctgtagttgccaaagaaactacctgcctcacagatgagcacgcacgggtgcattgtcaaagtctgagaaggatgtattgtactttgaaggaagactttccatttctaagctaccatggagaagtatatgctcctcgagaccagagactgtgacttctgcatctttgattccagcgacatatgataaaatgttttgcacatagttgaatccagcgttgatacatgaaggacagcattacatcttttttctattatacttagaaatttcctctttgttctgcaccaccaacctgtatatcaagcctccttgccccacaaagcttccaaagcccgtaaatttgttaatctagagcaggggtcagcaaactaccacccatgggccaaatctggctgctgcctatttttgtatggcctacaaactatggtttttatattcccttttgttaatggctcaaaataatattttgtataatacgaaaattacgaaattttagtttctctaaataaagttttggaaagaacta

SEQ ID NO: 131585 - DNA, 2107 bp, Homo sapiens
  Payload ID: 5678
  Gene Symbol: ERI1
  Gene Name: exoribonuclease 1
  Uniprot ID: Q8IV48
  ENST ID: ENST00000519292
  CDS Start-End: 221-1270
cgctggcgttccgcgcacgccggctcactgcgcctgcccggcgtgtggacgccacacgctcccggaagtgggaggtggccgctggagtttgtgtggccgccgccgcgggaacgcgagcccggtaatttttcaacggagaaaggcgaggctttcgggctctgcagagtgagagttagcaagtgtccggctccagcaactctcctctggcgtgacagccggcatggaggatccacagagtaaagagcctgccggcgaggccgtggctctcgcgctgctggagtcgccgcggccggagggcggggaggagccgccgcgtcccagtcccgaggaaactcaacagtgtaaatttgatggccaggagacaaaaggatccaagttcattacctccagtgcgagtgacttcagtgacccggtttacaaagagattgccattacgaatggctgtattaatagaatgagtaaggaagaactcagagctaagctttcagaattcaagcttgaaactagaggagtaaaggatgttctaaagaagagactgaaaaactattataagaagcagaagctgatgctgaaagagagcaattttgctgacagttattatgactacatttgtattattgactttgaagccacttgtgaagaaggaaacccacctgagtttgtacatgaaataattgaatttccggttgttttactgaatacgcatactttagaaatagaagacacgtttcagcagtatgtaagaccagagattaacacacagctgtctgatttctgcatcagtctaactggaattactcaggatcaggtagacagagctgataccttccctcaggtactaaaaaaagtaattgactggatgaaattgaaggaattaggaacaaagtataaatactcacttttaacagatggttcttgggatatgagtaagttcttgaacattcagtgtcaactcagcaggctcaaataccctccttttgcgaaaaagtggatcaatattcggaagtcatatggaaatttttacaaggttcctagaagccaaaccaaactgacaataatgcttgaaaaattaggaatggattatgatgggcggcctcactgtggtcttgatgactctaagaatatcgcccgaatagcagttcgaatgcttcaggatgggtgtgaactccgaatcaacgagaaaatgcatgcaggacagctaatgagtgtgtcctcttccttaccaatagagggcactccaccaccacaaatgccacattttagaaagtaacaacagttttgtgtgtggatcattccaattgaagttgctatgaagagggagaagtttctgcctggattgaaacaaaaaaacacaggcgtcacaagcatgttacctattaagagagagagggtatctctgaagactaattaaaatggtaatttttaaaaagatgtgaccagttgacttttagtatatcatcccaagtattatccccaaaatgataatgcaaaacagaataatttggagaccaggagaaaaactggtatgattactggggaggggaagaagcacaggtggtcaagataataatgcatgtttggcctcagctgtagttgccaaagaaactacctgcctcacagatgagcacgcacgggtgcattgtcaaagtctgagaaggatgtattgtactttgaaggaagactttccatttctaagctaccatggagaagtatatgctcctcgagaccagagactgtgacttctgcatctttgattccagcgacatatgataaaatgttttgcacatagttgaatccagcgttgatacatgaaggacagcattacatcttttttctattatacttagaaatttcctctttgttctgcaccaccaacctgtatatcaagcctccttgccccacaaagcttccaaagcccgtaaatttgttaatctagagcaggggtcagcaaactaccacccatgggccaaatctggctgctgcctatttttgtatggcctacaaactatggtttttatattcccttttgttaatggctcaaaataatattttgtataatacgaaaattacgaaattttagtttctctaaataaagttttggaaagaa

SEQ ID NO: 131586 - DNA, 828 bp, Homo sapiens
  Payload ID: 5678
  Gene Symbol: ERI1
  Gene Name: exoribonuclease 1
  ENST ID: ENST00000520684
  CDS Start-End: 136-435
agtttgtgtggccgccgccgcgggaacgcgagcccggtaatttttcaacggagaaaggcgaggctttcgggctctgcagagtgagagttagcaagtgtccggctccagcaactctcctctggcgtgacagccggcatggaggatccacagagtaaagagcctgccggcgaggccgtggctctcgcgctgctggagtcgccgcggccggagggcggggaggagccgccgcgtcccagtcccgaggaaactcaacagtgtaaatttgatggccaggagacaaaaggatccaagttcattacctccagtgcgagtgacttcagtgacccggtttacaaagagattgccattacgaatggctgtattaatagaatgagtaaggaagaactcagagctaagctttcagaattcaagcttgaaactaggtacaacttgtagcctacagaagattttccgagcaaaatttttgtccttcccaggtgtgaagatcagttgcttactcctggcttgcgtgggagctagcgatctagataggagtaaaggatgttctaaagaagagactgaaaaactattataagaagcagaagctgatgctgaaagagagcaattttgctgacagttattatgactacatttgtattattgactttgaagccacttgtgaagaaggaaacccacctgagtttgtacatgaaataattgaatttccggttgttttactgaatacgcatactttagaaatagaagacacgtttcagcagtatgtaagaccagagattaacacacagctgtctgatttctgcatcagtctaactggaattactcaggatc

SEQ ID NO: 131587 - DNA, 536 bp, Homo sapiens
  Payload ID: 5679
  Gene Symbol: EXOSC1
  Gene Name: exosome component 1
  ENST ID: ENST00000370884
  CDS Start-End: 1-497
gttttcatcctggttttgggacagcggcaatcatggcgccacctgtgagatactgcatccccggcgaacgtctgtgtaacttggaggagggcagcccgggcagcggcacctacacccgccacggctacatcttttcgtcgcttgccggctgtctgatgaagagcagcgagaatggcgcgcttccagtggtgtctgtagtgagagaaacagagtcccagttactgccagatgtgggagctattgtaacctgtaaggttgaaatttataagagtttccgcccaggtgacattgtcttggccaaagtgatctccttaggtgatgcacagtccaactacctgctaaccaccgccgagaacgagctgggagtggtggtagcccacagtgagtcaggtatccagatggttcccatcagctggtgtgagatgcagtgccctaagacccacactaaagaattccggaaagtagcccgagtacaacccgaattcttgcagacctaagaagccactttttaccctatggaagggggtaagctgttc

SEQ ID NO: 131588 - DNA, 718 bp, Homo sapiens
  Payload ID: 5679
  Gene Symbol: EXOSC1
  Gene Name: exosome component 1
  ENST ID: ENST00000370885
  CDS Start-End: 9-521
cggcaatcatggcgccacctgtgagatactgcatccccggcgaacgtctgtgtaacttggaggagggcagcccgggcagcggcacctacacccgccacggctacatcttttcgtcgcttgccggctgtctgatgaagagcagcgagaatggcgcggtctctagcatcaattcacgctttgccaaagtacacatcctgtatgtggggtccatgcctcttaagaactcttttcgaggaactatccgcaaggaagatgtccgagcaactgaaaaagacaaggttgaaatttataagagtttccgcccaggtgacattgtcttggccaaagtgatctccttaggtgatgcacagtccaactacctgctaaccaccgccgagaacgagctgggagtggtggtagcccacagtgagtcaggtatccagatggttcccatcagctggtgtgagatgcagtgccctaagacccacactaaagaattccggaaagtagcccgagtacaacccgaattcttgcagacctaagaagccactttttaccctatggaagggggtaagctgttcctgagtataacaccaagatgctgctgtctttattcaaacacctggcgtcggccaacagccacttccagaaaaatcttccagtttacgctgtagatggaacatgtttctgtgaacctatcagtggatttcattctcttgagtaataaatcttatctttt

SEQ ID NO: 131589 - DNA, 741 bp, Homo sapiens
  Payload ID: 5679
  Gene Symbol: EXOSC1
  Gene Name: exosome component 1
  ENST ID: ENST00000370886
  CDS Start-End: 4-540
atcatggcgccacctgtgagatactgcatccccggcgaacgtctgtgtaacttggaggagggcagcccgggcagcggcacctacacccgccacggctacatcttttcgtcgcttgccggctgtctgatgaagagcagcgagaatggcgcgcttccagtggtgtctgtagtgagagaaacagagtcccagttactgccagatgtgggagctattgtaacctgtaaggtctctagcatcaattcacgctttgccaaagtacacatcctgtatgtggggtccatgcctcttaagaactcttttcgaggaactatccgcaaggaagatgtccgagcaactgaaaaagacaagatctccttaggtgatgcacagtccaactacctgctaaccaccgccgagaacgagctgggagtggtggtagcccacagtgagtcaggtatccagatggttcccatcagctggtgtgagatgcagtgccctaagacccacactaaagaattccggaaagtagcccgagtacaacccgaattcttgcagacctaagaagccactttttaccctatggaagggggtaagctgttcctgagtataacaccaagatgctgctgtctttattcaaacacctggcgtcggccaacagccacttccagaaaaatcttccagtttacgctgtagatggaacatgtttctgtgaacctatcagtggatttcattctcttgagtaataaatcttatcttttcaag

SEQ ID NO: 131590 - DNA, 923 bp, Homo sapiens
  Payload ID: 5679
  Gene Symbol: EXOSC1
  Gene Name: exosome component 1
  Uniprot ID: Q9Y3B2
  ENST ID: ENST00000370902
  CDS Start-End: 33-620
gttttcatcctggttttgggacagcggcaatcatggcgccacctgtgagatactgcatccccggcgaacgtctgtgtaacttggaggagggcagcccgggcagcggcacctacacccgccacggctacatcttttcgtcgcttgccggctgtctgatgaagagcagcgagaatggcgcgcttccagtggtgtctgtagtgagagaaacagagtcccagttactgccagatgtgggagctattgtaacctgtaaggtctctagcatcaattcacgctttgccaaagtacacatcctgtatgtggggtccatgcctcttaagaactcttttcgaggaactatccgcaaggaagatgtccgagcaactgaaaaagacaaggttgaaatttataagagtttccgcccaggtgacattgtcttggccaaagtgatctccttaggtgatgcacagtccaactacctgctaaccaccgccgagaacgagctgggagtggtggtagcccacagtgagtcaggtatccagatggttcccatcagctggtgtgagatgcagtgccctaagacccacactaaagaattccggaaagtagcccgagtacaacccgaattcttgcagacctaagaagccactttttaccctatggaagggggtaagctgttcctgagtataacaccaagatgctgctgtctttattcaaacacctggcgtcggccaacagccacttccagaaaaatcttccagtttacgctgtagatggaacatgtttctgtgaacctatcagtggatttcattctcttgagtaataaatcttatcttttcaaggcaccaacaaacaaaactgtgatattggaaatagcctatccctcctgacagtccttataaatacatattttttgctatgataaaacttttttactaaaagga

SEQ ID NO: 131591 - DNA, 480 bp, Homo sapiens
  Payload ID: 5679
  Gene Symbol: EXOSC1
  Gene Name: exosome component 1
  ENST ID: ENST00000477692
  CDS Start-End: 1-431
caggcgaacgtctgtgtaacttggaggagggcagcccgggcagcggcacctacacccgccacggctacatcttttcgtcgcttgccggctgtctgatgaagagcagcgagaatggcgcgcttccagtggtgtctgtagtgagagaaacagagtcccagttactgccagatgtgggagctattgtaacctgtaaggtctctagcatcaattcacgctttgccaaagtacacatcctgtatgtggggtccatgcctcttaagaactcttttcgaggaactatccgcaaggaagatgtccgagcaactgaaaaagacaaggttgttggtatccagatggttcccatcagctggtgtgagatgcagtgccctaagacccacactaaagaattccggaaagtagcccgagtacaacccgaattcttgcagacctaagaagccactttttaccctatggaagggggtaagctgttcctgagtataa

SEQ ID NO: 131592 - DNA, 564 bp, Homo sapiens
  Payload ID: 5679
  Gene Symbol: EXOSC1
  Gene Name: exosome component 1
  ENST ID: ENST00000485122
  CDS Start-End: 1-420
atggcgccacctgtgagatactgcatccccggcgaacgtctgtgtaacttggaggagggcagcccgggcagcggcacctacacccgccacggctacatcttttcgtcgcttgccggctgtctgatgaagagcagcgagaatggcgcgcttccagtggtgtctgtagtgagagaaacagagtcccagttactgccagatgtgggagctattgtaacctgtaaggtctctagcatcaattcacgctttgccaaagtacacatcctgtatgtggggtccatgcctcttaagaactcttttcgaggaactatccgcaaggaagatgtccgagcaactgaaaaagacaaggtatccagatggttcccatcagctggtgtgagatgcagtgccctaagacccacactaaagaattccggaaagtagcccgagtacaacccgaattcttgcagacctaagaagccactttttaccctatggaagggggtaagctgttcctgagtataacaccaagatgctgctgtctttattcaaacacctggcgtcggccaacagccacttccagaaaaa

SEQ ID NO: 131593 - DNA, 2721 bp, Homo sapiens
  Payload ID: 5680
  Gene Symbol: EXOSC10
  Gene Name: exosome component 10
  Uniprot ID: Q01780
  ENST ID: ENST00000304457
  CDS Start-End: 39-2621
gacaagctctcgcgagacgagccgtgcaggctgaaaaaatggcgccacccagtacccgggagcccagggtcctgtcggcgaccagcgcaaccaaatccgacggagagatggtgctgccaggcttcccggacgccgacagctttgtgaagtttgctcttgggtccgtggtggcagtcaccaaggcatctgggggcctaccacagtttggcgatgagtatgatttttaccgaagttttcctggcttccaagcattttgcgaaacacagggagacaggttgcttcagtgcatgagcagagtaatgcagtaccatgggtgtcgcagcaacattaaggatcgaagtaaagtgactgagctggaagacaagtttgatttactagttgatgccaatgatgtaattctggagagagtgggtattttactggatgaagcctcaggtgtaaacaagaatcaacagcctgtcctccctgccggcttgcaggtccccaaaacggtagtgtccagctggaaccgtaaggcagcagaatatggcaaaaaagcaaaatctgaaactttccggctgcttcatgcaaaaaatatcatccgacctcagctcaagtttcgagagaagattgacaattccaacacaccatttcttcctaaaatcttcatcaaacccaatgctcagaaacctctccctcaagctctctctaaggaaaggcgggaacgcccacaggatcgtcctgaggacttggacgtcccccctgcactggctgatttcatccatcagcagagaacccagcaggttgagcaagacatgtttgcacatccttatcaatatgaactaaatcactttaccccagcagatgcagtgcttcaaaagccacaaccccagttatacagacctatagaagagacaccatgccatttcatatcctccctggatgaactcgtggaactcaacgaaaagctcttgaattgtcaggaatttgcagttgacttggagcaccactcttacaggagcttcctgggactgacctgcctgatgcaaatttctactcggacggaagacttcatcattgacaccctcgagcttcgaagtgacatgtacattctcaatgagagcctcacagacccagccatcgttaaggtctttcatggtgctgattcagacatagaatggctacagaaagactttgggttgtatgtagtaaacatgtttgatactcatcaggcagcacgccttcttaacctgggcaggcactcactcgatcatctcctgaaactctactgcaacgtggactcaaacaagcaatatcagctggctgattggagaatacgccctctgcccgaggagatgctcagctacgcccgggatgacacccattacctgctatatatctatgacaaaatgaggctggagatgtgggagcgcggcaacgggcagccggtgcagctgcaggtggtgtggcaacggagcagggacatctgcctcaagaaattcatcaaacctatcttcacggatgagtcctaccttgaactctataggaagcagaagaagcaccttaacacacagcagttgacagcctttcagctgctgtttgcctggagggataaaacagctcgcagggaagatgaaagttacggatatgtactgccaaaccacatgatgctgaaaatagctgaagaactgcctaaggaacctcagggcatcatagcttgctgcaacccagtaccgccccttgtgcggcagcagatcaacgaaatgcaccttttaatccagcaggcccgagagatgcccctgctcaagtctgaagttgcagccggagtgaagaagagcggaccgctgcccagtgctgagagattggagaatgttctctttggacctcacgactgctcccatgcccctccggatggctatccaatcatcccaaccagtggatctgtgccagttcagaagcaggcgagcctcttccctgatgaaaaagaagataacttgctgggtaccacatgcctgattgccacagctgtcatcacgttatttaatgaacctagtgctgaagacagtaaaaagggtccattgacagttgcacagaaaaaagcccagaacatcatggagtcctttgaaaatccatttaggatgatcagcaaccgctggaagctggcccaggtacaagtacaaaaagactctaaagaagctgtcaagaagaaggcagctgagcaaacagctgcccgggaacaggcaaaggaggcgtgcaaagctgcagcagaacaggccatctccgtccgacagcaggtcgtgctagaaaatgctgcaaagaagagagagcgagcaacaagcgacccaaggaccacagaacagaaacaagagaagaaacgactcaaaatttccaagaagccaaaggacccagagccaccagaaaaagagtttacgccttacgactacagccagtcagacttcaaggcttttgctggaaacagcaaatccaaagtttcttctcagtttgatccaaataaacagaccccgtctggcaagaaatgcattgcagccaaaaaaattaaacagtcggtgggaaacaaaagcatgtcctttccaactggaaagtcagacagaggcttcaggtacaactggccacagagatagtcctggaagacacgtggcgcctgtggaccggaagcaccaaatgctggtgctgcttttgtacatacatatttttaaaccattaaaattcttcctgaagaaa

SEQ ID NO: 131594 - DNA, 2808 bp, Homo sapiens
  Payload ID: 5680
  Gene Symbol: EXOSC10
  Gene Name: exosome component 10
  Uniprot ID: Q01780
  ENST ID: ENST00000376936
  CDS Start-End: 51-2708
gtctcctcggccgacaagctctcgcgagacgagccgtgcaggctgaaaaaatggcgccacccagtacccgggagcccagggtcctgtcggcgaccagcgcaaccaaatccgacggagagatggtgctgccaggcttcccggacgccgacagctttgtgaagtttgctcttgggtccgtggtggcagtcaccaaggcatctgggggcctaccacagtttggcgatgagtatgatttttaccgaagttttcctggcttccaagcattttgcgaaacacagggagacaggttgcttcagtgcatgagcagagtaatgcagtaccatgggtgtcgcagcaacattaaggatcgaagtaaagtgactgagctggaagacaagtttgatttactagttgatgccaatgatgtaattctggagagagtgggtattttactggatgaagcctcaggtgtaaacaagaatcaacagcctgtcctccctgccggcttgcaggtccccaaaacggtagtgtccagctggaaccgtaaggcagcagaatatggcaaaaaagcaaaatctgaaactttccggctgcttcatgcaaaaaatatcatccgacctcagctcaagtttcgagagaagattgacaattccaacacaccatttcttcctaaaatcttcatcaaacccaatgctcagaaacctctccctcaagctctctctaaggaaaggcgggaacgcccacaggatcgtcctgaggacttggacgtcccccctgcactggctgatttcatccatcagcagagaacccagcaggttgagcaagacatgtttgcacatccttatcaatatgaactaaatcactttaccccagcagatgcagtgcttcaaaagccacaaccccagttatacagacctatagaagagacaccatgccatttcatatcctccctggatgaactcgtggaactcaacgaaaagctcttgaattgtcaggaatttgcagttgacttggagcaccactcttacaggagcttcctgggactgacctgcctgatgcaaatttctactcggacggaagacttcatcattgacaccctcgagcttcgaagtgacatgtacattctcaatgagagcctcacagacccagccatcgttaaggtctttcatggtgctgattcagacatagaatggctacagaaagactttgggttgtatgtagtaaacatgtttgatactcatcaggcagcacgccttcttaacctgggcaggcactcactcgatcatctcctgaaactctactgcaacgtggactcaaacaagcaatatcagctggctgattggagaatacgccctctgcccgaggagatgctcagctacgcccgggatgacacccattacctgctatatatctatgacaaaatgaggctggagatgtgggagcgcggcaacgggcagccggtgcagctgcaggtggtgtggcaacggagcagggacatctgcctcaagaaattcatcaaacctatcttcacggatgagtcctaccttgaactctataggaagcagaagaagcaccttaacacacagcagttgacagcctttcagctgctgtttgcctggagggataaaacagctcgcagggaagatgaaagttacggatatgtactgccaaaccacatgatgctgaaaatagctgaagaactgcctaaggaacctcagggcatcatagcttgctgcaacccagtaccgccccttgtgcggcagcagatcaacgaaatgcaccttttaatccagcaggcccgagagatgcccctgctcaagtctgaagttgcagccggagtgaagaagagcggaccgctgcccagtgctgagagattggagaatgttctctttggacctcacgactgctcccatgcccctccggatggctatccaatcatcccaaccagtggatctgtgccagttcagaagcaggcgagcctcttccctgatgaaaaagaagataacttgctgggtaccacatgcctgattgccacagctgtcatcacgttatttaatgaacctagtgctgaagacagtaaaaagggtccattgacagttgcacagaaaaaagcccagaacatcatggagtcctttgaaaatccatttaggatgtttctgccctcactgggacaccgtgctcccgtctctcaggcagcgaagttcgatccatcaaccaaaatctatgaaatcagcaaccgctggaagctggcccaggtacaagtacaaaaagactctaaagaagctgtcaagaagaaggcagctgagcaaacagctgcccgggaacaggcaaaggaggcgtgcaaagctgcagcagaacaggccatctccgtccgacagcaggtcgtgctagaaaatgctgcaaagaagagagagcgagcaacaagcgacccaaggaccacagaacagaaacaagagaagaaacgactcaaaatttccaagaagccaaaggacccagagccaccagaaaaagagtttacgccttacgactacagccagtcagacttcaaggcttttgctggaaacagcaaatccaaagtttcttctcagtttgatccaaataaacagaccccgtctggcaagaaatgcattgcagccaaaaaaattaaacagtcggtgggaaacaaaagcatgtcctttccaactggaaagtcagacagaggcttcaggtacaactggccacagagatagtcctggaagacacgtggcgcctgtggaccggaagcaccaaatgctggtgctgcttttgtacatacatatttttaaaccattaaaattcttcctgaagaaa

SEQ ID NO: 131595 - DNA, 622 bp, Homo sapiens
  Payload ID: 5680
  Gene Symbol: EXOSC10
  Gene Name: exosome component 10
  ENST ID: ENST00000460196
  CDS Start-End: 24-398
gacgagccgtgcaggctgaaaaaatggcgccacccagtacccgggagcccagggtcctgtcggcgaccagcgcaaccaaatccgacggagagatggtgctgccaggcttcccggacgccgacagctttgtgaagtttgctcttgggtccgtggtggcagtcaccaaggcatctgggggcctaccacagtttggcgatgagtatgatttttaccgaagttttcctggcttccaagcattttgcgaaacacagggagacaggttgcttcagtgcatgagcagagtaatgcagtaccatgggtgtcgcagcaacattaaggatcgaagtaaagtgactgagctggaagacaagtttgatttactagttgatgccaatgatgtaattctggagagagtgtagagacggggtttcaccgtgttagccaggatggtctcgatctcctgaccttgtgatccgcccgcctcagcctcccagaatgctgggattacaggcgtgagccaccacacccggccttcccttactcttatgggtattttactggatgaagcctcaggtgtaaacaagaatcaacagcctgtcctccctgccggcttgcaggtccccaaaacggtagtgtccagctg

SEQ ID NO: 131596 - DNA, 606 bp, Homo sapiens
  Payload ID: 5681
  Gene Symbol: EXOSC2
  Gene Name: exosome component 2
  ENST ID: ENST00000372350
  CDS Start-End: 6-606
ccaagatggcgatggagatgaggcttccagtggctcgcaagcctcttagcgagagactgggccgcgacactaagaaacatctagtggtgccgggggatacaatcactacggacacaggattcatgcggggccatggaacgtatatgggagaagagaagctcattgcatctgttgctggctctgtggagagagtaaacaagttgatctgtgtgaaagctttgaaaaccagatacattggtgaagtaggagacatcgtagtgggacgaatcacagaggttcaacagaagaggtggaaggtggagaccaactccaggctggattcggtcttgctgctctcgtccatgaaccttcctggaggagagctgaggagaagatctgcagaagatgagcttgcaatgagaggtttcttacaggaaggggaccttatcagtgctgaggtccaggcagtgttctctgacggagctgtctctttgcacacgaggagcctgaaatatggaaaaacccactttcatgatttgccatgtggtgcctcagtgattctcggtaacaacggcttcatctggatttacccaacacctgagcacaaagaagaggaagcagggggct

SEQ ID NO: 131597 - DNA, 1885 bp, Homo sapiens
  Payload ID: 5681
  Gene Symbol: EXOSC2
  Gene Name: exosome component 2
  Uniprot ID: Q13868
  ENST ID: ENST00000372351
  CDS Start-End: 7-798
gccaagatggcgatggagatgaggcttccagtggctcgcaagcctcttagcgagagactgggccgcgacactaagaaacatctagtggtgccgggggatacaatcactacggacacaggattcatgcggggccatggaacgtatatgggagaagagaagctcattgcatctgttgctggctctgtggagagagtaaacaagttgatctgtgtgaaagctttgaaaaccagatacattggtgaagtaggagacatcgtagtgggacgaatcacagagaggagaagatctgcagaagatgagcttgcaatgagaggtttcttacaggaaggggaccttatcagtgctgaggtccaggcagtgttctctgacggagctgtctctttgcacacgaggagcctgaaatatggaaaactaggtcagggggttttggtccaggtttccccctccctggtgaaacggcagaagacccactttcatgatttgccatgtggtgcctcagtgattctcggtaacaacggcttcatctggatttacccaacacctgagcacaaagaagaggaagcagggggcttcattgcaaacctggagcctgtctctcttgctgatcgagaggtgatatcccggcttcggaactgcatcatctcgctggtaactcagaggatgatgctgtatgataccagcatcctgtactgctatgaagcatcccttccacatcagatcaaagacatcttaaagccagaaataatggaggagattgtgatggaaacacgccagaggcttttggaacaggagggataaggaggtgctccagaagcacgggactgtggaccttgcaggagtgaagactgtgatgtgtggtccccatatgtggctcagcaaagactcgagagatcatccctttgtctgcattgacggccctgtgacggcctccagcccacaggcctgctttctcctgtcctaacaccaagcctgggtggcagatgaacagtgcttccttgggttgccagctgagtcccggtattagggaatagtttcagctctttcaaagtgcacagtgttacagtcgaatgggctcccatcctggaataatatggagaatcctttgtcttccactcactgtcattcacaaggcacagtgccccatgaaattgccccaatagaaaacatggcatccctgacctccaaatggtctgttttggcctccattcctatatcctttaaatgactgagaatgcagctggtaaagttggaagaataaagttaaccaagcaggccaggcacggtggctcacgcctataatcccagcacttagggaggccaaggcgggcagatcacctgaggtcaatagttcgagaccagcctggccaacaaggtgaaaccccatctctactaaaaatacaaaaaattagccaggtgtggtggtgtgcacctgtagtcccagctatttgggaggctgaggtgggagaatcacttgaacctgggaggcggaggttgcagtgagctgaaatcgcgtaccacactccagcctgggtgacagagcgagactgtgtttcaaagaaaaaaaaaaacaagcagccttttgcttggttggaatctgattttctgttgcgtgttccttgtagccatagatgtgattatgtccacaccgggctgccttaatctgtcctgcttggagagtgacttgtaagatgctgaattattcatgataatacagtgaatgttctgggtccatgtactcagataaacatgaagaaaataagcaaagaaaaatggagactgggaaagcaaagctgttttcatcctataattgaagtagtgtggagcattaacttgtggatgattcagagttaaaagataaaaagacgccagagttctcgctgaagaa

SEQ ID NO: 131598 - DNA, 1957 bp, Homo sapiens
  Payload ID: 5681
  Gene Symbol: EXOSC2
  Gene Name: exosome component 2
  ENST ID: ENST00000372352
  CDS Start-End: 13-870
attggcgccaagatggcgatggagatgaggcttccagtggctcgcaagcctcttagcgagagactgggccgcgacactaagaaacatctagtggtgccgggggatacaatcactacggacacaggattcatgcggggccatggaacgtatatgggagaagagaagctcattgcatctgttgctggctctgtggagagagtaaacaagttgatctgtgtgaaagctttgaaaaccagatacattggtgaagtaggagacatcgtagtgggacgaatcacagaggttcaacagaagaggtggaaggtggagaccaactccaggctggattcggtcttgctgctctcgtccatgaaccttcctggaggagagctgaggagaagatctgcagaagatgagcttgcaatgagaggtttcttacaggaaggggaccttatcagtgctgaggtccaggcagtgttctctgacggagctgtctctttgcacacgaggagcctgaaatatggaaaagtttccccctccctggtgaaacggcagaagacccactttcatgatttgccatgtggtgcctcagtgattctcggtaacaacggcttcatctggatttacccaacacctgagcacaaagaagaggaagcagggggcttcattgcaaacctggagcctgtctctcttgctgatcgagaggtgatatcccggcttcggaactgcatcatctcgctggtaactcagaggatgatgctgtatgataccagcatcctgtactgctatgaagcatcccttccacatcagatcaaagacatcttaaagccagaaataatggaggagattgtgatggaaacacgccagaggcttttggaacaggagggataaggaggtgctccagaagcacgggactgtggaccttgcaggagtgaagactgtgatgtgtggtccccatatgtggctcagcaaagactcgagagatcatccctttgtctgcattgacggccctgtgacggcctccagcccacaggcctgctttctcctgtcctaacaccaagcctgggtggcagatgaacagtgcttccttgggttgccagctgagtcccggtattagggaatagtttcagctctttcaaagtgcacagtgttacagtcgaatgggctcccatcctggaataatatggagaatcctttgtcttccactcactgtcattcacaaggcacagtgccccatgaaattgccccaatagaaaacatggcatccctgacctccaaatggtctgttttggcctccattcctatatcctttaaatgactgagaatgcagctggtaaagttggaagaataaagttaaccaagcaggccaggcacggtggctcacgcctataatcccagcacttagggaggccaaggcgggcagatcacctgaggtcaatagttcgagaccagcctggccaacaaggtgaaaccccatctctactaaaaatacaaaaaattagccaggtgtggtggtgtgcacctgtagtcccagctatttgggaggctgaggtgggagaatcacttgaacctgggaggcggaggttgcagtgagctgaaatcgcgtaccacactccagcctgggtgacagagcgagactgtgtttcaaagaaaaaaaaaaacaagcagccttttgcttggttggaatctgattttctgttgcgtgttccttgtagccatagatgtgattatgtccacaccgggctgccttaatctgtcctgcttggagagtgacttgtaagatgctgaattattcatgataatacagtgaatgttctgggtccatgtactcagataaacatgaagaaaataagcaaagaaaaatggagactgggaaagcaaagctgttttcatcctataattgaagtagtgtggagcattaacttgtggatgattcagagttaaaagataaaaagacgccagagttctcgctgaagaa

SEQ ID NO: 131599 - DNA, 2040 bp, Homo sapiens
  Payload ID: 5681
  Gene Symbol: EXOSC2
  Gene Name: exosome component 2
  Uniprot ID: Q13868
  ENST ID: ENST00000372358
  CDS Start-End: 72-953
ggcctggagttgtggagtcggatatcgcagctcccgactgagctgcgcctgcgcaactcattggcgccaagatggcgatggagatgaggcttccagtggctcgcaagcctcttagcgagagactgggccgcgacactaagaaacatctagtggtgccgggggatacaatcactacggacacaggattcatgcggggccatggaacgtatatgggagaagagaagctcattgcatctgttgctggctctgtggagagagtaaacaagttgatctgtgtgaaagctttgaaaaccagatacattggtgaagtaggagacatcgtagtgggacgaatcacagaggttcaacagaagaggtggaaggtggagaccaactccaggctggattcggtcttgctgctctcgtccatgaaccttcctggaggagagctgaggagaagatctgcagaagatgagcttgcaatgagaggtttcttacaggaaggggaccttatcagtgctgaggtccaggcagtgttctctgacggagctgtctctttgcacacgaggagcctgaaatatggaaaactaggtcagggggttttggtccaggtttccccctccctggtgaaacggcagaagacccactttcatgatttgccatgtggtgcctcagtgattctcggtaacaacggcttcatctggatttacccaacacctgagcacaaagaagaggaagcagggggcttcattgcaaacctggagcctgtctctcttgctgatcgagaggtgatatcccggcttcggaactgcatcatctcgctggtaactcagaggatgatgctgtatgataccagcatcctgtactgctatgaagcatcccttccacatcagatcaaagacatcttaaagccagaaataatggaggagattgtgatggaaacacgccagaggcttttggaacaggagggataaggaggtgctccagaagcacgggactgtggaccttgcaggagtgaagactgtgatgtgtggtccccatatgtggctcagcaaagactcgagagatcatccctttgtctgcattgacggccctgtgacggcctccagcccacaggcctgctttctcctgtcctaacaccaagcctgggtggcagatgaacagtgcttccttgggttgccagctgagtcccggtattagggaatagtttcagctctttcaaagtgcacagtgttacagtcgaatgggctcccatcctggaataatatggagaatcctttgtcttccactcactgtcattcacaaggcacagtgccccatgaaattgccccaatagaaaacatggcatccctgacctccaaatggtctgttttggcctccattcctatatcctttaaatgactgagaatgcagctggtaaagttggaagaataaagttaaccaagcaggccaggcacggtggctcacgcctataatcccagcacttagggaggccaaggcgggcagatcacctgaggtcaatagttcgagaccagcctggccaacaaggtgaaaccccatctctactaaaaatacaaaaaattagccaggtgtggtggtgtgcacctgtagtcccagctatttgggaggctgaggtgggagaatcacttgaacctgggaggcggaggttgcagtgagctgaaatcgcgtaccacactccagcctgggtgacagagcgagactgtgtttcaaagaaaaaaaaaaacaagcagccttttgcttggttggaatctgattttctgttgcgtgttccttgtagccatagatgtgattatgtccacaccgggctgccttaatctgtcctgcttggagagtgacttgtaagatgctgaattattcatgataatacagtgaatgttctgggtccatgtactcagataaacatgaagaaaataagcaaagaaaaatggagactgggaaagcaaagctgttttcatcctataattgaagtagtgtggagcattaacttgtggatgattcagagttaaaagataaaaagacgccagagttctcgctgaagaa

SEQ ID NO: 131600 - DNA, 709 bp, Homo sapiens
  Payload ID: 5681
  Gene Symbol: EXOSC2
  Gene Name: exosome component 2
  ENST ID: ENST00000495699
  CDS Start-End: 1-709
gaggcttccagtggctcgcaagcctcttagcgagagactgggccgcgacactaagaaacatctagtggtgccgggggatacaatcactacggacacaggattcatgcggggccatggaacgtatatgggagaagagaagctcattgcatctgttgctggctctgtggagagagtaaacaagttgatctgtgtgaaagctttgaaaaccagatacattggtgaagtaggagacatcgtagtgggacgaatcacagaggttcaacagaagaggtggaaggtggagaccaactccaggctggattcggtcttgctgctctcgtccatgaaccttcctggaggagagctgaggagaagatctgcagaagatgagcttgcaatgagaggtttcttacaggaaggggaccttatcagtggggttttggtccaggtttccccctccctggtgaaacggcagaagacccactttcatgatttgccatgtggtgcctcagtgattctcggtaacaacggcttcatctggatttacccaacacctgagcacaaagaagaggaagcagggggcttcattgcaaacctggagcctgtctctcttgctgatcgagaggtgatatcccggcttcggaactgcatcatctcgctggtaactcagaggatgatgctgtatgataccagcatcctgtactgctatgaagcatcccttccacatcag

SEQ ID NO: 131601 - DNA, 1956 bp, Homo sapiens
  Payload ID: 5681
  Gene Symbol: EXOSC2
  Gene Name: exosome component 2
  Uniprot ID: Q13868
  ENST ID: ENST00000546165
  CDS Start-End: 33-836
gagctgcgcctgcgcaactcattggcgccaagatggcgatggagatgaggcttccagtggctcgcaagcctcttagcgagagactgggccgcgacactaagaaacatctagtggtgccgggggatacaatcactacggacacaggattcatgcggggccatggaacgtatatgggagaagagaagctcattgcatctgttgctggctctgtggagagagtaaacaagttgatctgtgtgaaagctttgaaaaccagatacattggtgaagtaggagacatcgtagtgggacgaatcacagaggttcaacagaagaggtggaaggtggagaccaactccaggctggattcggtcttgctgctctcgtccatgaaccttcctggaggagagctgaggagaagatctgcagaagatgagcttgcaatgagaggtttcttacaggaaggggaccttatcagtggggttttggtccaggtttccccctccctggtgaaacggcagaagacccactttcatgatttgccatgtggtgcctcagtgattctcggtaacaacggcttcatctggatttacccaacacctgagcacaaagaagaggaagcagggggcttcattgcaaacctggagcctgtctctcttgctgatcgagaggtgatatcccggcttcggaactgcatcatctcgctggtaactcagaggatgatgctgtatgataccagcatcctgtactgctatgaagcatcccttccacatcagatcaaagacatcttaaagccagaaataatggaggagattgtgatggaaacacgccagaggcttttggaacaggagggataaggaggtgctccagaagcacgggactgtggaccttgcaggagtgaagactgtgatgtgtggtccccatatgtggctcagcaaagactcgagagatcatccctttgtctgcattgacggccctgtgacggcctccagcccacaggcctgctttctcctgtcctaacaccaagcctgggtggcagatgaacagtgcttccttgggttgccagctgagtcccggtattagggaatagtttcagctctttcaaagtgcacagtgttacagtcgaatgggctcccatcctggaataatatggagaatcctttgtcttccactcactgtcattcacaaggcacagtgccccatgaaattgccccaatagaaaacatggcatccctgacctccaaatggtctgttttggcctccattcctatatcctttaaatgactgagaatgcagctggtaaagttggaagaataaagttaaccaagcaggccaggcacggtggctcacgcctataatcccagcacttagggaggccaaggcgggcagatcacctgaggtcaatagttcgagaccagcctggccaacaaggtgaaaccccatctctactaaaaatacaaaaaattagccaggtgtggtggtgtgcacctgtagtcccagctatttgggaggctgaggtgggagaatcacttgaacctgggaggcggaggttgcagtgagctgaaatcgcgtaccacactccagcctgggtgacagagcgagactgtgtttcaaagaaaaaaaaaaacaagcagccttttgcttggttggaatctgattttctgttgcgtgttccttgtagccatagatgtgattatgtccacaccgggctgccttaatctgtcctgcttggagagtgacttgtaagatgctgaattattcatgataatacagtgaatgttctgggtccatgtactcagataaacatgaagaaaataagcaaagaaaaatggagactgggaaagcaaagctgttttcatcctataattgaagtagtgtggagcattaacttgtggatgattcagagttaaaagataaaaagacgccagagttctcgctgaagaatgtgagaattcctgtgcattgttttttctgatg

SEQ ID NO: 131602 - DNA, 1806 bp, Homo sapiens
  Payload ID: 5682
  Gene Symbol: EXOSC3
  Gene Name: exosome component 3
  Uniprot ID: Q9NQT5
  ENST ID: ENST00000327304
  CDS Start-End: 14-841
ggtggagcccgcgatggccgaacctgcgtctgtcgcggctgaatctctcgcgggcagcagggcgcgcgctgcacgcacagtactaggtcaggtggtgctcccgggtgaggagctgctcctgccggaacaggaggacgcggaaggccctgggggtgcagtggagcgaccgttgagcctgaatgctagagcgtgctcgcgggtgcgcgttgtatgcggtccgggccttcggcgctgtggggaccgcctgctggtcaccaagtgcggccgcctccgtcacaaggagcccggcagtggcagcggcggcggtgtttactgggtggactctcagcagaagcggtatgttccagtaaaaggagaccatgtgattggcatagtgacagctaaatctggagatatattcaaagttgatgttggagggagtgagccagcttctttgtcttacttgtcatttgaaggtgcaactaaaagaaacagaccaaatgtgcaggttggagatctcatctatggccagtttgtggttgctaataaagacatggaaccagagatggtctgtattgacagctgtggacgagccaatggaatgggtgtcattggacaggatggtctgctttttaaagtgactctgggcttaattagaaagctattagctccagattgtgaaatcatacaggaagtgggaaaactctatccactggagatagtatttggaatgaatggaagaatatgggttaaggcaaaaaccatccagcagactttaattttggcaaacattttagaagcttgtgaacacatgacgtcagatcaaagaaaacagatcttctccagattggcagaaagttgatataggtggacttttttacaggtcagttgaggcaaaaaactatgggttttttcaggtgaacctcccccatttaaatactcagaagataaggtgtgaatgtatgtattattagagtccgaaagtatttttataagttactggttttcacccacgcttttgtgggagagaaaatcattgcaaaatcattttttttgttcggtacaataaagtttactaaaaaacagtattagggtttatttggagttaactcccttagtaattgctacagcttccataattaactggaggtcagcagtaaaataattttgtgattataacagtaagccaggttcaccagaggaaatgtggaatacctaagtataaagcagcaaagaaatgtcacctgtagtcccattattcagcgggtgagtatataacaacgaaatactttttcatttaccaagtattgtgttttgcatggattaactcctttattctaactgcagaagacacttatcctcataattgaaactgaggcacagaatttaacttggcctacattctctatattcatcaaattgaaattatagttattatagcttatatgccactttgtaatatacttttgtctacttcaaacagcatgatacatttcacaactttagtcacatatttcatgttacaggatatttttgagttttatcattatataaataacactatgaggatttctgaatccaaatctggccaagtcttattttgctaaaatcatttcctaggagctaagcatagaaaactcttctatgctatttagtatattaaccaaaacctttagaggtaaagagactgccaggtgatccacatcagtgattcttggtttctagacctctgagaatatgtgagatacagatcccctgaagcctatccatagaaagtcctttttggatcaaagagattatagaactctatttgttgataaagaccaa

SEQ ID NO: 131603 - DNA, 768 bp, Homo sapiens
  Payload ID: 5682
  Gene Symbol: EXOSC3
  Gene Name: exosome component 3
  Uniprot ID: Q9NQT5
  ENST ID: ENST00000396521
  CDS Start-End: 21-515
ggtgtttggtggagcccgcgatggccgaacctgcgtctgtcgcggctgaatctctcgcgggcagcagggcgcgcgctgcacgcacagtactaggtcaggtggtgctcccgggtgaggagctgctcctgccggaacaggaggacgcggaaggccctgggggtgcagtggagcgaccgttgagcctgaatgctagagcgtgctcgcgggtgcgcgttgtatgcggtccgggccttcggcgctgtggggaccgcctgctggtcaccaagtgcggccgcctccgtcacaaggagcccggcagtggcagcggcggcggtgtttactgggtggactctcagcagaagcggtatgttccagtaaaaggagaccatgtgattggcatagtgacagctaaatctggagatatattcaaagttgatgttggagggagtgagccagcttctttgtcttacttgtcatttgaaggtgcaactaaaagaaacagaccaaatgtgcaggctattagctccagattgtgaaatcatacaggaagtgggaaaactctatccactggagatagtatttggaatgaatggaagaatatgggttaaggcaaaaaccatccagcagactttaattttggcaaacattttagaagcttgtgaacacatgacgtcagatcaaagaaaacagatcttctccagattggcagaaagttgatataggtggacttttttacaggtcagttgaggcaaaaaactatgggttttttcaggtgaacctcccccattt

SEQ ID NO: 131604 - DNA, 1625 bp, Homo sapiens
  Payload ID: 5682
  Gene Symbol: EXOSC3
  Gene Name: exosome component 3
  Uniprot ID: Q9NQT5
  ENST ID: ENST00000465229
  CDS Start-End: 18-512
gtttggtggagcccgcgatggccgaacctgcgtctgtcgcggctgaatctctcgcgggcagcagggcgcgcgctgcacgcacagtactaggtcaggtggtgctcccgggtgaggagctgctcctgccggaacaggaggacgcggaaggccctgggggtgcagtggagcgaccgttgagcctgaatgctagagcgtgctcgcgggtgcgcgttgtatgcggtccgggccttcggcgctgtggggaccgcctgctggtcaccaagtgcggccgcctccgtcacaaggagcccggcagtggcagcggcggcggtgtttactgggtggactctcagcagaagcggtatgttccagtaaaaggagaccatgtgattggcatagtgacagctaaatctggagatatattcaaagttgatgttggagggagtgagccagcttctttgtcttacttgtcatttgaaggtgcaactaaaagaaacagaccaaatgtgcaggctattagctccagattgtgaaatcatacaggaagtgggaaaactctatccactggagatagtatttggaatgaatggaagaatatgggttaaggcaaaaaccatccagcagactttaattttggcaaacattttagaagcttgtgaacacatgacgtcagatcaaagaaaacagatcttctccagattggcagaaagttgatataggtggacttttttacaggtcagttgaggcaaaaaactatgggttttttcaggtgaacctcccccatttaaatactcagaagataaggtgtgaatgtatgtattattagagtccgaaagtatttttataagttactggttttcacccacgcttttgtgggagagaaaatcattgcaaaatcattttttttgttcggtacaataaagtttactaaaaaacagtattagggtttatttggagttaactcccttagtaattgctacagcttccataattaactggaggtcagcagtaaaataattttgtgattataacagtaagccaggttcaccagaggaaatgtggaatacctaagtataaagcagcaaagaaatgtcacctgtagtcccattattcagcggggtctggctgtgttacccaggctggagtgcagtggtacaatcatagctcactacagcctcaaattcctgggctcaagtgatcctcctacctcagcctcctgagtagctgggactacaggtacaggccaccatacctggctaatttttaattttttagaggcagggtcttcctatattgcctaggctagtcttgaactcctggcctcaagtgatcctcttgcctcggcctcccaagatgctgggattatatgcaggagccactgtgcccagcctaatagtagggaattcttggttaacattttcagaggactagagttagaagtttcaggtaggaacctcagatctgcagttttcctaacttatctgaaaaatatgcaaacactagcacataaaacagatgtctaaaaagagagtttacaatttacatactgtgatgtaaggcctaaaattaaggcccagtattatgcactgccttgacatctgtcaaaactgggaatacttcaaatagcctaatagtaagctcccctc

SEQ ID NO: 131605 - DNA, 887 bp, Homo sapiens
  Payload ID: 5683
  Gene Symbol: EXOSC4
  Gene Name: exosome component 4
  Uniprot ID: Q9NPD3
  ENST ID: ENST00000316052
  CDS Start-End: 104-841
acctccggaaaccgtagattccgggcggtcggagccgccgggagctgtagttctcccgcggctcagagaagtaggcagagagcggacctggcggccgggcagcatggcggggctggagctcttgtcggaccagggctaccgggtggacgggcggcgcgccggggagctgcgcaagatccaggcgcggatgggcgtgttcgcgcaggctgacggctcggcctacattgagcagggcaacaccaaggcactggctgtggtctacggcccgcacgagatccggggctcccgggctcgagccctgccggacagggccctagtgaactgtcaatatagttcagcgaccttcagcacaggtgagcgcaagcgacggccacatggggaccgtaagtcctgtgagatgggcctgcagctccgccagactttcgaagcagccatcctcacacagctgcacccacgctcccagattgatatctatgtgcaggtgctacaggcagatggtgggacctatgcagcttgtgtgaatgcagccacgctggcagtgctggatgccgggatacccatgagagactttgtgtgtgcgtgctcagctggcttcgtggacggcacagccctggcggacctcagccatgtggaggaagcagctggtggcccccagctggccctggccctgctgccagcctcaggacagattgcgctgcttgagatggatgcccggctgcacgaggaccacctggagcgggtgttggaggctgctgcccaggctgcccgagatgtgcacaccctcttagatcgagtggtccggcagcatgtgcgtgaggcctctatcttgctgggggactgaccacccagccacccatgtccagaataaaaccctcctctgcccacac

SEQ ID NO: 131606 - DNA, 606 bp, Homo sapiens
  Payload ID: 5683
  Gene Symbol: EXOSC4
  Gene Name: exosome component 4
  ENST ID: ENST00000525936
  CDS Start-End: 82-552
gggcggtcggagccgccgggagctgtagttctcccgcggctcagagaagtaggcagagagcggacctggcggccgggcagcatggcggggctggagctcttgtcggaccagggctaccgggtggacgggcggcgcgccggggagctgcgcaagatccaggcgcggatgggcgtgttcgcgcaggctgacggctcggcctacattgagcagggcaacaccaaggcactggctgtggtctacggcccgcacgagatccggggctcccgggctcgagccctgccggacagggccctagtgaactgtcaatatagttcagcgaccttcagcacaggtgctacaggcagatggtgggacctatgcagcttgtgtgaatgcagccacgctggcagtgctggatgccgggatacccatgagagactttgtgtgtgcgtgctcagctggcttcgtggacggcacagccctggcggacctcagccatgtggaggaagcagctggtggcccccagctggccctggccctgctgccagcctcaggacagattgcgctgcttgagatggatgcccggctgcacgaggaccacctggagcgggtgttggaggctgctgc

SEQ ID NO: 131607 - DNA, 1065 bp, Homo sapiens
  Payload ID: 5683
  Gene Symbol: EXOSC4
  Gene Name: exosome component 4
  ENST ID: ENST00000527954
  CDS Start-End: 281-1065
tgcttagcgcatgagtgtgggagctctgctttccaggcggagggaaccagaagggcgaagaccacggtggtgaaaacaagcaaggcacttatgcagagcagaaagactgctggtggggaaagaggggataactccaaatcaggttgagggttcccggggaggtgaggacttagggttttgtagagtagggaaatgatttgggatcttatttcatatgtaatgtgaaacctttgtaaggtagttaggatttgagtgtgtaggtgagacagaagcagcgttgatgtttgtaaacttgggttggcagggaatggggcaaggatggacacaaggaagccaattaaaaggtgccagagggcgacacatgcaagacagagagcgcaaaacagggggctttgttttggaggtaacgcagttgccccttgctgaggcattgaaagtggagggagaggcagacccacagaggacagtggagtgtgagctggaaggagtgggcctggctcatgtgtctgtcctcttccagatccggggctcccgggctcgagccctgccggacagggccctagtgaactgtcaatatagttcagcgaccttcagcacaggtgagcgcaagcgacggccacatggggaccgtaagtcctgtgagatgggcctgcagctccgccagactttcgaagcagccatcctcacacagctgcacccacgctcccagattgatatctatgtgcaggtgctacaggcagatggtgggacctatgcagcttgtgtgaatgcagccacgctggcagtgctggatgccgggatacccatgagagactttgtgtgtgcgtgctcagctggcttcgtggacggcacagccctggcggacctcagccatgtggaggaagcagctggtggcccccagctggccctggccctgctgccagcctcaggacagattgcgctgcttgagatggatgcccggctgcacgaggaccacctggagcgggtgttggaggctgctgcccaggctgcccgagatgtgcacaccctcttagatcgagtggtccggcagcatgtgcgtgaggc

SEQ ID NO: 131608 - DNA, 1118 bp, Homo sapiens
  Payload ID: 5684
  Gene Symbol: EXOSC5
  Gene Name: exosome component 5
  Uniprot ID: Q9NQT4
  ENST ID: ENST00000221233
  CDS Start-End: 152-859
ggcggagccagattgttggtaaacgctaagccacgtgcggacgcccaggaggatggcccagcccggcgcgtgcgcactggttacgcagcctgtttgcggcgcgcgctgccaggcggaagtgacaactgcagccgcacgtgggctcggcgcgatggaggaggagacgcatactgacgccaaaatccgtgctgaaaatggaacagggtccagccctcggggtcctggctgcagcctccggcactttgcctgcgaacagaacctgctgtcgcggccagatggctctgcttccttcctgcaaggtgacacctctgtcctggcgggtgtgtacgggccggccgaggtgaaggtcagcaaagagattttcaacaaggccacactcgaagtgatcctgaggccgaagattgggctgcctggtgttgcagagaagagccgggagcggctgatcaggaacacgtgcgaggcggtggtgctgggcacgttgcacccccgcacctccatcaccgtggtgctgcaggttgtcagcgatgccggctctctcctggcctgttgtctgaatgccgcctgcatggcattggtggatgcaggtgtgcccatgcgggctctcttctgtggggtcgcctgcgccctggactctgatgggaccctcgtgctggatcctacatccaagcaagaaaaggaggcccgggcagtcctgacctttgccctggacagcgtggaacggaagctgctgatgtccagcaccaaggggctctactcagacactgagctccagcagtgcctggctgcggcccaggccgcttcgcaacacgtcttccgtttctaccgggaatcgctgcagaggcgttactccaagagctgaggcaagctggggcaaggggccgctcccattgcctccacccactcaccccctacagcctgaagcaaaccagcagcccagccttgcctctctgacccatgggctccttgagcctgcagctctgtaaccacagggctcctgtggggaggccttggcctgtgacagcccccaggcctgggggcacagatccccccagcaaggataacattcaaaggagctcacatttatggaatggatgaatcaataaattaattcactttaa

SEQ ID NO: 131609 - DNA, 826 bp, Homo sapiens
  Payload ID: 5684
  Gene Symbol: EXOSC5
  Gene Name: exosome component 5
  ENST ID: ENST00000596905
  CDS Start-End: 15-608
gtgggctcggcgcgatggaggaggagacgcatactgacgccaaaatccgtgctgaaaatggaacagggtccagccctcggggtcctggctgcagcctccggcactttgcctgcgaacagaacctgctgtcgcggccagatggctctgcttccttcctgcaaggtgttgcagagaagagccgggagcggctgatcaggaacacgtgcgaggcggtggtgctgggcacgttgcacccccgcacctccatcaccgtggtgctgcaggttgtcagcgatgccggctctctcctggcctgttgtctgaatgccgcctgcatggcattggtggatgcaggtgtgcccatgcgggctctcttctgtggggtcgcctgcgccctggactctgatgggaccctcgtgctggatcctacatccaagcaagaaaaggaggcccgggcagtcctgacctttgccctggacagcgtggaacggaagctgctgatgtccagcaccaaggggctctactcagacactgagctccagcagtgcctggctgcggcccaggccgcttcgcaacacgtcttccgtttctaccgggaatcgctgcagaggcgttactccaagagctgaggcaagctggggcaaggggccgctcccattgcctccacccactcaccccctacagcctgaagcaaaccagcagcccagccttgcctctctgacccatgggctccttgagcctgcagctctgtaaccacagggctcctgtggggaggccttggcctgtgacagcccccaggcctgggggcacagatccccccagcaaggataacattcaaaggagctca

SEQ ID NO: 131610 - DNA, 404 bp, Homo sapiens
  Payload ID: 5684
  Gene Symbol: EXOSC5
  Gene Name: exosome component 5
  ENST ID: ENST00000593771
  CDS Start-End: 4-404
gcgatggaggaggagacgcatactgacgccaaaatccgtgctgaaaatggaacagggtccagccctcggggtcctggctgcagcctccggcactttgcctgcgaacagaacctgctgtcgcggccagatggctctgcttccttcctgcaaggtgacacctctgtcctggcgggtgtgtacgggccggccgaggtgaaggtcagcaaagagattttcaacaaggccacactcgaagtgatcctgaggccgaagattgggctgcctgcaggggtcagtggatggcagtcaggccttgccttcttcccactggaatcttccatcatccctgcaggtgttgcagagaagagccgggagcggctgatcaggaacacgtgcgaggcggtggtgctgggcacgttgcaccc

SEQ ID NO: 131611 - DNA, 354 bp, Homo sapiens
  Payload ID: 5684
  Gene Symbol: EXOSC5
  Gene Name: exosome component 5
  ENST ID: ENST00000602129
  CDS Start-End: 1-189
ggctgcagcctccggcactttgcctgcgaacagaacctgctgtcgcggccagatggctctgcttccttcctgcaaggtgacacctctgtcctggcgggtgtgtacgggccggccgaggtgaaggtcagcaaagagattttcaacaaggccacactcgaagtgatcctgagcccagccttgcctctctgacccatgggctccttgagcctgcagctctgtaaccacagggctcctgtggggaggccttggcctgtgacagcccccaggcctgggggcacagatccccccagcaaggataacattcaaaggagctcacatttatggaatggatgaatcaataaattaattcacttt

SEQ ID NO: 131612 - DNA, 5153 bp, Homo sapiens
  Payload ID: 5685
  Gene Symbol: EXOSC6
  Gene Name: exosome component 6
  Uniprot ID: Q5RKV6
  ENST ID: ENST00000435634
  CDS Start-End: 31-849
gcggaaggggttcgcacgccaagaaccgccatgcctggggatcaccgccgcatccgcggccctgaagaatcgcagccgccgcagctgtacgcggccgacgaggaggaggcgcccggcacccgcgacccaacgcggctacggcccgtgtacgcgcgcgccgggctgctgagccaggccaagggctcggcctacctggaggcgggaggcaccaaggtgctgtgtgccgtgtcgggcccgcgacaggccgagggcggcgagcgcggcggcggcccggccggagcaggcggcgaggccccggccgcgctgcgcggtcgcctgctctgcgacttccgccgcgcacccttcgcgggccgccggcgccgcgctcccccgggcggctgcgaggagcgtgagctggcgctggcgctgcaggaggcgctggagccggctgtgcgcctgggccgctacccgcgcgcgcagctcgaggtgtcggcgctgctgctggaggacggtggctcggccctggccgccgcgctcaccgccgccgcgctcgccctggccgacgcgggcgtggagatgtacgacctggtggtgggctgcggcctcagcctcgcgccggggcccgcgcccacctggctcctggaccccacgcggctcgaggaagagcgcgccgccgccggcctcaccgtggcgctcatgcctgtgctgaatcaggtggccgggctgctgggcagcggcgagggcggcctgacagagagctgggcggaggccgtacgcctgggcctcgagggctgccagcgcctctaccccgtgctgcagcagagcctggtgcgggccgcccgccgcaggggcgccgccgcccagccctgaaccagaagcctgagcaactacggacgcaagccgaggaccgtgctgccgccgtccacgaaaagacccgcgccatcggcctccagtttgcgtcgagaattcctggaagggccctgatatgactgtggttggactgacctgactgccagatggtgggacttggtctggagcagggactacttggaatgataaaggcaaaactcaacagcccctggagctgcgcttgtggtggagctggaccctgaaattacctggaccttttttttagagacagggtttctttctgcagtctcaaactcctagccttgattgatcctcctgccttggcctcccaaagtgctgggactacaggtgcatgcaaccacacctggctaattttcttttcttctttctttcttttttttttttttttttttttgatggagtcttgttctgttgcccaggctggagtgcaatggtgcaatcttggctcactgcaacctctgcctcctgggttcaatccattctcctgcctcagcctcccaagtagctgggattacaggcacatgcctccataccgggctaatttttgtatttttagtagagatggggtttcgccatgtgggccaggctgttctcgaatgcctgacctcaggtgatccacccgccttggcctcccaaagtgctggaattacaggtgtgagccactgtgcccagctgagtaaatttcttgattgcacagaatgtacggtgatattggcggacttaaggacatcgaattgtttatcaggaataaagtattatgtgtgttttctgcggccctggataatgctgtagcattcagggtcgattgagtaaaaaaaatgtagagatggtttcctgtttgtttttgcttctagttttcattcatttgctatttattctcttctggctttgcttgtgtatgcatatatataaaaccattattattattattattatttttagtttctagtggaaggcttttatttggttctgtgaatagtcattttgtttcctaagaacttccagcaagttgtattcattccattcatctagaattcctaggctgcctttgtcgggcctgcaggtattaatggagaatagcagctttttatttttttatatttattttttgagacagagtctcactctgttgcccaggctggagtgcaatggcgcgatctcagctcactgcaacctccgcctcagaggttcaagtgattctcctgcctcagcctctggaatagctgggactacaggcacctgccaccacacccagctaactttttgtatttttagagaagatggggtttcatcatgttggccaagctggtctcaaactcctgatctcagtgatccatctgcctcagcctcccaaagttataagatttttttcctctggtttttagtaaatgttttttttgagattgcttagcaccagaatgatttgcaaatttgaaaataggaactccactaggaatgccggatagaagagtgcttcacatttgtagagggagacaagaactaaatatcacgacgtctttctgagccttttggtttgctaacgtgccccaaattcttattccaaacggtataagataattatgtgtaaatgaataccagctctacttagttttatttcatatttgtgtatctgaatatattaaaatatcttttttttttttttgatgcggagtcttgctctgttgtccagcctggagtgcagtggcatgatctcggctcactgcaacctctgcctcccaggttcaagcgattctcctgcctcagcctcctaagtagctggtattacaggagtgtgccattagcctggctaatttttgtatttttagtagagatggattttcattgtgttggccatgctggtcttgaactcctgacctcaagtgatcctcctgccttggcctcccaaagtactgtgattactatcatgagccaccacacctggcctaaaagatcattgatttagttttgagtaagattttaagtgattaaattatggtattgttgtgtctggaatatctgatattagggttttttttttttttttttacagtttttgatatgctttattttgggtatgtagtttacaaaatataaaggaaatataaggagtgttctcttttttttttaaataaaaagtgtatttttaactgggcatggtggctcactcctgtaaccccagcactgtgggaggctgaggctggtgaatcgcctgagtccaggagtttgagaccagcctgggcaacaaggtgaaaccctgtttctatcaaaaaaaaaaaaaaaaaaaaaaaaggaaaaaaaataagtcaggcatggtggtatgcacctgtagtcccagctacttgaaggctgaggcaggaggatcgcttgtgcctgggaggttgaagctacagtgagctatggtcaagctactgcactccattataggcaaccctatctcaaaaaagcaaagcaaaacaaaacatttttccccttgattatagaggtttgagaaaaatttgagggaagattcagaaaattacctgtaactgaacagaatgccaccagcttgggcttattctgcatgcataattatgaacattttcccagctcttgtgaaaattctcacattcatagaaagatagatgcaccagtaaaataaatacctgtaaatacgataataatttcataataatatgcttcacctagatttaccagttactaatattttgccagttttattttctcacacacttttgttgagcatctgaaaaccatacacatgatgacagttcaacccataatgttttagtttgcatctcccaagaataaggtttttcttctgtataacaagaatattgtaatcatacctaagaaaatgaattttattacatatgtgttctatattcaaatttctgtaattacccctaagatgtcttttaaatgatttttagcattgatagtctgtgcctgtgtagattataacattggctattgcaaaataatggttttctttttctctttttttttgagacgaaatcttgctctattgtccaagctggagggcagtggcacaatctcggctcactgcaacctccgcctcccaggttcaagcagttctcatgcttcaccctcctgagtagctgggattacaggcaggtgccactgtgctctgctaatttttatatttttagtagagacggagtttcatcgagctggccagactggtcttgaactcctgacctcaagtgatccacctgcctcgtcctcccaaagtgctggggttacaggtgtgagccactgcacccagcctaaaatgatggttttctgattctagcatttcttttataagattgctatgtaaagcacagcttttctttttttagggaaaaatgtcttttaacagctgcaaaataaatattctttcaatggaatgacaattattatttttgccatatatttattttaaaaatttatgtataatggtaacctgagcctgcatgttattcatgtgtggtgccatactgatctttaattttaatgtgaagcaagtactaatatagtaaagcataaattatataaaatttgctttatattttggattgcaaattaattgctgtactttatagaaaagtttcccaaatccgttttacttttttgtatttgaaatttaatcacaggtggaatcttaaagagagcatttagggatattgtaaacagatgttattaaggactaatgttaacaaacattgaagaagagaaaacagtatttgtttttagcttaacatcttagtggagtgaaatattttcagtatatttattttatttatttattaattatttttttttttgagatggagtctggctgtattgtccaggctggagtgcagcggtgcaatctcagctcactgcaacctctgcctcctgggttcaagcgattcttgtgtctcagcctcccgagtagttgggatttacaagtcaattttttttttaactaaaactacagaatctatttttcttggtctcatactcagttttttatgtagtcacttagtaaataacctaatttgcttgttttctccacactaattttagggtgaattcctcatttcgcttttcagatcatggggtgagggggatggttgtgtgtgtgaggaactgaggaatcagatggaaaacaatgcctctgctcctttgagtataatcagtgatatttgaggttccagggttaaatgctgcatttttatttctgacgttcgtaccttaaaatatttgaagaaaataaactatttcattgttgtcagaaa

SEQ ID NO: 131613 - DNA, 1055 bp, Homo sapiens
  Payload ID: 5686
  Gene Symbol: EXOSC7
  Gene Name: exosome component 7
  Uniprot ID: Q15024
  ENST ID: ENST00000265564
  CDS Start-End: 49-924
gaggggacgcgcgcagatgacgtgcggctcgtggggcagctcggcagcatggcgtccgtgacgctgagcgaggcggagaaggtgtacatcgtgcatggcgtccaggaagacctccgtgtggatggccgtggctgtgaggactaccgatgtgtcgaagtggaaactgatgtggtgtccaacactagtgggtccgccagggtcaagctgggtcacacagacatcttggtgggagtgaaagcagaaatggggacgccgaagctggagaaaccaaatgaaggctacttggagttctttgttgactgttcagccagtgctacccctgaatttgaaggtagaggaggtgatgaccttggcaccgagatcgctaacaccctctatcggatatttaacaataaaagcagtgtcgacttaaagaccctctgcattagtcctcgggagcactgctgggttctctatgtggatgtgctgcttctggaatgtggtggaaatttgtttgatgccatttccattgctgtaaaggctgctctcttcaatacaaggataccaagggttcgagttttggaggatgaagaggggtcgaaggacattgaattgtcagatgacccttatgactgcatacgactaagtgtggagaatgtcccctgcattgtcactctgtgcaagattggctatcggcatgtggtggatgctactcttcaggaggaggcctgctcgctggccagcttgctggtgtcggtgaccagcaagggagttgtgacgtgcatgaggaaagtggggaagggcagcctggacccagagagcatcttcgagatgatggagactggcaagcgtgtgggcaaggtactgcatgcctccttgcagagtgttgtgcacaaggaagaaagcctggggcccaagagacagaaagttggattcctgggatgatttgcacatcaactgctcaactgtggattgttttttacttttccttttaaaccggttcgtatatatttttcttcgctgttacgaatttacagcagcatttgtacatgtaaaattaaaggctattttctggt

SEQ ID NO: 131614 - DNA, 694 bp, Homo sapiens
  Payload ID: 5687
  Gene Symbol: EXOSC8
  Gene Name: exosome component 8
  ENST ID: ENST00000239893
  CDS Start-End: 24-137
ggcgcagacgcgcgggcgggaagatggcggctgggttcaaaaagagaactgccgtcctgatggaagagaacttggtgaattcagaaccacaactgtcaacatcggttcaattagtaccgcagatggttctgctttagtgaagttgggaaatactacagtaatctgtggagttaaagcagaatttgcagcaccatcaacagatgcccctgataaaggatacgttgttcctaatgtggatctaccacccctgtgttcatcgagattccggtctggacctcctggagaagaggcccaagtggctagccagttcattgcagatgtcattgaaaattcacagataattcagaaagaggacttatgcatttctccaggaaagcttgtctgggttctatactgtgatctcatttgcctcgactacgatggaaacattttggatgcctgcacatttgctttgctagcggctttaaaaaatgttgcctgaagttactataaatgaagaaactgctttagcagaagttaatttaaagaagaaaagttatttgaatattagaactcatccagttgcaacttcctttgctgtgtttgatgacactttgcttatagttgaccctactggagaggaggaacatctggcaacaggaaccttaacaatagtaatggatgaggaaggcaaactctgttgtcttcacaaacc

SEQ ID NO: 131615 - DNA, 1198 bp, Homo sapiens
  Payload ID: 5687
  Gene Symbol: EXOSC8
  Gene Name: exosome component 8
  Uniprot ID: Q96B26
  ENST ID: ENST00000389704
  CDS Start-End: 266-1096
agtcacagcaccagctcttttataaagagggagacccgctccttctttaacagcagattcgtcaaaatacgtccaaggcaaggaaacctagaaaggcgtctgggcaggggaaagtcgatgcgagggcgggccagggacctttcgtcgcgtccccaccttggcatttcccgtggcgtgagcggccccggcatccgtgtcgaaagtgcggcggcggaacaggcgcgcaggagaggagcggcgcaggcgcagacgcgcgggcgggaagatggcggctgggttcaaaaccgtggaacctctggagtattacaggagatttctgaaagagaactgccgtcctgatggaagagaacttggtgaattcagaaccacaactgtcaacatcggttcaattagtaccgcagatggttctgctttagtgaagttgggaaatactacagtaatctgtggagttaaagcagaatttgcagcaccatcaacagatgcccctgataaaggatacgttgttcctaatgtggatctaccacccctgtgttcatcgagattccggtctggacctcctggagaagaggcccaagtggctagccagttcattgcagatgtcattgaaaattcacagataattcagaaagaggacttatgcatttctccaggaaagcttgtctgggttctatactgtgatctcatttgcctcgactacgatggaaacattttggatgcctgcacatttgctttgctagcggctttaaaaaatgtacagttgcctgaagttactataaatgaagaaactgctttagcagaagttaatttaaagaagaaaagttatttgaatattagaactcatccagttgcaacttcctttgctgtgtttgatgacactttgcttatagttgaccctactggagaggaggaacatctggcaacaggaaccttaacaatagtaatggatgaggaaggcaaactctgttgtcttcacaaaccaggtggaagtgggctaactggagctaaacttcaggactgtatgagccgagcagttacaagacacaaagaagttaaaaaactgatggatgaagtaattaagagtatgaaacccaaataaacagccaccacattttcaaaacagatttgtaaaaattgtatttgttaacactgtgcacaaacgttttatactaaataaatatcaaactacattcttctgaaa

SEQ ID NO: 131616 - DNA, 524 bp, Homo sapiens
  Payload ID: 5687
  Gene Symbol: EXOSC8
  Gene Name: exosome component 8
  ENST ID: ENST00000481013
  CDS Start-End: 1-210
gtctgggttctatactgtgatctcatttgcctcgactacgatggaaacattttggatgcctgcacatttgctttgctagcggctttaaaaaatggtggaagtgggctaactggagctaaacttcaggactgtatgagccgagcagttacaagacacaaagaagttaaaaaactgatggatgaagtaattaagagtatgaaacccaaataaacagccaccacattttcaaaacagatttgtaaaaattgtatttgttaacactgtgcacaaacgttttatactaaataaatatcaaactacattcttctgaaagatgtttctattatttcttaggtcacttccatatatattatgtatagtgaaaccatttttaaaaagcaatgacttaggcaaaccaaccctagtttgttaaaccatttccctgtttttatttaaaaatgataaggttgtgcttctgtataaagtttgtacatctagcaatgtaaaatactgacacattaaaaaaaacaaaaagtagaaactca

SEQ ID NO: 131617 - DNA, 1481 bp, Homo sapiens
  Payload ID: 5688
  Gene Symbol: EXOSC9
  Gene Name: exosome component 9
  Uniprot ID: Q06265
  ENST ID: ENST00000243498
  CDS Start-End: 109-1428
gatgacgtaattttcctgcgcctcggggcgagcagcggcgcgcaaggaaagatcgggttccgtttttcccgcggattctggtgcctgtggggccggtgacccaacaccatgaaggaaacgccactctcaaactgcgaacgccgcttcctactccgtgccatcgaagagaagaagcggctggatggcagacaaacctatgattataggaacatcaggatctcatttggaacagattacggatgctgcattgtggaacttggaaaaacaagagttcttggacaggtttcctgtgaacttgtgtctccaaaactcaatcgggcaacagaaggtattcttttttttaaccttgaactctctcagatggccgctccagctttcgaacctggcaggcagtcagatctcttggtgaagttgaatcgactcatggaaagatgtctaagaaattcgaagtgtatagacactgagtctctctgtgttgttgctggtgaaaaggtttggcaaatacgtgtagacctacatttattaaatcatgatggaaatattattgatgctgccagcattgctgcaatcgtggccttatgtcatttccgaagacctgatgtctctgtccaaggagatgaagtaacactgtatacacctgaagagcgtgatcctgtaccattaagtatccaccacatgcccatttgtgtcagttttgcctttttccagcaaggaacatatttattggtggatcccaatgaacgagaagaacgtgtgatggatggcttgctggtgattgccatgaacaaacatcgagagatttgtactatccagtccagtggtgggataatgctactaaaagatcaagttctgagatgcagtaaaatcgctggtgtgaaagtagcagaaattacagagctaatattgaaagctttggagaatgaccaaaaagtaaggaaagaaggtggaaagtttggttttgcagagtctatagcaaatcaaaggatcacagcatttaaaatggaaaaggcccctattgatacctcggatgtagaagaaaaagcagaagaaatcattgctgaagcagaacctccttcagaagttgtttctacacctgtgctatggactcctggaactgcccaaattggagagggagtagaaaactcctggggtgatcttgaagactctgagaaggaagatgatgaaggcggtggtgatcaagctatcattcttgatggtataaaaatggacactggagtagaagtctctgatattggaagccaagatgctcccataatactctcagatagtgaagaagaagaaatgatcattttggaaccagacaagaatccaaagaaaataagaacacagaccaccagtgcaaaacaagaaaaagcaccaagtaaaaagccagtgaaaagaagaaaaaagaagagagctgccaattaaagctaacagttgtatatctgtatatataactattaaaagggatatttattcca

SEQ ID NO: 131618 - DNA, 1529 bp, Homo sapiens
  Payload ID: 5688
  Gene Symbol: EXOSC9
  Gene Name: exosome component 9
  Uniprot ID: Q06265
  ENST ID: ENST00000379663
  CDS Start-End: 106-1476
gacgtaattttcctgcgcctcggggcgagcagcggcgcgcaaggaaagatcgggttccgtttttcccgcggattctggtgcctgtggggccggtgacccaacaccatgaaggaaacgccactctcaaactgcgaacgccgcttcctactccgtgccatcgaagagaagaagcggctggatggcagacaaacctatgattataggaacatcaggatctcatttggaacagattacggatgctgcattgtggaacttggaaaaacaagagttcttggacaggtttcctgtgaacttgtgtctccaaaactcaatcgggcaacagaaggtattcttttttttaaccttgaactctctcagatggccgctccagctttcgaacctggcaggcagtcagatctcttggtgaagttgaatcgactcatggaaagatgtctaagaaattcgaagtgtatagacactgagtctctctgtgttgttgctggtgaaaaggtttggcaaatacgtgtagacctacatttattaaatcatgatggaaatattattgatgctgccagcattgctgcaatcgtggccttatgtcatttccgaagacctgatgtctctgtccaaggagatgaagtaacactgtatacacctgaagagcgtgatcctgtaccattaagtatccaccacatgcccatttgtgtcagttttgcctttttccagcaaggaacatatttattggtggatcccaatgaacgagaagaacgtgtgatggatggcttgctggtgattgccatgaacaaacatcgagagatttgtactatccagtccagtggtgggataatgctactaaaagatcaagttctgagatgcagtaaaatcgctggtgtgaaagtagcagaaattacagagctaatattgaaagctttggagaatgaccaaaaagtaaggaaagaaggtggaaagtttggttttgcagagtctatagcaaatcaaaggatcacagcatttaaaatggaaaaggcccctattgatacctcggatgtagaagaaaaagcagaagaaatcattgctgaagcagaacctccttcagaagttgtttctacacctgtgctatggactcctggaactgcccaaattggagagggagtagaaaactcctggggtgatcttgaagactctgagaaggaagatgatgaaggcggtggtgatcaagctatcattcttgatggtataaaaatggacactggagtagaagtctctgatattggaagccaagagctggggtttcaccatgttggccagactggactcgagttcctgacctcagatgctcccataatactctcagatagtgaagaagaagaaatgatcattttggaaccagacaagaatccaaagaaaataagaacacagaccaccagtgcaaaacaagaaaaagcaccaagtaaaaagccagtgaaaagaagaaaaaagaagagagctgccaattaaagctaacagttgtatatctgtatatataactattaaaagggatatttattcca

SEQ ID NO: 131619 - DNA, 733 bp, Homo sapiens
  Payload ID: 5688
  Gene Symbol: EXOSC9
  Gene Name: exosome component 9
  ENST ID: ENST00000511454
  CDS Start-End: 101-361
aattttcctgcgcctcggggcgagcagcggcgcgcaaggaaagatcgggttccgtttttcccgcggattctggtgcctgtggggccggtgacccaacaccatgaaggaaacgccactctcaaactgcgaacgccgcttcctactccgtgccatcgaagagaagaagcggctggatggcagacaaacctatgattataggaacatcaggatctcatttggaacagattacggatgctgcattgtggaacttggaaaaacaagagttcttggacaggtttcctgtgaacttgtgtctccaaaactcaatcgggcaacagaaggtttggcaaatacgtgtagacctacatttattaaatcatgatggaaatattattgatgctgccagcattgctgcaatcgtggccttatgtcatttccgaagacctgatgtctctgtccaaggagatgaagtaacactgtatacacctgaagagcgtgatcctgtaccattaagtatccaccacatgcccatttgtgtcagttttgcctttttccagcaaggaacatatttattggtggatcccaatgaacgagaagaacgtgtgatggatggcttgctggtgattgccatgaacaaacatcgagagatttgtactatccagtccagtggtgggataatgctactaaaagatcaagttctgagatgcagtaaaatcgctggtgtgaaagtagcagaaattacagagctaatatt

SEQ ID NO: 131620 - DNA, 757 bp, Homo sapiens
  Payload ID: 5688
  Gene Symbol: EXOSC9
  Gene Name: exosome component 9
  ENST ID: ENST00000509800
  CDS Start-End: 80-757
gagcagcggcgcgcaaggaaagatcgggttccgtttttcccgcggattctggtgcctgtggggccggtgacccaacaccatgaaggaaacgccactctcaaactgcgaacgccgcttcctactccgtgccatcgaagagaagaagcggctggatggcagacaaacctatgattataggaacatcaggatctcatttggaacagattacggatgctgcattgtggaacttggaaaaacaagagttcttggacaggtttcctgtgaacttgtgtctccaaaactcaatcgggcaacagaaggtattcttttttttaaccttgaactctctcagatggccgctccagctttcgaacctggcaggcagtcagatctcttggtgaagttgaatcgactcatggaaagatgtctaagaaattcgaagtgtatagacactgagtctctctgtgttgttgctggtgaaaagtatacacctgaagagcgtgatcctgtaccattaagtatccaccacatgcccatttgtgtcagttttgcctttttccagcaaggaacatatttattggtggatcccaatgaacgagaagaacgtgtgatggatggcttgctggtgattgccatgaacaaacatcgagagatttgtactatccagtccagtggtgggataatgctactaaaagatcaagttctgagatgcagtaaaatcgctggtgtgaaagtagcagaaattacagagctaatattgaaagctttggagaatgac

SEQ ID NO: 131621 - DNA, 3882 bp, Homo sapiens
  Payload ID: 5688
  Gene Symbol: EXOSC9
  Gene Name: exosome component 9
  ENST ID: ENST00000513654
  CDS Start-End: 103-831
gtaattttcctgcgcctcggggcgagcagcggcgcgcaaggaaagatcgggttccgtttttcccgcggattctggtgcctgtggggccggtgacccaacaccatgaaggaaacgccactctcaaactgcgaacgccgcttcctactccgtgccatcgaagagaagaagcggctggatggcagacaaacctatgattataggaacatcaggatctcatttggaacagattacggatgctgcattgtggaacttggaaaaacaagagttcttggacaggtttcctgtgaacttgtgtctccaaaactcaatcgggcaacagaaggtattcttttttttaaccttgaactctctcagatggccgctccagctttcgaacctggcaggcagtcagatctcttggtgaagttgaatcgactcatggaaagatgtctaagaaattcgaagtgtatagacactgagtctctctgtgttgttgctggtgaaaaggtttggcaaatacgtgtagacctacatttattaaatcatgatggaaatattattgatgctgccagcattgctgcaatcgtggccttatgtcatttccgaagacctgatgtctctgtccaaggagatgaagtaacactgtatacacctgaagagcgtgatcctgtaccattaagtatccaccacatgcccatttgtgtcagttttgcctttttccagcaaggaacatatttattggtggatcccaatgaacgagaagaacgtgtgatggatggcttgctggtgattgccatgaacaaacatcgagagatttgtactatccagtccagtggttctgagatgcagtaaaatcgctggtgtgaaagtagcagaaattacagagctaatattgaaagctttggagaatgaccaaaaagtaaggaaagaaggtggaaagtttggttttgcagagtctatagcaaatcaaaggatcacagcatttaaaatggaaaaggcccctattgatacctcggatgtagaagaaaaagcagaagaaatcattgctgaagcagaacctccttcagaagttgtttctacacctgtgctatggactcctggaactgcccaaattggagagggagtagaaaactcctggggtgatcttgaagactctgagaaggaagatgatgaaggcggtggtgatcaagctatcattcttgatggtataaaaatggacactggagtagaagtctctgatattggaagccaaggtaggtgacactttatggcacacttactatatattacatacatatagtattaccgtatagttatatatataatgcataaaatgtgtgtatatttatattatcactgtatatagtaatatatagcatattagctatatagagatgtatagtggataaataacatacaggatactatatagagagaatatagatatgtagttatatatagggatgtaagtattgcatttttagaggggctaaatattgtgatttaaatttcaactaaattattgtggctagctgcaatactaatgctactttctaaaagaatatgcatatctttgtagagtagtggaacactggcataaatgatagtgatatttttaattaaaaaaattttgtgtgtgtgtatgtatgtgggtgggttttaagggaatgagtttcttgaagatcttattcctccctgctgtctttttttttgtagtttctagactgaaacaaaaagcccatcccatatcataacatataatactgcctaaataaaactttctatgatgatagaaacattaagtatctacactggtatagcagccactagccccacatggctagtgaacacttgaaatgtggcttgtgttactgagaactgaattttaaattttacttaatacaaaattaagcagccacatgtggctagtggctaccatgctagacatcgcagtattagaacataaaaaaattctataagtaactagaatactggtagtcctagacgtttcttgcattctgaaagccatagaactgaagttgttatgtatggttatttctactttttaaaaaaagcaaattcttgctggtctatataatagaatgacttattttcttacgtggtaagaacagaaatcctacaaggaactgggagctaggctggcagggaaaattgaaggtgatgtgtttaataggaatgtaatgcaaatacttctgttttcaaagagagaaattattgcttatgaacattactggagcctgggctttttgtttttttacttaagtaaataggtaaggaaaaaatttcccattgattgggacccttactcaaatttcccagtggttacttctatttggtattattcttccagaacttgttccaggtatttatttactctctgtgcagtgatgtaagctaatgctgcatatacttgtatagcattgaatataactagttggtttaacaattctcttattgttgaagatgtaagttgtttccattttctcactgttaatatccttgcacttgcatatacctcttatatgtttgtttagtgtattcttctaacagtgaataatattttcaactgaatataatgaaggtggacctaagcattggaaaaatggagcaggtacagccttcctaaagcatgtgaacaaagggagaaactaattgaaaactaaaaatacaaataattgatatgggttaattcacattttatgtatatcattaactaataagcaggagaaaaatgggcaaaatacatggagcagttctcaaagtatacaatggccagtaatatttttcatggtcagccctgacagtaatacaaataaaatccaaagaaaaatgacatggcattttttgttactgtattttgggcagtattaaaaacaccagcaatgccaaaggtatatgggaaatgggttcttttatttcttggaatgtaaactggaactatttctggaggaatagagtagcacaaacaattcagttgtctctacaaaagatgctatatacatttccccctagcttttctattatgacatgtaccaaattgtcacaccattcaagcacctgtaggaaataagagtttaaagaaacaaatgttacagatgagttctagagtgctctaagaagctgatttaaagaaaagattaagcctccacctagagttttatttttattttttgggatggagtcttgctctgtcacccagactggagtgcagtggcactgcaacctccacctccatgggttcaagcgattctcatgcctcagcctcgagtagctgggcctacaagcacatgccaccacgcctggctaatttttctattatttttaatagagctggggtttcaccatgttggccagactggactcgagttcctgacctcaggtaatccacctgcctcagcctaccaaaatgtgggtattaaaagtgtgagccaccacgcccagccccagaaataagagtttagaacgtctgatagaaataaattcatgtagaaataaattttgcaagagattgcttaacttttttttttttttttaaattaataaaaaaacaaagatgctcccataatactctcagatagtgaagaagaagaaatgatcattttggaaccagacaagaatccaaagaaaataagaacacagaccaccagtgcaaaacaagaaaaagcaccaagtaaaaagccagtgaaaagaagaaaaaagaagagagctgccaattaaagctaacagttgtatatctgtatatataactattaaaagggatatttattccattctgagaaccctgggtattttttattcacaaatccattataaaatctagcaggattttaaaaatagttttttgtttttaatgtgctttaaaataataaaccttctggagca

SEQ ID NO: 131622 - DNA, 515 bp, Homo sapiens
  Payload ID: 5688
  Gene Symbol: EXOSC9
  Gene Name: exosome component 9
  ENST ID: ENST00000511132
  CDS Start-End: 1-515
ctctgtccaaggagatgaagtaacactgtatacacctgaagagcgtgatcctgtaccattaagtatccaccacatgcccatttgtgtcagttttgcctttttccagcaaggaacatatttattggtggatcccaatgaacgagaagaacgtgtgatggatggcttgctggtgattgccatgaacaaacatcgagagatttgtactatccagtccagtggtgggataatgctactaaaagatcaagttctgagatgcagtaaaatcgctggtgtgaaagtagcagaaattacagagctaatattgaaagctttggagaatgaccaaaaagtaagtgtttctacacctgtgctatggactcctggaactgcccaaattggagagggagtagaaaactcctggggtgatcttgaagactctgagaaggaagatgatgaaggcggtggtgatcaagctatcattcttgatggtataaaaatggacactggagtagaagtctctgatattggaagccaag

SEQ ID NO: 131623 - DNA, 1543 bp, Homo sapiens
  Payload ID: 5688
  Gene Symbol: EXOSC9
  Gene Name: exosome component 9
  ENST ID: ENST00000512454
  CDS Start-End: 217-1488
cgaccggcacgttcaccccatccctcaggctttatttattttttttcgacaggttcttttcaaggctccagtcaccgcagcagttgtccatgctgtagtttccactttcctgtatgggcgggctggttaggattccactttcccccaagtgcttagcccagggccagacaaaaagtagttgcttaagaaatacttgttgaaggaataaattaatgaatgaatttgtgcttacagcggctggatggcagacaaacctatgattataggaacatcaggatctcatttggaacagattacggatgctgcattgtggaacttggaaaaacaagagttcttggacaggtttcctgtgaacttgtgtctccaaaactcaatcgggcaacagaaggtattcttttttttaaccttgaactctctcagatggccgctccagctttcgaacctggcaggcagtcagatctcttggtgaagttgaatcgactcatggaaagatgtctaagaaattcgaagtgtatagacactgagtctctctgtgttgttgctggtgaaaaggtttggcaaatacgtgtagacctacatttattaaatcatgatggaaatattattgatgctgccagcattgctgcaatcgtggccttatgtcatttccgaagacctgatgtctctgtccaaggagatgaagtaacactgtatacacctgaagagcgtgatcctgtaccattaagtatccaccacatgcccatttgtgtcagttttgcctttttccagcaaggaacatatttattggtggatcccaatgaacgagaagaacgtgtgatggatggcttgctggtgattgccatgaacaaacatcgagagatttgtactatccagtccagtggtgggataatgctactaaaagatcaagttctgagatgcagtaaaatcgctggtgtgaaagtagcagaaattacagagctaatattgaaagctttggagaatgaccaaaaagtaaggaaagaaggtggaaagtttggttttgcagagtctatagcaaatcaaaggatcacagcatttaaaatggaaaaggcccctattgatacctcggatgtagaagaaaaagcagaagaaatcattgctgaagcagaacctccttcagaagttgtttctacacctgtgctatggactcctggaactgcccaaattggagagggagtagaaaactcctggggtgatcttgaagactctgagaaggaagatgatgaaggcggtggtgatcaagctatcattcttgatggtataaaaatggacactggagtagaagtctctgatattggaagccaagatgctcccataatactctcagatagtgaagaagaagaaatgatcattttggaaccagacaagaatccaaagaaaataagaacacagaccaccagtgcaaaacaagaaaaagcaccaagtaaaaagccagtgaaaagaagaaaaaagaagagagctgccaattaaagctaacagttgtatatctgtatatataactattaaaagggatatttattccatt

SEQ ID NO: 131624 - DNA, 8270 bp, Homo sapiens
  Payload ID: 5689
  Gene Symbol: EXT1
  Gene Name: exostosin glycosyltransferase 1
  Uniprot ID: Q16394
  ENST ID: ENST00000378204
  CDS Start-End: 808-3048
gtgtaagtgtaacattcagaaccgggtaacattcggcgaccgaacgcggcggtcggcagcgttcgcgcgggggcctgcgaagcgctgctcggggccggcactgcccgcggggaggacgcgccgccgccgccacccagcgccgccgccgccgccgcctccagccgggccgccgcgcgtcccgggggccggccccgcgagcgcaggagtaaacaccgccggagtcttggagccgctgcagaagggaataaagagagatgcagggatttgtgaggttacggcgccccagctgcaagatgcactagccggctgaacccgggatcggctgacttgttggaaccggagtgctctgcacggagagtggtggatgagttgaagttgccttcccggggctcattttccacgctgccgagaggaatccgagaggcaaggcaatcacttcgtcttgccattgattgggtatcgggagctttttttttctcccctctctctttcttttcctccgtcttgttgcatgcaagaaaattacagtccgctgctcgcccgccctgggtgcgagatattcagccccgctctctcccgtgcattgtgcaacccaaagatgaaagaccgaaggggagaaagttaaagaaatcgcccacatgcgctggatcagtccacggcttggggaaaggcatccagagaaggtgggagcggagagtttgaagtctttacaggcgggaagatggcggactggagctgaaagtgttgattgggaaacttgggtgattcttgtgtttatttacaatcctcttgacccaggcaggacacatgcaggccaaaaaacgctatttcatcctgctctcagctggctcttgtctcgcccttttgttttatttcggaggcttgcagtttagggcatcgaggagccacagccggagagaagaacacagcggtaggaatggcttgcaccaccccagtccggatcatttctggccccgcttcccggacgctctgcgccccttcgttccttgggatcaattggaaaacgaggattccagcgtgcacatttccccccggcagaagcgagatgccaactccagcatctacaaaggcaagaagtgccgcatggagtcctgcttcgatttcaccctttgcaagaaaaacggcttcaaagtctacgtatacccacagcaaaaaggggagaaaatcgccgaaagttaccaaaacattctagcggccatcgagggctccaggttctacacctcggaccccagccaggcgtgcctctttgtcctgagtctggatactttagacagagaccagttgtcacctcagtatgtgcacaatttgagatccaaagtgcagagtctccacttgtggaacaatggtaggaatcatttaatttttaatttatattccggcacttggcctgactacaccgaggacgtggggtttgacatcggccaggcgatgctggccaaagccagcatcagtactgaaaacttccgacccaactttgatgtttctattcccctcttttctaaggatcatcccaggacaggaggggagagggggtttttgaagttcaacaccatccctcctctcaggaagtacatgctggtattcaaggggaagaggtacctgacagggataggatcagacaccaggaatgccttatatcacgtccataacggggaggacgttgtgctcctcaccacctgcaagcatggcaaagactggcaaaagcacaaggattctcgctgtgacagagacaacaccgagtatgagaagtatgattatcgggaaatgctgcacaatgccactttctgtctggttcctcgtggtcgcaggcttgggtccttcagattcctggaggctttgcaggctgcctgcgtccctgtgatgctcagcaatggatgggagttgccattctctgaagtgattaattggaaccaagctgccgtcataggcgatgagagattgttattacagattccttctacaatcaggtctattcatcaggataaaatcctagcacttagacagcagacacaattcttgtgggaggcttatttttcttcagttgagaagattgtattaactacactagagattattcaggacagaatattcaagcacatatcacgtaacagtttaatatggaacaaacatcctggaggattgttcgtactaccacagtattcatcttatctgggagattttccttactactatgctaatttaggtttaaagcccccctccaaattcactgcagtcatccatgcggtgacccccctggtctctcagtcccagccagtgttgaagcttctcgtggctgcagccaagtcccagtactgtgcccagatcatagttctatggaattgtgacaagcccctaccagccaaacaccgctggcctgccactgctgtgcctgtcgtcgtcattgaaggagagagcaaggttatgagcagccgttttctgccctacgacaacatcatcacagacgccgtgctcagccttgacgaggacacggtgctttcaacaacagaggtggatttcgccttcacagtgtggcagagcttccctgagaggattgtggggtaccccgcgcgcagccacttctgggataactctaaggagcggtggggatacacatcaaagtggacgaacgactactccatggtgttgacaggagctgctatttaccacaaatattatcactacctatactcccattacctgccagccagcctgaagaacatggtggaccaattggccaattgtgaggacattctcatgaacttcctggtgtctgctgtgacaaaattgcctccaatcaaagtgacccagaagaagcagtataaggagacaatgatgggacagacttctcgggcttcccgttgggctgaccctgaccactttgcccagcgacagagctgcatgaatacgtttgccagctggtttggctacatgccgctgatccactctcagatgaggctcgaccccgtcctctttaaagaccaggtctctattttgaggaagaaataccgagacattgagcgactttgaggaatccggctgagtgggggaggggaagcaagaagggatgggggtcaagctgctctctcttcccagtgcagatccactcatcagcagagccagattgtgccaactatccaaaaacttagatgagcagaatgacaaaaaaaaaaaggccaatgagaactcaactcctggctcctgggactgcaccagactgctccaaactcacctcactggcttctgtgtcccaagactaggttgtgtacagtttaattatggaacattaaataattatttttgaaatgattgctatgcaggtttaaacttttttaatgatcaaaactattaaaaaccagagttctttgtttaatcaaaattgtgttggttgtgaatatttcaaagctgctattccttttcccacagacatcattgtcatggccatgtagggtgccctgcagtttcaaaagctcaaacttcgtggaaaacacaataagtcactctacccattatcaagaaataactgagcataagttgtaacttcattattcaactttgccagtgcaaattgttttccacttcgaatcttcaaatccacttgaacttttatctctaaaatgtcgctgcatgaaagaaagtattacgacttccaggtaggcagttctaactgaaatctctatgtttgagatagatatatatgataatcgtttttcattgggggggtggggggaattagtaccaagaaaacactagtataattaagaaatgttcagtttgcacaaagaactatccagataacccaccagcatgttagtgagatggaaatacagacccacaacagtaacccaatacttgcaggggttgggggcacggttatagattcaaccattgacctaagtctgcgtagcactgggaagaggctttggtttagaagccaaggaataatgagtatattggggagaacagattatttacaagatgaactctttaatgtttgtgagaatctcaagtttcagagtttctcttttgagaaagaaaaaggggtaataaggtagaaattcacaccaatgaacaagaggattgctgcaaagtaactgaggagatgtctcgccattgggaccctaatgccatttttggtcaaacattgttttgagcaagaatctggcaaacaaaataatcaacaacaaatgtgaatatagtttcatttacttttaatttttaaatctgtggaaaagtttagttgtgcttcttgttaaaaagaacatttctatccctgaaaatgctatcttgggcttatgattattgttaaactccaagtataaactgaaaaaaaaaacatatccctaactctgttatgaaaaatggagacttctgatattaaatgctttcttctacttggaagaggccagagaaaacagggaagagaaagacattattgagtttgaccatgtattatgctgaataaacaataagcactttagagtccctccctcaaactctcatacatttcatatttcttttccatttattttcagttttgttttagaagaaaagttcatcagagaattttgttctgataatttcaagtggccatcttaggtcagtggaaaccgtaagtccattggactttacctcatcctttctttgtagacatctgggagaggaagaggagcttgtaatgatagcacggggatggtgctgtaaacaggagtgaaagtgtttgtggaagtccagagaagtgactcaacaggctacctagctgcagaacaaggagtagagcccacatatccagatggtgttttgagaggtgcgtagacagtgaaattcaattaaagagaggattttctcctcagcctcatgactcagaacagctccctaaatacctctctcatctaattggacccatccatagtccattctcaaacatgtgacattttcccctaagtagatgtgattatctcttaggcatttgttgaaaaataattcttaggtccatggtgcttgcacttgtgtcttttctataaaatgtttggtcttacaggtttcatgtcatttaagctgcacttctcagcaagttaaaagattagcagttaatctttattcatttggcctttgtgaatttgtatttaaattatttttttcaggattggcaaattattcttgtttctcctttaccaaaaaataaatgcgatattttgttcaatgaccccaaaaccaacttgaaacttaggtggtcatattggcttgcaaagcaatgtccctaattgtaccagtcagtcacacaagtggattcaaggacctgctttgccagattgacctgtcaccaagctcacaacacatatcctccacaaacaacatgtgttatgtgaagaaaaatggtaattataaataagaacaggatataacacacctttcatccactttaaatctccacagtttcattttatgtcattctctgagcaaatctctttgggatgtgagctagcgtgttcttctcccatttggaatataaggctgggaatagaacaatgcttaacaaatcagtgaagctcgacagtaatatgtaattttaattcagttaggaaagagttgtattgcattgcaacaagttgacaaatcatagccatctctgtagggtgtcaggaattatctcctggtcaactttaatgataactaggggtccctaagtgggctaacatgtgctgcattggagagaagccaagggctgagagtacagtgccaaccacgtaatgaattgcttgcagaaattccaaagaggactcagccacttatggatttccacacagcatcttttcccagctccacattaagacacaggatcttaaaagtaattttttaaaagctggctgtgtatttatttatatgaaagtgttataaatatcaaagcttacaaatacattaatacatatcacctttgttgaagctagcaaaatggctcaaaattgagactgtagagaaaaatccatgaaataatcacgatagtcataccacaaaagatagcatagctaggtgggcctacctggtcgtatcaacacactttcagatagatgcttcaaaaaaaaagggaaagcttgttactggaatcttatgtgcattacagtttaatttcttcttgtgacaaatggtgctcaaagaaggatcaatccggttgcatccttcaatttcccttttagaatgacttttggttttcattacagtaggctatgttagcctttattttggtggttctcaaatacctggtgacttgaaagagtattatgctggtggcctttcataaaggttactgaactttaatcaggggtgagatgaatgaatgtgaataggcctatatactattttttttaattaaaaaaaaaaaaaacagggcacttgatttaagaacaaacctgtttaaagggcaggatcagggggaagacagccttactaggttggaatctgaatgagattcttgctggacaaggctgaattatggatgcaaaagccaagcaaacttcccagacctggaagtgtcttgtgttcccttgggtctcttgagatctccagtatttaaaagtagcagttattgccatgaactctcaaataaaaatgctcctgcctcttacttgtgaatataatcaacatgcagccagtacatcaggaccgcagttgctgaattcatttacctagttcccctttacagcgactatggacaagaacctttcagttggttttgtcattcttggccagatttaaccaagaaatttctttcactatcagcctcattttctcaggcatgcttacagggacaaagttgttttgagttgagttctcagcaaataagcattaatatcaaactgtgctaaacttgtctcacttggtataagaacttcagcataaagagattagtttatcctttgacaccaagtcttttttttttctttgagacagagtcttgccctgtcacccaggctggaatgcattggtgtgatctcagctcagtcactgcaacctccgcctccccggttcaagcaattctcctgcctcaccctgcttagtagttgggattacaggcatgtgctaccacactgggctaatttttgtatatttattagagacagggttttgctatgttggccaggctggtctcaaactcctgacctcaggtgatccacctgcctctgcctcccaaagtgctgagattacaggtgtaagccactgcgcctggccccccttttttttttctttaaaaaaaaaaaaaagcttgggggattaagtaccctaagatagtggtctctcccatcagttcaataatgctgtacagaacctctggataaaaaagctgttatttacaccataattgtgatgatggatttgactcctcaaaaccatctctcccctttttgccctttccaaaaatcaaaggcttttgtctccatgagttttacctagtagggattgtagttgtcactggtctagagttccaatacattttatatcaggaacctcagtgagctacccagaattggaacttaacatggcccagcaactaggagaagaaggcaaaccttgagaaagctgagccctcaggatagcacagtctcacccttgtttaaaatcaagtcaggctagcctttcagtcactctggttttgtaatgatttgccttttaggcctcaggccatttgatttctgcaatagttttctgttcttctcctacaggaatacatccctgtcctttcggttgtaactattactaaaactagggctatgcaaatgacctggttaccatgtaatgaaccttgtgtacttattttgagagaacaatatgtataggatatgttgaggggcagaaagaaagacatcaaaaactggaactattttaggtggcaaattgtaacgcaaaaaacaaaagtataccttattttgtatacgatgtacacttgggacagagttttctaatatgttgccaatgtttttgtagtgtcaccacaggtcttttctgaagtgtttttcccatttgttatagagtattaatgacttagcgtaattaagccctcaagtatgtgtgagagagcgcgtgtgagaaaatacaaagccatagatattgatttacttcactgacctgtgtaactttatgtctgggtttcgccatccaagatagattgttttatagagagtgtcaccaaagactttttccttccaatttatagaagaaaaaaaaaagaaattattaataaatgacatgacttttca

SEQ ID NO: 131625 - DNA, 700 bp, Homo sapiens
  Payload ID: 5689
  Gene Symbol: EXT1
  Gene Name: exostosin glycosyltransferase 1
  ENST ID: ENST00000436216
  CDS Start-End: 1-622
cggccaggcgatgctggccaaagccagcatcagtactgaaaacttccgacccaactttgatgtttctattcccctcttttctaaggatcatcccaggacaggaggggagagggggtttttgaagttcaacaccatccctcctctcaggaagtacatgctggtattcaaggggaagaggtacctgacagggataggatcagacaccaggaatgccttatatcacgtccataacggggaggacgttgtgctcctcaccacctgcaagcatggcaaagactggcaaaagcacaaggattctcgctgtgacagagacaacaccgagtatgagaagtatgattatcgggaaatgctgcacaatgccactttctgtctggttcctcgtggtcgcaggcttgggtccttcagattcctggaggctttgcaggctgcctgcgtccctgtgatgctcagcaatggatgggagttgccattctctgaagtgattaattggaaccaagctgccgtcataggcgatgagagattgttattacagactcccatatctgtcggattagtcatatgttatggaggcaagcatgcagaaagagattccttctacaatcaggtctattcatcaggataaaatcctagcacttagacagcagacacaattcttgtgggaggcttatttttcttcagttgagaagattgtattaactac

SEQ ID NO: 131626 - DNA, 1446 bp, Homo sapiens
  Payload ID: 5689
  Gene Symbol: EXT1
  Gene Name: exostosin glycosyltransferase 1
  ENST ID: ENST00000437196
  CDS Start-End: 297-422
atgcaagaaaattacagtccgctgctcgcccgccctgggtgcgagatattcagccccgctctctcccgtgcattgtgcaacccaaagatgaaagaccgaaggggagaaagttaaagaaatcgcccacatgcgctggatcagtccacggcttggggaaaggcatccagagaaggtgggagcggagagtttgaagtctttacaggcgggaagatggcggactggagctgaaagtgttgattgggaaacttgggtgattcttgtgtttatttacaatcctcttgacccaggcaggacacatgcaggccaaaaaacgctatttcatcctgctctcagctggctcttgtctcgcccttttgttttatttcggaggctgcctgcgtccctgtgatgctcagcaatggatgggagttgccattctctgaagtgattaattggaaccaagctgccgtcataggcgatgagagattgttattacagattccttctacaatcaggtctattcatcaggataaaatcctagcacttagacagcagacacaattcttgtgggaggcttatttttcttcagttgagaagattgtattaactacactagagattattcaggacagaatattcaagcacatatcacgtaacagtttaatatggaacaaacatcctggaggattgttcgtactaccacagtattcatcttatctgggagattttccttactactatgctaatttaggtttaaagcccccctccaaattcactgcagtcatccatgcggtgacccccctggtctctcagtcccagccagtgttgaagcttctcgtggctgcagccaagtcccagtactgtgcccagatcatagttctatggaattgtgacaagcccctaccagccaaacaccgctggcctgccactgctgtgcctgtcgtcgtcattgaaggagagagcaaggttatgagcagccgttttctgccctacgacaacatcatcacagacgccgtgctcagccttgacgaggacacggtgctttcaacaacagaggtggatttcgccttcacagtgtggcagagcttccctgagaggattgtggggtaccccgcgcgcagccacttctgggataactctaaggagcggtggggatacacatcaaagtggacgaacgactactccatggtgttgacaggagctgctatttaccacaaatattatcactacctatactcccattacctgccagccagcctgaagaacatggtggaccaattggccaattgtgaggacattctcatgaacttcctggtgtctgctgtgacaaaattgcctccaatcaaagtgacccagaagaagcagtataaggagacaatgatgggacagacttctcgggcttcccgttgggctgaccctgaccactttgcccagcgacagagctgcatgaatacgtttgccagctgg

SEQ ID NO: 131627 - DNA, 3424 bp, Homo sapiens
  Payload ID: 5690
  Gene Symbol: EXT2
  Gene Name: exostosin glycosyltransferase 2
  Uniprot ID: Q93063
  ENST ID: ENST00000343631
  CDS Start-End: 130-2286
agccacagggatctgattcctcccagggggatgtcctgcgcctcagggtccggtggtggcctgcggcatcccttgcggtgccagaagccgtgggacgaggagtgtgaggaagaggctgtctgtgtcattatgtgtgcgtcggtcaagtataatatccggggtcctgccctcatcccaagaatgaagaccaagcaccgaatctactatatcaccctcttctccattgtcctcctgggcctcattgccactggcatgtttcagttttggccccattctatcgagtcctcaaatgactggaatgtagagaagcgcagcatccgtgatgtgccggttgttaggctgccagccgacagtcccatcccagagcggggggatctcagttgcagaatgcacacgtgttttgatgtctatcgctgtggcttcaacccaaagaacaaaatcaaggtgtatatctatgctctgaaaaagtacgtggatgactttggcgtctctgtcagcaacaccatctcccgggagtataatgaactgctcatggccatctcagacagtgactactacactgatgacatcaaccgggcctgtctgtttgttccctccatcgatgtgcttaaccagaacacactgcgcatcaaggagacagcacaagcgatggcccagctctctaggtgggatcgaggtacgaatcacctgttgttcaacatgttgcctggaggtcccccagattataacacagccctggatgtccccagagacagggccctgttggctggtggcggcttttctacgtggacttaccggcaaggctacgatgtcagcattcctgtctatagtccactgtcagctgaggtggatcttccagagaaaggaccaggtccacggcaatacttcctcctgtcatctcaggtgggtctccatcctgagtacagagaggacctagaagccctccaggtcaaacatggagagtcagtgttagtactcgataaatgcaccaacctctcagagggtgtcctttctgtccgtaagcgctgccacaagcaccaggtcttcgattacccacaggtgctacaggaggctactttctgtgtggttcttcgtggagctcggctgggccaggcagtattgagcgatgtgttacaagctggctgtgtcccggttgtcattgcagactcctatattttgcctttctctgaagttcttgactggaagagagcatctgtggttgtaccagaagaaaagatgtcagatgtgtacagtattttgcagagcatcccccaaagacagattgaagaaatgcagagacaggcccggtggttctgggaagcgtacttccagtcaattaaagccattgccctggccaccctgcagattatcaatgaccggatctatccatatgctgccatctcctatgaagaatggaatgaccctcctgctgtgaagtggggcagcgtgagcaatccactcttcctcccgctgatcccaccacagtctcaagggttcaccgccatagtcctcacctacgaccgagtagagagcctcttccgggtcatcactgaagtgtccaaggtgcccagtctatccaaactacttgtcgtctggaataatcagaataaaaaccctccagaagattctctctggcccaaaatccgggttccattaaaagttgtgaggactgctgaaaacaagttaagtaaccgtttcttcccttatgatgaaatcgagacagaagctgttctggccattgatgatgatatcattatgctgacctctgacgagctgcaatttggttatgaggtctggcgggaatttcctgaccggttggtgggttacccgggtcgtctgcatctctgggaccatgagatgaataagtggaagtatgagtctgagtggacgaatgaagtgtccatggtgctcactggggcagctttttatcacaagtattttaattacctgtatacctacaaaatgcctggggatatcaagaactgggtagatgctcatatgaactgtgaagatattgccatgaacttcctggtggccaacgtcacgggaaaagcagttatcaaggtaaccccacgaaagaaattcaagtgtcctgagtgcacagccatagatgggctttcactagaccaaacacacatggtggagaggtcagagtgcatcaacaagtttgcttcagtcttcgggaccatgcctctcaaggtggtggaacaccgagctgaccctgtcctgtacaaagatgactttcctgagaagctgaagagcttccccaacattggcagcttatgaaacgtgtcattggtggaggtctgaatgtgaggctgggacagagggagagaacaaggcctcccagcactctgatgtcagagtagtaggttaagggtggaaggttgacctacttggatcttggcatgcacccacctaacccactttctcaagaacaagaacctagaatgaatatccaagcacctcgagctatgcaacctctgttcttgtatttcttatgatctctgatgggttcttctcgaaaatgccaagtggaagactttgtggcatgctccagatttaaatccagctgaggctccctttgttttcagttccatgtaacaatctggaaggaaacttcacggacaggaagactgctggagaagagaagcgtgttagcccatttgaggtctggggaatcatgtaaagggtacccagacctcacttttagttatttacatcaatgagttctttcagggaaccaaacccagaattcggtgcaaaagccaaacatcttggtgggatttgataaatgccttgggacctggagtgctgggcttgtgcacaggaagagcaccagccgctgagtcaggatcctgtcagttccatgagctattcctctttggtttggctttttgatatgattaaaattattttttattcctttttctactgtgtcttaaacaccaattcctgatagtccaaggaaccacctttctcccttgatatatttaactccgtctttggcctgacaacagtcttctgcccatgtctgggaacacacgccaggaggaatgtctgataccctctgcatcaagcgtaagaaggtcccaaatcataaccattttaagaacagatgactcagaaacctccagaggaatctgtttgcttcctgattagatccagtcaatgttttaaaggtattgtcagagaaaaacagagggtctgtactagccatgcaaggagtcgctctagctggtacccgtaaaagttgtgggaattgtgacccccatcccaaggggatgccaaaatttctctcattcttttggtataaacttaacattagccagggaggttctggctaacgttaaatgctgctatacaactgctttgcaacagttgctggtatatttaaatcattaaatttcagcatttactaata

SEQ ID NO: 131628 - DNA, 2997 bp, Homo sapiens
  Payload ID: 5690
  Gene Symbol: EXT2
  Gene Name: exostosin glycosyltransferase 2
  Uniprot ID: Q93063
  ENST ID: ENST00000358681
  CDS Start-End: 167-2353
ctcgccagcccagactcggccctggcagtggcggctggcgattcggaccgatccgacctgggcggaggtggcccgcgccccgcggcatgagccggtgaccaagctcggggccgagcgggaggcagccgtggccgaggagtgtgaggaagaggctgtctgtgtcattatgtgtgcgtcggtcaagtataatatccggggtcctgccctcatcccaagaatgaagaccaagcaccgaatctactatatcaccctcttctccattgtcctcctgggcctcattgccactggcatgtttcagttttggccccattctatcgagtcctcaaatgactggaatgtagagaagcgcagcatccgtgatgtgccggttgttaggctgccagccgacagtcccatcccagagcggggggatctcagttgcagaatgcacacgtgttttgatgtctatcgctgtggcttcaacccaaagaacaaaatcaaggtgtatatctatgctctgaaaaagtacgtggatgactttggcgtctctgtcagcaacaccatctcccgggagtataatgaactgctcatggccatctcagacagtgactactacactgatgacatcaaccgggcctgtctgtttgttccctccatcgatgtgcttaaccagaacacactgcgcatcaaggagacagcacaagcgatggcccagctctctaggtgggatcgaggtacgaatcacctgttgttcaacatgttgcctggaggtcccccagattataacacagccctggatgtccccagagacagggccctgttggctggtggcggcttttctacgtggacttaccggcaaggctacgatgtcagcattcctgtctatagtccactgtcagctgaggtggatcttccagagaaaggaccaggtccacggcaatacttcctcctgtcatctcaggtgggtctccatcctgagtacagagaggacctagaagccctccaggtcaaacatggagagtcagtgttagtactcgataaatgcaccaacctctcagagggtgtcctttctgtccgtaagcgctgccacaagcaccaggtcttcgattacccacaggtgctacaggaggctactttctgtgtggttcttcgtggagctcggctgggccaggcagtattgagcgatgtgttacaagctggctgtgtcccggttgtcattgcagactcctatattttgcctttctctgaagttcttgactggaagagagcatctgtggttgtaccagaagaaaagatgtcagatgtgtacagtattttgcagagcatcccccaaagacagattgaagaaatgcagagacagctcttcatggaaccagccaggagagagaactggtcagctgctaatcaccaaatgaactccctgatctggcctagggaacagtgggattcacagattatcaatgaccggatctatccatatgctgccatctcctatgaagaatggaatgaccctcctgctgtgaagtggggcagcgtgagcaatccactcttcctcccgctgatcccaccacagtctcaagggttcaccgccatagtcctcacctacgaccgagtagagagcctcttccgggtcatcactgaagtgtccaaggtgcccagtctatccaaactacttgtcgtctggaataatcagaataaaaaccctccagaagattctctctggcccaaaatccgggttccattaaaagttgtgaggactgctgaaaacaagttaagtaaccgtttcttcccttatgatgaaatcgagacagaagctgttctggccattgatgatgatatcattatgctgacctctgacgagctgcaatttggttatgaggtctggcgggaatttcctgaccggttggtgggttacccgggtcgtctgcatctctgggaccatgagatgaataagtggaagtatgagtctgagtggacgaatgaagtgtccatggtgctcactggggcagctttttatcacaagtattttaattacctgtatacctacaaaatgcctggggatatcaagaactgggtagatgctcatatgaactgtgaagatattgccatgaacttcctggtggccaacgtcacgggaaaagcagttatcaaggtaaccccacgaaagaaattcaagtgtcctgagtgcacagccatagatgggctttcactagaccaaacacacatggtggagaggtcagagtgcatcaacaagtttgcttcagtcttcgggaccatgcctctcaaggtggtggaacaccgagctgaccctgtcctgtacaaagatgactttcctgagaagctgaagagcttccccaacattggcagcttatgaaacgtgtcattggtggaggtctgaatgtgaggctgggacagagggagagaacaaggcctcccagcactctgatgtcagagtagtaggttaagggtggaaggttgacctacttggatcttggcatgcacccacctaacccactttctcaagaacaagaacctagaatgaatatccaagcacctcgagctatgcaacctctgttcttgtatttcttatgatctctgatgggttcttctcgaaaatgccaagtggaagactttgtggcatgctccagatttaaatccagctgaggctccctttgttttcagttccatgtaacaatctggaaggaaacttcacggacaggaagactgctggagaagagaagcgtgttagcccatttgaggtctggggaatcatgtaaagggtacccagacctcacttttagttatttacatcaatgagttctttcagggaaccaaacccagaattcggtgcaaaagccaaacatcttggtgggatttgataaatgccttgggacctggagtgctgggcttgtgcacaggaagagcaccagccgctgagtcaggatcctgtcagttccatgagctattcctctttggtttggctttttgatatgattaaaattattttttattcctttt

SEQ ID NO: 131629 - DNA, 3454 bp, Homo sapiens
  Payload ID: 5690
  Gene Symbol: EXT2
  Gene Name: exostosin glycosyltransferase 2
  Uniprot ID: Q93063
  ENST ID: ENST00000395673
  CDS Start-End: 57-2312
tcccttcctgctgccaccttcccgccagccacagggatctgattcctcccagggggatgtcctgcgcctcagggtccggtggtggcctgcggcatcccttgcggtgccagaagccgtgggacgaggagtgtgaggaagaggctgtctgtgtcattatgtgtgcgtcggtcaagtataatatccggggtcctgccctcatcccaagaatgaagaccaagcaccgaatctactatatcaccctcttctccattgtcctcctgggcctcattgccactggcatgtttcagttttggccccattctatcgagtcctcaaatgactggaatgtagagaagcgcagcatccgtgatgtgccggttgttaggctgccagccgacagtcccatcccagagcggggggatctcagttgcagaatgcacacgtgttttgatgtctatcgctgtggcttcaacccaaagaacaaaatcaaggtgtatatctatgctctgaaaaagtacgtggatgactttggcgtctctgtcagcaacaccatctcccgggagtataatgaactgctcatggccatctcagacagtgactactacactgatgacatcaaccgggcctgtctgtttgttccctccatcgatgtgcttaaccagaacacactgcgcatcaaggagacagcacaagcgatggcccagctctctaggtgggatcgaggtacgaatcacctgttgttcaacatgttgcctggaggtcccccagattataacacagccctggatgtccccagagacagggccctgttggctggtggcggcttttctacgtggacttaccggcaaggctacgatgtcagcattcctgtctatagtccactgtcagctgaggtggatcttccagagaaaggaccaggtccacggcaatacttcctcctgtcatctcaggtgggtctccatcctgagtacagagaggacctagaagccctccaggtcaaacatggagagtcagtgttagtactcgataaatgcaccaacctctcagagggtgtcctttctgtccgtaagcgctgccacaagcaccaggtcttcgattacccacaggtgctacaggaggctactttctgtgtggttcttcgtggagctcggctgggccaggcagtattgagcgatgtgttacaagctggctgtgtcccggttgtcattgcagactcctatattttgcctttctctgaagttcttgactggaagagagcatctgtggttgtaccagaagaaaagatgtcagatgtgtacagtattttgcagagcatcccccaaagacagattgaagaaatgcagagacaggcccggtggttctgggaagcgtacttccagtcaattaaagccattgccctggccaccctgcagattatcaatgaccggatctatccatatgctgccatctcctatgaagaatggaatgaccctcctgctgtgaagtggggcagcgtgagcaatccactcttcctcccgctgatcccaccacagtctcaagggttcaccgccatagtcctcacctacgaccgagtagagagcctcttccgggtcatcactgaagtgtccaaggtgcccagtctatccaaactacttgtcgtctggaataatcagaataaaaaccctccagaagattctctctggcccaaaatccgggttccattaaaagttgtgaggactgctgaaaacaagttaagtaaccgtttcttcccttatgatgaaatcgagacagaagctgttctggccattgatgatgatatcattatgctgacctctgacgagctgcaatttggttatgaggtctggcgggaatttcctgaccggttggtgggttacccgggtcgtctgcatctctgggaccatgagatgaataagtggaagtatgagtctgagtggacgaatgaagtgtccatggtgctcactggggcagctttttatcacaagtattttaattacctgtatacctacaaaatgcctggggatatcaagaactgggtagatgctcatatgaactgtgaagatattgccatgaacttcctggtggccaacgtcacgggaaaagcagttatcaaggtaaccccacgaaagaaattcaagtgtcctgagtgcacagccatagatgggctttcactagaccaaacacacatggtggagaggtcagagtgcatcaacaagtttgcttcagtcttcgggaccatgcctctcaaggtggtggaacaccgagctgaccctgtcctgtacaaagatgactttcctgagaagctgaagagcttccccaacattggcagcttatgaaacgtgtcattggtggaggtctgaatgtgaggctgggacagagggagagaacaaggcctcccagcactctgatgtcagagtagtaggttaagggtggaaggttgacctacttggatcttggcatgcacccacctaacccactttctcaagaacaagaacctagaatgaatatccaagcacctcgagctatgcaacctctgttcttgtatttcttatgatctctgatgggttcttctcgaaaatgccaagtggaagactttgtggcatgctccagatttaaatccagctgaggctccctttgttttcagttccatgtaacaatctggaaggaaacttcacggacaggaagactgctggagaagagaagcgtgttagcccatttgaggtctggggaatcatgtaaagggtacccagacctcacttttagttatttacatcaatgagttctttcagggaaccaaacccagaattcggtgcaaaagccaaacatcttggtgggatttgataaatgccttgggacctggagtgctgggcttgtgcacaggaagagcaccagccgctgagtcaggatcctgtcagttccatgagctattcctctttggtttggctttttgatatgattaaaattattttttattcctttttctactgtgtcttaaacaccaattcctgatagtccaaggaaccacctttctcccttgatatatttaactccgtctttggcctgacaacagtcttctgcccatgtctgggaacacacgccaggaggaatgtctgataccctctgcatcaagcgtaagaaggtcccaaatcataaccattttaagaacagatgactcagaaacctccagaggaatctgtttgcttcctgattagatccagtcaatgttttaaaggtattgtcagagaaaaacagagggtctgtactagccatgcaaggagtcgctctagctggtacccgtaaaagttgtgggaattgtgacccccatcccaaggggatgccaaaatttctctcattcttttggtataaacttaacattagccagggaggttctggctaacgttaaatgctgctatacaactgctttgcaacagttgctggtatatttaaatcattaaatttcagcatttactaatactgc

SEQ ID NO: 131630 - DNA, 3136 bp, Homo sapiens
  Payload ID: 5690
  Gene Symbol: EXT2
  Gene Name: exostosin glycosyltransferase 2
  Uniprot ID: Q93063
  ENST ID: ENST00000533608
  CDS Start-End: 335-2491
ctgtctgagcatttcactgcggagcctgagcgcgcctgcctgggaaaacactgcagcggtgctcggactcctcctgtccagcaggaggcgcggcccggcagctcccgcatgcgcagtgcgctcggtgtcagacggcccggatcccggttaccggcccctcgctcgctgctcgccagcccagactcggccctggcagtggcggctggcgattcggaccgatccgacctgggcggaggtggcccgcgccccgcggcatgagccggtgaccaagctcggggccgagcgggaggcagccgtggccgaggagtgtgaggaagaggctgtctgtgtcattatgtgtgcgtcggtcaagtataatatccggggtcctgccctcatcccaagaatgaagaccaagcaccgaatctactatatcaccctcttctccattgtcctcctgggcctcattgccactggcatgtttcagttttggccccattctatcgagtcctcaaatgactggaatgtagagaagcgcagcatccgtgatgtgccggttgttaggctgccagccgacagtcccatcccagagcggggggatctcagttgcagaatgcacacgtgttttgatgtctatcgctgtggcttcaacccaaagaacaaaatcaaggtgtatatctatgctctgaaaaagtacgtggatgactttggcgtctctgtcagcaacaccatctcccgggagtataatgaactgctcatggccatctcagacagtgactactacactgatgacatcaaccgggcctgtctgtttgttccctccatcgatgtgcttaaccagaacacactgcgcatcaaggagacagcacaagcgatggcccagctctctaggtgggatcgaggtacgaatcacctgttgttcaacatgttgcctggaggtcccccagattataacacagccctggatgtccccagagacagggccctgttggctggtggcggcttttctacgtggacttaccggcaaggctacgatgtcagcattcctgtctatagtccactgtcagctgaggtggatcttccagagaaaggaccaggtccacggcaatacttcctcctgtcatctcaggtgggtctccatcctgagtacagagaggacctagaagccctccaggtcaaacatggagagtcagtgttagtactcgataaatgcaccaacctctcagagggtgtcctttctgtccgtaagcgctgccacaagcaccaggtcttcgattacccacaggtgctacaggaggctactttctgtgtggttcttcgtggagctcggctgggccaggcagtattgagcgatgtgttacaagctggctgtgtcccggttgtcattgcagactcctatattttgcctttctctgaagttcttgactggaagagagcatctgtggttgtaccagaagaaaagatgtcagatgtgtacagtattttgcagagcatcccccaaagacagattgaagaaatgcagagacaggcccggtggttctgggaagcgtacttccagtcaattaaagccattgccctggccaccctgcagattatcaatgaccggatctatccatatgctgccatctcctatgaagaatggaatgaccctcctgctgtgaagtggggcagcgtgagcaatccactcttcctcccgctgatcccaccacagtctcaagggttcaccgccatagtcctcacctacgaccgagtagagagcctcttccgggtcatcactgaagtgtccaaggtgcccagtctatccaaactacttgtcgtctggaataatcagaataaaaaccctccagaagattctctctggcccaaaatccgggttccattaaaagttgtgaggactgctgaaaacaagttaagtaaccgtttcttcccttatgatgaaatcgagacagaagctgttctggccattgatgatgatatcattatgctgacctctgacgagctgcaatttggttatgaggtctggcgggaatttcctgaccggttggtgggttacccgggtcgtctgcatctctgggaccatgagatgaataagtggaagtatgagtctgagtggacgaatgaagtgtccatggtgctcactggggcagctttttatcacaagtattttaattacctgtatacctacaaaatgcctggggatatcaagaactgggtagatgctcatatgaactgtgaagatattgccatgaacttcctggtggccaacgtcacgggaaaagcagttatcaaggtaaccccacgaaagaaattcaagtgtcctgagtgcacagccatagatgggctttcactagaccaaacacacatggtggagaggtcagagtgcatcaacaagtttgcttcagtcttcgggaccatgcctctcaaggtggtggaacaccgagctgaccctgtcctgtacaaagatgactttcctgagaagctgaagagcttccccaacattggcagcttatgaaacgtgtcattggtggaggtctgaatgtgaggctgggacagagggagagaacaaggcctcccagcactctgatgtcagagtagtaggttaagggtggaaggttgacctacttggatcttggcatgcacccacctaacccactttctcaagaacaagaacctagaatgaatatccaagcacctcgagctatgcaacctctgttcttgtatttcttatgatctctgatgggttcttctcgaaaatgccaagtggaagactttgtggcatgctccagatttaaatccagctgaggctccctttgttttcagttccatgtaacaatctggaaggaaacttcacggacaggaagactgctggagaagagaagcgtgttagcccatttgaggtctggggaatcatgtaaagggtacccagacctcacttttagttatttacatcaatgagttctttcagggaaccaaacccagaattcggtgcaaaagccaaacatcttggtgggatttgataaatgccttgggacctggagtgctgggcttgtgcacaggaagagcaccagccgctgagtcaggatcctgtcagttccatgagctattcctctttggtttggctttttgatatgattaaaattattttttattccttttt

SEQ ID NO: 131631 - DNA, 580 bp, Homo sapiens
  Payload ID: 5690
  Gene Symbol: EXT2
  Gene Name: exostosin glycosyltransferase 2
  ENST ID: ENST00000532479
  CDS Start-End: 434-580
gtgtcagacggcccggatcccggttaccggcccctcgctcgctgctcgccagcccagactcggccctggcagtggcggctggcgattcggaccgatccgacctgggcggaggtggcccgcgccccgcggcatgagccggtgaccaagctcggggccgagcgggaggcagccgtggccgagtgtctttaatgttatagagctactcagagttgctgtttctccttgagatgcttttggtgttggggaaccactgattcaagtatacacatagaccttgagagcttcttgggaagttctaacatgggccagcggagggcagctccttgcctgcatttgtcccaaaacttcctgtcttcaaactccaggagggatatgcagaatggcaaggaagccataccatagggagtgtgaggaagaggctgtctgtgtcattatgtgtgcgtcggtcaagtataatatccggggtcctgccctcatcccaagaatgaagaccaagcaccgaatctactatatcaccctcttctccattgtcctcctgggcctcattgccactggcatgtttcagttttggccccattct

SEQ ID NO: 131632 - DNA, 580 bp, Homo sapiens
  Payload ID: 5690
  Gene Symbol: EXT2
  Gene Name: exostosin glycosyltransferase 2
  ENST ID: ENST00000527014
  CDS Start-End: 244-580
gacggcccggatcccggttaccggcccctcgctcgctgctcgccagcccagactcggccctggcagtggcggctggcgattcggaccgatccgacctgggcggaggtggcccgcgccccgcggcatgagccggtgaccaagctcggggccgagcgggaggcagccgtggccgagagctactcagagttgctgtttctccttgagatgcttttggagtgtgaggaagaggctgtctgtgtcattatgtgtgcgtcggtcaagtataatatccggggtcctgccctcatcccaagaatgaagaccaagcaccgaatctactatatcaccctcttctccattgtcctcctgggcctcattgccactggcatgtttcagttttggccccattctatcgagtcctcaaatgactggaatgtagagaagcgcagcatccgtgatgtgccggttgttaggctgccagccgacagtcccatcccagagcggggggatctcagttgcagaatgcacacgtgttttgatgtctatcgctgtggcttcaacccaaagaacaaaatcaaggtgtatatctatgctctgaaaa

SEQ ID NO: 131633 - DNA, 4015 bp, Homo sapiens
  Payload ID: 5691
  Gene Symbol: EXTL1
  Gene Name: exostosin-like glycosyltransferase 1
  Uniprot ID: Q92935
  ENST ID: ENST00000374280
  CDS Start-End: 868-2898
ccgactggagagggatgggaggagataccatagggtttggggggcttggcacagcggccctggcctctgcactgtgatagctccaagccagatggtgcaaggcagctgctgggctgcggggaagaggggctgcacttcctgagctggtgcagcggcagagtggataaggatcaggaccccgagccctcctggccctccaaggcagggggacaccggctgcacccaggctgtgacctcagctgacgccgatgatccacatgggatgcagggtctaattttagctccagccacaggggccacagcccagaagcgtctgccagcgggcacaggggcagccagggctgctcaggcaaggggaggagtgggaagaccagcccagctccctccagcctgtccctggccaagccgcctcctgtgggagctctgactggtccccatggcctggcagacagccctcctctcagttgagggcaaggtcaaggggtgcagccaggagggcagggggacacggccctgcattctggacaggggttgcgtcagccagagcagtgcccaggggcaggggtccctgctgggagggaaaaggctggcttggttgtccaaaggccgagaaggcagagtcctgagagcaggggggccaggccagcaagctgggtcccacctggcctcctcctgcctggctggtgactcactatctgaccttagacaggcggcctggtctcgatgggcctcagtcttcccatctgtacaatgacagcacaggactagcaggtcggtcccagctctggtctcccgccccaggccctgctcttcctgcttgctggcagaggcctcccagcttccctagccctgactgtgggtggccacatgcagtcgtggaggagaagaaagtccctgtggctggcactgtcagcctcctggctcctgcttgtcctgctgggaggcttctcccttctccgcctggcattgcctcccagacctcggcccggggcttcccaaggctggccccgctggctggatgcagagctcctgcagagcttctcccagcctggagagctcccagaagatgccgtttcacctcctcaagcccctcatggtggcagctgcaactgggaatcttgctttgatacctcaaagtgcaggggcgatggccttaaggtattcgtgtacccagcggttggaaccatctctgagactcatcgcaggatcctggcttccattgagggctctcgcttctacacattcagccctgctggggcctgcctcctcctcctcctcagcctggacgcccagactggagagtgcagctcaatgcctctgcaatggaacaggggcaggaaccatctggtcctccgtctccacccggctccctgccccaggaccttccagctgggacaggctatggtggctgaggccagccccacggtggactccttccggcccggctttgatgtggccctcccttttctccctgaagcccacccgttgcgaggtggggctcctggccagctgcggcaacacagcccccagcccggggtagccctgctagccctggaagaggagaggggtgggtggcgcacagcagacactggctcctctgcctgcccctgggatgggcgctgtgagcaagaccctggacctgggcagacccagcgccaggagacgctgcccaatgccaccttctgcctcatctctggccaccgtcccgaggctgcctcgcgcttcctccaagccctgcaggccggctgcatcccagtgcttctcagcccccgctgggagctgcccttctccgaggtcatcgactggaccaaggcagccatcgtagctgatgagaggctcccacttcaggtcctggctgccctccaggagatgtcccctgcacgggtcctcgccctgcgtcagcagacccagtttctatgggatgcctacttctcctcagtggagaaggtcatccataccactctggaggttattcaggaccggatttttggaacatcagctcacccctcactgctgtggaacagccccccaggggcactcctggccctgtctactttttccacaagcccccaggacttccccttctactacctgcaacagggctcccgccctgagggcagattcagcgccctgatctgggtggggcccccaggccagccccctctgaagctcatccaggcggtggcaggctcccagcactgtgcccagatcttggttctctggagcaatgagaggccactcccatccaggtggccggagacagctgtgcccttgacagtcattgatgggcacaggaaggttagtgatcgcttctacccatatagcaccatcagaacagatgccatcctcagcctcgatgcccgcagcagtctttccacaagtgaggtggactttgcctttctggtgtggcagagcttcccagagcggatggtgggcttcctgacgtcgagccatttctgggacgaggcccatggtggctggggctacactgctgagaggaccaacgaattctccatggttctcaccacagccgccttctaccataggtattaccacactctcttcacccactccctgcccaaggctctgaggaccctggcagatgaggcacccacctgtgtggacgtcctgatgaatttcatagtagcagcagtcaccaagctgccccctatcaaggtgccctatggcaagcagcgccaggaggctgctccactggcgcctgggggcccggggcccaggccaaagccgcctgccccagcccccgactgcatcaaccagatagcggcagcgttcggccacatgcccttgctgtcctctcgtctgcgtctggacccggtgctgtttaaggacccggtgtccgtgcagcgcaagaagtaccgcagcctggagaagccctaggggggcgacccgcggagaccccagcagaggtcgcagcccagctcccagggggcccggcgcctgccggcgggctccgctcttgggacaccggagaacctatcatgtcagccagcgggcccacacgtcggaccccggttggccaatcacaacaggggggcgtggccttaccttctcctgctcgccctcagccgcggagcctctgcggaggctgagccccgcgaccggagcgccgctctccgcttctccacccagctaacttctgctcgtctttcagagcattgtctcctccagggacttgcctggccctcctccccctccgcccccaatgggttcggtctcctttgcgctttcgcagtccagtgtttgccgcggttcccgcacggtcaggccccaggactggcttgcgagccccggggggcgggtcgtgtcgtgtccttttctctctggctaggcaggtgtgccgcaaatatttgacgaatagatggatggcagacattaactgcgtgcctggccctatgagggcggcggcgggacagggtgagcggagagacagaactgtccccgccccaccccgccacccattcctagggttcctagtcccgggaaggcaactacccaaagacgcctgggttgtcaggctcaatccttgagcctcaaccaaggagcagaggggtgcgggtaaacgaggagtggggcgaggaaagcgggatgggaacaagtggcctgtccccgcacggcccgcggctcagcctcggccgtctgccctgcactaccaaggccgaccactagaggtcagcgtcgcgccgcactcttcacccgcatgtccagagggcggccgggatgtggagggtgagcgctgtgggcagctcgggggctgaaagctgggaagagaaatctgaagaacagccccatctctttcgcctgcacacttggaactcagcaagaagggactgtttctaggtgggctgggcgcgagcagggactgtcccgagcggtataggtgagaatggagttggggggggacactaggtcctccggggttcacccacctggagctggaattatcacttccgaaataaagcgcgtgtccttgccccctcacgctccaggctataaa

SEQ ID NO: 131634 - DNA, 2835 bp, Homo sapiens
  Payload ID: 5692
  Gene Symbol: EXTL2
  Gene Name: exostosin-like glycosyltransferase 2
  Uniprot ID: Q9UBQ6
  ENST ID: ENST00000370113
  CDS Start-End: 288-1280
cactttgcgggcggcactttttccaggttgttaatccagctaatggagaaggatagatgcacgctacttggtttagaaaaaaaaacaaaaatgagcaaacgagacgccccttccgttttatgataactaagctgcagggaaataaatcggctggccctactgcaatctactgcactcgagaaacatcacagaaaattctttgatttatcttaatagtgacaagtgagcctgcttctgtcaattactgaagctataaggagattttttaaaaattaaacttcaacacaatgaggtgttgccacatctgcaaacttcctgggagagtaatggggattcgagtgcttcgattatctttggtggtcatcctcgtattattactggtagctggtgctttgactgccttacttcccagtgttaaagaagacaagatgctcatgttgcgtagggaaataaaatcccagggcaagtccaccatggactcctttactctcataatgcagacgtacaacagaacagatctcttattgaaacttttaaatcattatcaggctgtaccaaatctgcacaaagtgattgtggtatggaacaatattggagagaaggcaccagatgaattatggaattctctagggccccaccctatccctgtgatcttcaaacaacagacagcaaacaggatgagaaatcgactccaggtctttcctgaactggaaaccaatgcagtgttgatggtagatgatgacacactcatcagcaccccagaccttgtttttgctttctcagtttggcagcaatttcctgatcaaattgtaggatttgttcctagaaagcacgtctctacttcatcaggtatctacagttatggaagttttgaaatgcaagcaccagggtctggaaatggtgaccagtactctatggtgctgattggagcctcattcttcaatagcaaatatcttgaattatttcagaggcaacctgcagctgtccatgctttgatagatgatactcaaaactgtgatgatattgccatgaattttatcattgccaagcatattggcaagacttcagggatatttgtgaagcctgtaaacatggacaatttggaaaaagaaaccaacagtggctattctggaatgtggcatcgagctgagcacgctctgcagaggtcttattgtataaataagcttgttaatatctatgatagcatgcccttaagatactccaacattatgatttcccagtttggttttccatatgccaactacaaaagaaaaatataaaagtaaaacaaacaaaaacaaacctgaaaactgcttggcatttgagtagcttctccatgctatgtatttttttaagcaacatcatgaattttatctactccagaagtctctacaatagaaaaaaaagtgcagtgcttctaggatataaaattcacattacttttgaaagccaagaagttggtcttatccagttaggtcttcttatgaagagttttcatccagggatataactccttggtcagtgattttattgtttacatcctgagactgttctacagtttctttgactcctggcatttgccttaaggacctatagcaagctgtttctaggatcagaaactcaagagaggcatttctctgctttttcactaaaggtcagttgttttaatttgaaacctgaaatgcctctttagcaaaagcctgtggtatggggtaaagccatgtaagaagagaatagtctcagtcacatatgaagaggaaaatttgcagctgccagtgctttccttgtggccctgccaaccagctcttccaggacgaactcagtccagcatggttttgatgtaaccatccatgcttttatttttgttaagtcttttgtgactgggacagttaattttagtagctgaagaacgtctagttgtttgcttgatatttgtgaacatttactgcatggatcacaaaacaatataccctgtatttcttacacgccacttatatgcagcaaggagtaaatgtgttactagattcgggtagtgcattttgtcactgaatctgaccttgagaatgtacattaattcttatattttacataatgtatgtgttgtttaagaaatgtataaaaaacctgaaaaaaatgagtaagaactggcagaagttaaaaccctttgtatcaaaagatctttattggtagagcactggttatcttctggatactaaaaagttgtattacaaagccaaacacttgcattcacaactttaaaaaaagatccaaggaactattcataatgatgaaatttcaactacatacaaggaggagaaaataagaacccagtcataacagaggaattctataggagtctgcatcaattcattcttaaggttgcctactctctgttatgtgaattagcgtctgtgtttcacccattgtctgtgtttagtccttgttcaccactaaggcaaggaattcttaactaggcctctgtttaccaacttctctttctcctcctttccctcttattcctccttctcctcttccttcttatataatgctagtatattctcaaaattgcaaagctgtgagaatattaaaataatcatggctaatgttccaataatgaggtctttgtgcatttagttccgcatatgatggttttttttttacattaaagagtatatgtgtcttaatgcagtcagattgtaaaaaacaaaaacaaagaaactaagaatcttactaaaaatcgataatgtcagttatctgttttgtccaatattggtagtacttttttgcctcttatgattcctctagcagataaataaaagaaacttttgccatcca

SEQ ID NO: 131635 - DNA, 3985 bp, Homo sapiens
  Payload ID: 5692
  Gene Symbol: EXTL2
  Gene Name: exostosin-like glycosyltransferase 2
  Uniprot ID: Q9UBQ6
  ENST ID: ENST00000370114
  CDS Start-End: 1438-2430
gggcgggatgagaaaggtgctggagctgttggagggacgccaggaggtggcaactaccagggggtgtgaggggctgacctgggatggaatcctgccacccggactcaggaagaaaatcctgaggtggcgacctgcagactgggctgggagatggagagcccgctcacgcccacccgaccgcctaccaccagtgttcccggatgcatgggctccagcgcctgccctttcgccatttcctcccaactggcattaaatcctggtgtggtagatatcagtgattaagagtctaggcagccacgtgttctattgccgccagtccgcaggaaacgcaagtgatcgttttgctgcgttaactctatgggcgcccaaatcttaggaatccattccacgccaccccgaaaacagcgcttgacccttctggactgccacgcaggaggcgatcaatgtttttctttctttatttttttaagagacaaggtctcgccctgtcacctaggctggagcacaatgaggctcactacagcctggaactcccggacgcaagtgatcctcctcagcctccggagtagctgagacctcaggcgtgcgccaccatgcctggcatcaatcaatgtctttcaaaataaaggctgttaaacgtagtataggaaagaagctttttaatggtaggttctaccagacgtgtttgtttgatttttaggtttggttaatgcattgtttcccgtacaatctcaacccgcggaaaccccgaaactctagaattcgtgccggtctctttcgcttccaggtcatccccggggcaacggccgccgctctaattcttgtcagaacctccaggccagtttcagcaacgtgcaggcagaagctggcccctcggtgggatgcgagggcgtgtggagcgcggggaggagagccccacaggcctttcctgggcacccgcggtggatgggaaggctccttcgggcgcctttcagggaagttgtttggctgagggaaggtggtccgtcacgtgaatgtttaaaagttgttaccttggagaagaaatggaggaaaggattggctttcggaggtgggctggaaactacaaaaccgagcttcctgggaatgccttttaggccgacaggaagtggagcgtcaccgaaagggaggggcggccactcggggactgtcccttgctccaggcgctcactttgcgggcggcactttttccaggttgttaatccagctaatggagaaggatagatgcacgctacttggtttagaaaaaaaaacaaaaatgagcaaacgagacgccccttccgttttatgataactaagctgcagggaaataaatcggctggccctactgcaatctactgcactcgagtgacaagtgagcctgcttctgtcaattactgaagctataaggagattttttaaaaattaaacttcaacacaatgaggtgttgccacatctgcaaacttcctgggagagtaatggggattcgagtgcttcgattatctttggtggtcatcctcgtattattactggtagctggtgctttgactgccttacttcccagtgttaaagaagacaagatgctcatgttgcgtagggaaataaaatcccagggcaagtccaccatggactcctttactctcataatgcagacgtacaacagaacagatctcttattgaaacttttaaatcattatcaggctgtaccaaatctgcacaaagtgattgtggtatggaacaatattggagagaaggcaccagatgaattatggaattctctagggccccaccctatccctgtgatcttcaaacaacagacagcaaacaggatgagaaatcgactccaggtctttcctgaactggaaaccaatgcagtgttgatggtagatgatgacacactcatcagcaccccagaccttgtttttgctttctcagtttggcagcaatttcctgatcaaattgtaggatttgttcctagaaagcacgtctctacttcatcaggtatctacagttatggaagttttgaaatgcaagcaccagggtctggaaatggtgaccagtactctatggtgctgattggagcctcattcttcaatagcaaatatcttgaattatttcagaggcaacctgcagctgtccatgctttgatagatgatactcaaaactgtgatgatattgccatgaattttatcattgccaagcatattggcaagacttcagggatatttgtgaagcctgtaaacatggacaatttggaaaaagaaaccaacagtggctattctggaatgtggcatcgagctgagcacgctctgcagaggtcttattgtataaataagcttgttaatatctatgatagcatgcccttaagatactccaacattatgatttcccagtttggttttccatatgccaactacaaaagaaaaatataaaagtaaaacaaacaaaaacaaacctgaaaactgcttggcatttgagtagcttctccatgctatgtatttttttaagcaacatcatgaattttatctactccagaagtctctacaatagaaaaaaaagtgcagtgcttctaggatataaaattcacattacttttgaaagccaagaagttggtcttatccagttaggtcttcttatgaagagttttcatccagggatataactccttggtcagtgattttattgtttacatcctgagactgttctacagtttctttgactcctggcatttgccttaaggacctatagcaagctgtttctaggatcagaaactcaagagaggcatttctctgctttttcactaaaggtcagttgttttaatttgaaacctgaaatgcctctttagcaaaagcctgtggtatggggtaaagccatgtaagaagagaatagtctcagtcacatatgaagaggaaaatttgcagctgccagtgctttccttgtggccctgccaaccagctcttccaggacgaactcagtccagcatggttttgatgtaaccatccatgcttttatttttgttaagtcttttgtgactgggacagttaattttagtagctgaagaacgtctagttgtttgcttgatatttgtgaacatttactgcatggatcacaaaacaatataccctgtatttcttacacgccacttatatgcagcaaggagtaaatgtgttactagattcgggtagtgcattttgtcactgaatctgaccttgagaatgtacattaattcttatattttacataatgtatgtgttgtttaagaaatgtataaaaaacctgaaaaaaatgagtaagaactggcagaagttaaaaccctttgtatcaaaagatctttattggtagagcactggttatcttctggatactaaaaagttgtattacaaagccaaacacttgcattcacaactttaaaaaaagatccaaggaactattcataatgatgaaatttcaactacatacaaggaggagaaaataagaacccagtcataacagaggaattctataggagtctgcatcaattcattcttaaggttgcctactctctgttatgtgaattagcgtctgtgtttcacccattgtctgtgtttagtccttgttcaccactaaggcaaggaattcttaactaggcctctgtttaccaacttctctttctcctcctttccctcttattcctccttctcctcttccttcttatataatgctagtatattctcaaaattgcaaagctgtgagaatattaaaataatcatggctaatgttccaataatgaggtctttgtgcatttagttccgcatatgatggttttttttttacattaaagagtatatgtgtcttaatgcagtcagattgtaaaaaacaaaaacaaagaaactaagaatcttactaaaaatcgataatgtcagttatctgttttgtccaatattggtagtacttttttgcctcttatgattcctctagcagataaataaaagaaacttttgccatcca

SEQ ID NO: 131636 - DNA, 730 bp, Homo sapiens
  Payload ID: 5692
  Gene Symbol: EXTL2
  Gene Name: exostosin-like glycosyltransferase 2
  ENST ID: ENST00000416479
  CDS Start-End: 380-730
actttgcgggcggcactttttccaggttgttaatccagctaatggagaaggatagatgcacgctacttggtttagaaaaaaaaacaaaaatgagcaaacgagacgccccttccgttttatgataactaagctgcagggaaataaatcggctggccctactgcaatctactgcactcgagaaacatcacagaaaattctttgatttatcttaatagtgacaagtgagcctgcttctgtcaattactgaagctataaggagattttttaaaaattaaacttcaacacaatgagaacctggaacagtggtggcacaaagtaagtgctcaggaactatctgttgaatgagtgttgccacatctgcaaacttcctgggagagtaatggggattcgagtgcttcgattatctttggtggtcatcctcgtattattactggtagctggtgctttgactgccttacttcccagtgttaaagaagacaagatgctcatgttgcgtagggaaataaaatcccagggcaagtccaccatggactcctttactctcataatgcagacgtacaacagaacagatctcttattgaaacttttaaatcattatcaggctgtaccaaatctgcacaaagtgattgtggtatggaacaatattggagagaaggcaccagatgaattatggaattctctagggccccaccctatccctgtgatcttcaaacaacagacagcaaacagg

SEQ ID NO: 131637 - DNA, 902 bp, Homo sapiens
  Payload ID: 5692
  Gene Symbol: EXTL2
  Gene Name: exostosin-like glycosyltransferase 2
  ENST ID: ENST00000450240
  CDS Start-End: 104-902
ggctggccctactgcaatctactgcactcgagtgacaagtgagcctgcttctgtcaattactgaagctataaggagattttttaaaaattaaacttcaacacaatgagaacctggaacagtggtggcacaaagtgttgccacatctgcaaacttcctgggagagtaatggggattcgagtgcttcgattatctttggtggtcatcctcgtattattactggtagctggtgctttgactgccttacttcccagtgttaaagaagacaagatgctcatgttgcgtagggaaataaaatcccagggcaagtccaccatggactcctttactctcataatgcagacgtacaacagaacagatctcttattgaaacttttaaatcattatcaggctgtaccaaatctgcacaaagtgattgtggtatggaacaatattggagagaaggcaccagatgaattatggaattctctagggccccaccctatccctgtgatcttcaaacaacagacagcaaacaggatgagaaatcgactccaggtctttcctgaactggaaaccaatgcagtgttgatggtagatgatgacacactcatcagcaccccagaccttgtttttgctttctcagtttggcagcaatttcctgatcaaattgtaggatttgttcctagaaagcacgtctctacttcatcaggtatctacagttatggaagttttgaaatgcaagcaccagggtctggaaatggtgaccagtactctatggtgctgattggagcctcattcttcaatagcaaatatcttgaattatttcagaggcaacctgcagctgtccatgctttgatagatgatactcaaaactgtgatgatattgccatgaattttatcattgccaagcatattggcaaga

SEQ ID NO: 131638 - DNA, 3146 bp, Homo sapiens
  Payload ID: 5692
  Gene Symbol: EXTL2
  Gene Name: exostosin-like glycosyltransferase 2
  ENST ID: ENST00000535414
  CDS Start-End: 655-1098
tcttgtcagaacctccaggccagtttcagcaacgtgcaggcagaagctggcccctcggtgggatgcgagggcgtgtggagcgcggggaggagagccccacaggcctttcctgggcacccgcggtggatgggaaggctccttcgggcgcctttcagggaagttgtttggctgagggaaggtggtccgtcacgtgaatgtttaaaagttgttaccttggagaagaaatggaggaaaggattggctttcggaggtgggctggaaactacaaaaccgagcttcctgggaatgccttttaggccgacaggaagtggagcgtcaccgaaagggaggggcggccactcggggactgtcccttgctccaggcgctcactttgcgggcggcactttttccaggttgttaatccagctaatggagaaggatagatgcacgctacttggtttagaaaaaaaaacaaaaatgagcaaacgagacgccccttccgttttatgataactaagctgcagggaaataaatcggctggccctactgcaatctactgcactcgagaaacatcacagaaaattctttgatttatcttaatagtgacaagtgagcctgcttctgtcaattactgaagctataaggagattttttaaaaattaaacttcaacacaatgaggtgttgccacatctgcaaacttcctgggagagtaatggggattcgagtgcttcgattatctttggtggtcatcctcgtattattactggtagctggtgctttgactgccttacttcccagtgttaaagaagacaagatgctcatgttgcgtagggaaataaaatcccagggcaagtccaccatggactcctttactctcataatgcagacgtacaacagaacagatctcttattgaaacttttaaatcattatcaggctgtaccaaatctgcacaaagtgattgtggtatggaacaatattggagagaaggcaccagatgaattatggaattctctagggccccaccctatccctgtgatcttcaaacaacagacagcaaacaggatgagaaatcgactccaggtctttcctgaactggaaaccaatgcaatttcctgatcaaattgtaggatttgttcctagaaagcacgtctctacttcatcaggtatctacagttatggaagttttgaaatgcaagcaccagggtctggaaatggtgaccagtactctatggtgctgattggagcctcattcttcaatagcaaatatcttgaattatttcagaggcaacctgcagctgtccatgctttgatagatgatactcaaaactgtgatgatattgccatgaattttatcattgccaagcatattggcaagacttcagggatatttgtgaagcctgtaaacatggacaatttggaaaaagaaaccaacagtggctattctggaatgtggcatcgagctgagcacgctctgcagaggtcttattgtataaataagcttgttaatatctatgatagcatgcccttaagatactccaacattatgatttcccagtttggttttccatatgccaactacaaaagaaaaatataaaagtaaaacaaacaaaaacaaacctgaaaactgcttggcatttgagtagcttctccatgctatgtatttttttaagcaacatcatgaattttatctactccagaagtctctacaatagaaaaaaaagtgcagtgcttctaggatataaaattcacattacttttgaaagccaagaagttggtcttatccagttaggtcttcttatgaagagttttcatccagggatataactccttggtcagtgattttattgtttacatcctgagactgttctacagtttctttgactcctggcatttgccttaaggacctatagcaagctgtttctaggatcagaaactcaagagaggcatttctctgctttttcactaaaggtcagttgttttaatttgaaacctgaaatgcctctttagcaaaagcctgtggtatggggtaaagccatgtaagaagagaatagtctcagtcacatatgaagaggaaaatttgcagctgccagtgctttccttgtggccctgccaaccagctcttccaggacgaactcagtccagcatggttttgatgtaaccatccatgcttttatttttgttaagtcttttgtgactgggacagttaattttagtagctgaagaacgtctagttgtttgcttgatatttgtgaacatttactgcatggatcacaaaacaatataccctgtatttcttacacgccacttatatgcagcaaggagtaaatgtgttactagattcgggtagtgcattttgtcactgaatctgaccttgagaatgtacattaattcttatattttacataatgtatgtgttgtttaagaaatgtataaaaaacctgaaaaaaatgagtaagaactggcagaagttaaaaccctttgtatcaaaagatctttattggtagagcactggttatcttctggatactaaaaagttgtattacaaagccaaacacttgcattcacaactttaaaaaaagatccaaggaactattcataatgatgaaatttcaactacatacaaggaggagaaaataagaacccagtcataacagaggaattctataggagtctgcatcaattcattcttaaggttgcctactctctgttatgtgaattagcgtctgtgtttcacccattgtctgtgtttagtccttgttcaccactaaggcaaggaattcttaactaggcctctgtttaccaacttctctttctcctcctttccctcttattcctccttctcctcttccttcttatataatgctagtatattctcaaaattgcaaagctgtgagaatattaaaataatcatggctaatgttccaataatgaggtctttgtgcatttagttccgcatatgatggttttttttttacattaaagagtatatgtgtcttaatgcagtcagattgtaaaaaacaaaaacaaagaaactaagaatcttactaaaaatcgataatgtcagttatctgttttgtccaatattggtagtacttttttgcctcttatgattcctctagcagataaataaaagaaacttttgccatccatgtgttctgtgttaa

SEQ ID NO: 131639 - DNA, 6483 bp, Homo sapiens
  Payload ID: 5693
  Gene Symbol: EXTL3
  Gene Name:: exostosin-like glycosyltransferase 3
  Uniprot ID: O43909
  ENST ID: ENST00000220562
  CDS Start-End: 903-3662
acaatccccggcgcccggccccgcgcccctgacccgggtgtcaccgcggagctgcgggaggcctcggcggtcttcggacgcggtcgggaaagtggcgagcgcgcgcccgcgtccgcgcccccgctcgcgaacgccggcttcggccatttccggcgcggcgcccttcggcaagttccgcagtcgcctgtcggaaatggctgccggccggcagggggagcggcggatcaggcgcggcctggaaggcgggcggccggcagccagaacggcttctgggacgccgactttcgcgcaggcggcggcggcggcggcggcgggtccctgagctggaagccggagagcaagccctggaggttcactctttcaagaagtcgtgtgctgaggtgtaatgctacacaagtcagaggaaggaagggtcctgaaacacatggcctgattgttggcaaaggcatcataagaagctggcatttatttctgttctaacctattactgtataactgtgaatagacactatgcatatttgttggtcagcaaaaccaagaaacaagagctatggcatttgaaaaagtctgtctgattccagggtgtttttcctgggtttcatcatcaggtacctcctccctttcatctcagcaagaatgtggcaccttttatcgtttgataaagattaaggacatgttctttggtcaacagccagaacttaaaatctgctggaatagggtcagagaccatttcagctgcagctgaggaaaatgaaatgttcattttatttggtgccttgtctggggagcacactaactcttctggaaacgtgtcagtgaaacagagatcgttttgtggaatagcaacccatggttatggcgagtgacccgacgtgatctggggggcaggctgcagaggactcatgacaggctataccatgctgcggaatgggggcgcggggaacggaggtcagacctgcatgctgcgctggtccaaccgcatccgcctcacgtggctcagcttcacgctctttgtcatcctggtcttcttcccgctcatcgcccactattacctcaccactctggatgaggctgatgaggcaggcaagcggatttttggtccccgggtggggaacgagctgtgcgaggtgaagcacgtgctggatctgtgccgcatccgggagtcggtgagtgaagagctcctgcagctggaggccaagcgccaagagctgaacagcgagatcgccaagctgaatctgaagatcgaagcctgtaagaagagcattgagaacgccaagcaggacctgctccagctcaagaatgtcatcagccagaccgagcattcctacaaggagctcatggcccagaaccagcccaagctgtccctgcccatccgactgctcccagagaaggacgatgccggcctccctcccccgaaggccactcggggctgccggctacacaactgctttgattattctcgttgccctctcacctctggcttcccggtctacgtctatgacagtgaccagtttgtctttggcagctacctggatcccttggtcaagcaggcttttcaggcgacagcacgagctaacgtttatgttacagaaaatgcagacatcgcctgcctttacgtgatactagtgggagagatgcaggagccggtggtgctgcggcctgctgagctggagaagcagttgtattccctgccacactggcggacggatggacacaaccatgtcatcatcaatctgtcacgtaagtcagatacacagaaccttctctataacgtcagtactggccgtgccatggtggcccagtccaccttctacactgtccagtacagacctggctttgacttggtcgtatcaccgctggtccatgccatgtctgagcccaacttcatggaaatcccaccacaggtgccggtgaagcggaaatatctcttcaccttccagggcgagaagattgagtctctgaggtctagccttcaggaggcccgctccttcgaagaggaaatggagggcgaccctcccgccgactacgatgaccggatcattgccaccctgaaggcggtgcaggacagcaagctggatcaggtcctggtggaattcacctgcaaaaaccagcccaaacccagcctgccgactgagtgggcactgtgtggagagcgggaggaccgcttggaattgctgaagctctccaccttcgccctcatcattacccccggggaccctcgcttggttatttcctctgggtgtgcaacacggctcttcgaagccctggaagtcggtgccgtcccggtggtgctgggggagcaggtccagcttccctaccaggacatgctgcagtggaacgaggcggccctggtggtgccaaagcctcgtgttaccgaggttcatttcctgctcagaagcctctccgatagtgacctcctggctatgaggcggcaaggccgctttctctgggagacttacttctccactgctgacagtatttttaataccgtgctggctatgattaggactcgcatccagatcccagccgctcccatccgggaagaggcggcagctgagatcccccaccgttcaggcaaggcggctggaactgaccccaacatggctgacaacggggacctggacctggggccagtggagacggagccgccctacgcctcacccagatacctccgcaatttcactctgactgtcactgacttttaccgcagctggaactgtgctccagggcctttccatcttttcccccacactccctttgaccctgtgttgccctcagaggccaaattcttgggctcagggactggctttcggcctattggtggtggagctgggggttctggcaaggaatttcaggcagcgcttggaggcaatgttccccgagagcagttcacggtggtgatgttgacttatgagcgggaggaagtgcttatgaactctttagagaggctgaatggcctcccttacctgaacaaggtcgtggtggtgtggaattctcccaagctgccatcagaggaccttctgtggcctgacattggcgtccccatcatggtggtccgtactgagaagaacagtttgaacaaccgattcttaccctggaatgaaattgagacagaggccatcctgtccattgatgacgatgctcacctccgccatgacgaaatcatgtttgggttccgggtgtggagagaagctcgggaccgcatcgtgggcttccctggccgttaccacgcatgggacatcccccatcagtcctggctctacaactccaactactcctgtgagctgtccatggtgctgacaggtgctgccttctttcacaagtattatgcctacctgtattcttatgtgatgccccaggccatccgggacatggtggatgaatacatcaactgtgaggacattgccatgaacttccttgtctcccacatcactcggaagccccccatcaaggtgacctcacggtggacattccgatgcccaggatgccctcaggccctgtctcatgatgactcccacttccacgagcggcacaagtgcatcaacttcttcgtgaaggtgtacggctacatgcccctcctgtacacgcagttcagggtggattctgtgctcttcaagacacgcctgccccatgacaagaccaagtgcttcaagttcatctaggggcagcgcacggtctggggaagaggatgagcagagggaggaagatggctcccaaggttcctaggcattgcaggaccttgggcacatctgctggtgggtggcccagagcctctgctggaaggggcagcaggaggagtggaaggaaaccgctgcctttatcttgaagtcagccacactgggcctggagccctgggcggagtccccggggttccccacacagggcactgactgatagcttacactgaggactgtggcgactctgcagagtcactcacaccgttcgtacgcccaggacagctggttcgtggtttttacattcaataacaactattatgattatttaaaaagagaaagtttcagatttgccattcaaggcttatttatatatatgtgtgtgtatataaatacatgcacacacttgcatacatatatatttttggctgggggagtgtgagttttgcctttctaagggagggaccgcgcaggctcctttgttctgtattctggcggagatgggtcctggccttgtgtcactggcttatccttaaagatcatctcccatcctccccagcgccatctgtgtgcagcaaccagaaagggatgaacttggccctcttgcgggcctggacaaggtctcttccttaccctttctgttgccagtcagcaacctgtaactcacattctcttcccagtgaatccctgggagcgcctgaccctggtgggctgttcagcttcctgctgctggggccagcgatttttgaggatttatctttaggccaggcttgcctccgtacttatccctgctctcccatttctctcttgtttgagagagaatgaggaagcaaagagtgagaaagaataggggctgaagacgccactcccagatggctctttctatcctgctcttctgttgaaacacacgtgctgtgggcctcaggcgtttctgaagtgctctttcttggattggacaggagatcagcagcgtgcacatctgctgtggtctgaagtggtttgcaggtcagcctcctctccctagtgtagagcaagccagtgtccttcgaggaacccacccggctggccgggaagttttacagcaaggcgcctgccttgggataattccttggtgaaattcaccttccccccgcctctgtctggagccccatcctgtgttatctgtggtttttggacccctaatgtcagcttggctgtaggactccccgaggtttggtatgtgctagaacaatgggaggctgtgatttgctgtgtaagctcacatccagccttggaatctaacgggcattcacaacccgagttaccactttccactccctgcttaggattctgttccctgggctgaaactgaaataagctaattttttgggtcacggtggcagtaggggaacctaggagggtgtgagtggcatttgtcagggatttagcccatgacgtgtttcttgaaccctactttctggaagtggagttgactctggaagttttctagcaactgaacaaaagctcaggtttgtcctggtcatgcacatgccttaagccagttccgtcttccctagaccttggcatcctgtgcttctatttcttggaatacgttctcctctgacctgcctgtaccacgtgggtcctcttcaagtactgttttgaagctgggctcttttgtgtagctcccacccacctgtagggctagctcggcttaagggaactctccccattggcaaaccggacccggccgccgccaggactgtgtttccaaaggttccccgcccccaaccccagcatcagcctgtagctcccctgctgaggcagtgtggttatgttcccagcagtgggggtcagacgcccttcctcagaactttctagttgccctctacctgactcctgacttgtattccttttagcagtagccttcttccctcggggagccaaagagtgtggtgtgtggcgctatattgtggctgctatttcatctggtttcttttaatgtgaggaactcacatactgacttcagtgggactcggtgagccggggccgtctgtgtggtgggaccccctttagcgggactcagtgagctggggccgtctgtgtggtggagccagggcctctccctttagtggagccaggttgtcgggccccgaatgtcactggtggatctaagaagggctgagtggtctgacaccaaaacatgccgcagggagggctgtggtgccggtgcttccaacaaggacagccctccttgaccctgaaaggaacactggcttgaaggactgcagacaggctctgaggggcacgccctcctcagcgagaggcagcaaggtggccacagtgtcactggtcaggtgcttctcaccacgggaaagccgccgacctgtgactcgcttgagatgggaaagcggcgccacagaccccgggtctccttggctgtctgtgggccgcccctggccaccttgtcctggctcgcagggtgcaggagcgcctcgttctctgggtggccggcttgctgctccggtttgggctgtcttaccataacaccgtcccagggctctgcaggccactgtgagcgctggctccctgggcagtgctcctccgtgtggactgtgcctcaggccagggctcaccagctggggtcctgtccggaaggatgggatctttctgggagctgcgccggacagagtggggagctcctagtttgtggggggaagctttgatatccatgccacgtccatccaccccaccccttttcgtcacgagcacaatggtcttacattggatttttgtaaaaaaataaaaataaatggagactttaactcaa

SEQ ID NO: 131640 - DNA, 565 bp, Homo sapiens
  Payload ID: 5693
  Gene Symbol: EXTL3
  Gene Name: exostosin-like glycosyltransferase 3
  ENST ID: ENST00000522698
  CDS Start-End: 1-227
acctggatcccttggtcaagcaggcttttcaggcgacagcacgagctaacgtttatgttacagaaaatgcagacatcgcctgcctttacgtgatactagtgggagagatgcaggagccggtggtgctgcggcctgctgagctggagaagcagttgtattccctgccacactggcggacggatggacacaaccatgtcatcatcaatctgtcacgtggtccgtactgagaagaacagtttgaacaaccgattcttaccctggaatgaaattgagacagaggccatcctgtccattgatgacgatgctcacctccgccatgacgaaatcatgtttgggttccgggtgtggagagaagctcgggaccgcatcgtgggcttccctggccgttaccacgcatgggacatcccccatcagtcctggctctacaactccaactactcctgtgagctgtccatggtgctgacaggtgctgccttctttcacaagtattatgcctacctgtattcttatgtgatgccccaggccatccgggacatggtggatgaatacatcaactgtgaggaca

SEQ ID NO: 131641 - DNA, 1779 bp, Homo sapiens
  Payload ID: 5693
  Gene Symbol: EXTL3
  Gene Name: exostosin-like glycosyltransferase 3
  ENST ID: ENST00000523149
  CDS Start-End: 135-1742
agagggcggggccgggccgctggcgctgtcgccggctgcagtggccgccgctggagaccgcgggacctggcgctgcagcgaggagagcaagccctggaggttcactctttcaagaagtcgtgtgctgaggtgtaatgctacacaagtcagaggaaggaagggtcctggtggaattcacctgcaaaaaccagcccaaacccagcctgccgactgagtgggcactgtgtggagagcgggaggaccgcttggaattgctgaagctctccaccttcgccctcatcattacccccggggaccctcgcttggttatttcctctgggtgtgcaacacggctcttcgaagccctggaagtcggtgccgtcccggtggtgctgggggagcaggtccagcttccctaccaggacatgctgcagtggaacgaggcggccctggtggtgccaaagcctcgtgttaccgaggttcatttcctgctcagaagcctctccgatagtgacctcctggctatgaggcggcaaggccgctttctctgggagacttacttctccactgctgacagtatttttaataccgtgctggctatgattaggactcgcatccagatcccagccgctcccatccgggaagaggcggcagctgagatcccccaccgttcaggcaaggcggctggaactgaccccaacatggctgacaacggggacctggacctggggccagtggagacggagccgccctacgcctcacccagatacctccgcaatttcactctgactgtcactgacttttaccgcagctggaactgtgctccagggcctttccatcttttcccccacactccctttgaccctgtgttgccctcagaggccaaattcttgggctcagggactggctttcggcctattggtggtggagctgggggttctggcaaggaatttcaggcagcgcttggaggcaatgttccccgagagcagttcacggtggtgatgttgacttatgagcgggaggaagtgcttatgaactctttagagaggctgaatggcctcccttacctgaacaaggtcgtggtggtgtggaattctcccaagctgccatcagaggaccttctgtggcctgacattggcgtccccatcatggtggtccgtactgagaagaacagtttgaacaaccgattcttaccctggaatgaaattgagacagaggccatcctgtccattgatgacgatgctcacctccgccatgacgaaatcatgtttgggttccgggtgtggagagaagctcgggaccgcatcgtgggcttccctggccgttaccacgcatgggacatcccccatcagtcctggctctacaactccaactactcctgtgagctgtccatggtgctgacaggtgctgccttctttcacaagtattatgcctacctgtattcttatgtgatgccccaggccatccgggacatggtggatgaatacatcaactgtgaggacattgccatgaacttccttgtctcccacatcactcggaagccccccatcaaggtgacctcacggtggacattccgatgcccaggatgccctcaggccctgtctcatgatgactcccacttccacgagcggcacaagtgcatcaacttcttcgtgaaggtgtacggctacatgcccctcctgtacacgcagttcagggtggattctgtgctcttcaagacacgcctgccccatgacaagaccaagtgcttcaagttcatctaggggcagcgcacggtctggggaagaggatgagcagagg

SEQ ID NO: 131642 - DNA, 601 bp, Homo sapiens
  Payload ID: 5693
  Gene Symbol: EXTL3
  Gene Name: exostosin-like glycosyltransferase 3
  ENST ID: ENST00000521473
  CDS Start-End: 1-601
gttgacttatgagcgggaggaagtgcttatgaactctttagagaggctgaatggcctcccttacctgaacaaggtcgtggtggtgtggaattctcccaagctgccatcagaggaccttctgtggcctgacattggcgtccccatcatggtggtccgtactgagaagaacagtttgaacaaccgattcttaccctggaatgaaattgagacagaggccatcctgtccattgatgacgatgctcacctccgccatgacgaaatcatgtttgggttccgggtgtggagagaagctcgggaccgcatcgtgggcttccctggccgttaccacgcatgggacatcccccatcagtcctggctctacaactccaactactcctgtgagctgtccatggtgctgacaggtgctgccttctttcacaaggtgacctcacggtggacattccgatgcccaggatgccctcaggccctgtctcatgatgactcccacttccacgagcggcacaagtgcatcaacttcttcgtgaaggtgtacggctacatgcccctcctgtacacgcagttcagggtggattctgtgctcttcaagacacgcctgccccat

SEQ ID NO: 131643 - DNA, 529 bp, Homo sapiens
  Payload ID: 5693
  Gene Symbol: EXTL3
  Gene Name: exostosin-like glycosyltransferase 3
  ENST ID: ENST00000517738
  CDS Start-End: 174-529
agagctccttggaaaccattcataaatttaagtcctcggatgcagttaattcatgccaggtggtccgtactgagaagaacagtttgaacaaccgattcttaccctggaatgaaattgagacagaggccatcctgtccattgatgacgatgctcacctccgccatgacgaaatcatgtttgggttccgggtgtggagagaagctcgggaccgcatcgtgggcttccctggccgttaccacgcatgggacatcccccatcagtcctggctctacaactccaactactcctgtgagctgtccatggtgctgacaggtgctgccttctttcacaagtattatgcctacctgtattcttatgtgatgccccaggccatccgggacatggtggatgaatacatcaactgtgaggacattgccatgaacttccttgtctcccacatcactcggaagccccccatcaaggtgacctcacggtggacattccgatgcccaggatgccctcaggccctgtctcatgatgactcccactt

SEQ ID NO: 131644 - DNA, 517 bp, Homo sapiens
  Payload ID: 5693
  Gene Symbol: EXTL3
  Gene Name: exostosin-like glycosyltransferase 3
  ENST ID: ENST00000521532
  CDS Start-End: 105-517
agctacatttggggagtggtgaaaaggggtcagagaaagagaagcaggagaggacatgggcaggaagtgtaaaatgcagactgacttaatatgaggtgcacagcatgggtgagaacgcaagacactttgataggagaaatgaaggtgtggtccgtactgagaagaacagtttgaacaaccgattcttaccctggaatgaaattgagacagaggccatcctgtccattgatgacgatgctcacctccgccatgacgaaatcatgtttgggttccgggtgtggagagaagctcgggaccgcatcgtgggcttccctggccgttaccacgcatgggacatcccccatcagtcctggctctacaactccaactactcctgtgagctgtccatggtgctgacaggtgctgccttctttcacaagtattatgcctacctgtattcttatgtgatgccccaggccatccgggacatggtggatgaatacatcaactgtgaggacattgccatgaacttccttgt

SEQ ID NO: 131645 - DNA, 4915 bp, Homo sapiens
  Payload ID: 5694
  Gene Symbol: XPO1
  Gene Name: exportin 1
  Uniprot ID: O14980
  ENST ID: ENST00000401558
  CDS Start-End: 729-3944
caaccggttccgagtttgaggcactaggaggagggggagaagcggctgcagcggccgcggcaggagcagcgggagctacagcatcagcaagagcaacagtagctacagccccggcggcggtgcctgttccagtctttgctgctgcagtccgtgcaaccacccagagggggaggggggaaccaccagtcgctgaggaacaagagaaggggggaaagtttaggcgagccttgggggggggggggccagcgccggagccgcgtgagagagggagccgtgttttggtaggggggagtcggactgcaactggcagcagagcgtctccccggccgtgtggactctacaccccctactcctgccgcttctgctgctgcctgtggctggagggtccccctggggctgaatctttgggacttgaccccgttccctcccccttccctcactccccagccgggcgggagcatttattccccagattaattccccttttgggggggggcgggtgtgtgtgtgtgtgtgtgtgtgtgtgtgtgttgggggaagcgtccctgaaatagtaaatattattgagctctttttgcccttttcctgtccgtttttttaatttccttttttgaggtgggaaaactgaaacccaccttgattcgtcccctctcccccctccccaccttccctcgccctaatcccccaacgaggaaggaaggagcagttggttcaatctctggtaatctatgccagcaattatgacaatgttagcagaccatgcagctcgtcagctgcttgatttcagccaaaaactggatatcaacttattagataatgtggtgaattgcttataccatggagaaggagcccagcaaagaatggctcaagaagtactgacacatttaaaggagcatcctgatgcttggacaagagtcgacacaattttggaattttctcagaatatgaatacgaaatactatggactacaaattttggaaaatgtgataaaaacaaggtggaagattcttccaaggaaccagtgcgaaggaataaaaaaatacgttgttggcctcattatcaagacgtcatctgacccaacttgtgtagagaaagaaaaggtgtatatcggaaaattaaatatgatccttgttcagatactgaaacaagaatggcccaaacattggccaacttttatcagtgatattgttggagcaagtaggaccagcgaaagtctctgtcaaaataatatggtgattcttaaactcttgagtgaagaagtatttgatttctctagtggacagataacccaagtcaaatctaagcatttaaaagacagcatgtgcaatgaattctcacagatatttcaactgtgtcagtttgtaatggaaaattctcaaaatgctccacttgtacatgcaaccttggaaacattgctcagatttctgaactggattcccctgggatatatttttgagaccaaattaatcagcacattgatttataagttcctgaatgttccaatgtttcgaaatgtctctctgaagtgcctcactgagattgctggtgtgagtgtaagccaatatgaagaacaatttgtaacactatttactctgacaatgatgcaactaaagcagatgcttcctttaaataccaatattcgacttgcgtactcaaatggaaaagatgatgaacagaacttcattcaaaatctcagtttgtttctctgcacctttcttaaggaacatgatcaacttatagaaaaaagattaaatctcagggaaactcttatggaggcccttcattatatgttgttggtatctgaagtagaagaaactgaaatctttaaaatttgtcttgaatactggaatcatttggctgctgaactctatagagagagtccattctctacatctgcctctccgttgctttctggaagtcaacattttgatgttcctcccaggagacagctatatttgcccatgttattcaaggtccgtttattaatggttagtcgaatggctaaaccagaggaagtattggttgtagagaatgatcaaggagaagttgtgagagaattcatgaaggatacagattccataaatttgtataagaatatgagggaaacattggtttatcttactcatctggattatgtagatacagaaagaataatgacagagaagcttcacaatcaagtgaatggtacagagtggtcatggaaaaatttgaatacattgtgttgggcaataggctccattagtggagcaatgcatgaagaggacgaaaaacgatttcttgttactgttataaaggatctattaggattatgtgaacagaaaagaggcaaagataataaagctattattgcatcaaatatcatgtacatagtaggtcaatacccacgttttttgagagctcactggaaatttctgaagactgtagttaacaagctgttcgaattcatgcatgagacccatgatggagtccaggatatggcttgtgatactttcattaaaatagcccaaaaatgccgcaggcatttcgttcaggttcaggttggagaagtgatgccatttattgatgaaattttgaacaacattaacactattatttgtgatcttcagcctcaacaggttcatacgttttatgaagctgtggggtacatgattggtgcacaaacagatcaaacagtacaagaacacttgatagaaaagtacatgttactccctaatcaagtgtgggatagtataatccagcaggcaaccaaaaatgtggatatactgaaagatcctgaaacagtcaagcagcttggtagcattttgaaaacaaatgtgagagcctgcaaagctgttggacacccctttgtaattcagcttggaagaatttatttagatatgcttaatgtatacaagtgcctcagtgaaaatatttctgcagctatccaagctaatggtgaaatggttacaaagcaaccattgattagaagtatgcgaactgtaaaaagggaaactttaaagttaatatctggttgggtgagccgatccaatgatccacagatggtcgctgaaaattttgttccccctctgttggatgcagttctcattgattatcagagaaatgtcccagctgctagagaaccagaagtgcttagtactatggccataattgtcaacaagttagggggacatataacagctgaaatacctcaaatatttgatgctgtttttgaatgcacattgaatatgataaataaggactttgaagaatatcctgaacatagaacgaactttttcttactacttcaggctgtcaattctcattgtttcccagcattccttgctattccacctacacagtttaaacttgttttggattccatcatttgggctttcaaacatactatgaggaatgtcgcagatacgggcttacagatactttttacactcttacaaaatgttgcacaagaagaagctgcagctcagagtttttatcaaacttatttttgtgatattctccagcatatcttttctgttgtgacagacacttcacatactgctggtttaacaatgcatgcatcaattcttgcatatatgtttaatttggttgaagaaggaaaaataagtacatcattaaatcctggaaatccagttaacaaccaaatctttcttcaggaatatgtggctaatctccttaagtcggccttccctcacctacaagatgctcaagtaaagctctttgtgacagggcttttcagcttaaatcaagatattcctgctttcaaggaacatttaagagatttcctagttcaaataaaggaatttgcaggtgaagacacttctgatttgtttttggaagagagagaaatagccctacggcaggctgatgaagagaaacataaacgtcaaatgtctgtccctggcatctttaatccacatgagattccagaagaaatgtgtgattaaaatccaaattcatgctgttttttttctctgcaactcgttagcagaggaaaacagcatgtgggtatttgtcgaccaaaatgatgccaatttgtaaattaaaatgtcacctagtggccctttttcttatgtgtttttttgtataagaaattttctgtgaaatatccttccattgtttaagcttttgttttggtcatctttatttagtttgcatgaagttgaaaattaaggcatttttaaaaattttacttcatgcccatttttgtggctgggctggggggaggaggcaaattcgatttgaacatatacttgtaattctaatgcaaaattatacaatttttcctgtaaacaataccaatttttaattagggagcattttccttctagtctatttcagcctagaagaaaagataatgagtaaaacaaattgcgttgtttaaaggattatagtgctgcattgtctgaagttagcacctcttggactgaatcgtttgtctagactacatgtattacaaagtctctttggcaagattgcagcaagatcatgtgcatatcatcccattgtaaagcgacttcaaaaatatgggaacacagttagttatttttacacagttctttttgtttttgtgtgtgtgtgctgtcgcttgtcgacaacagctttttgttttcctcaatgaggagtgttgctcatttgtgagccttcattaactcgaagtgaaatggttaaaaatatttatcctgttagaataggctgcatctttttaacaactcattaaaaaacaaaacaactctggcttttgagatgacttatactaatttacattgtttaccaagctgtagtgctttaagaacactacttaaaaagcaaaataaacttggtttacatttatttttcctttattgactcatttattcctatattaatgatagtgggtatttgtgtttaagcatcaagtaacattttaaatgaagtt

SEQ ID NO: 131646 - DNA, 3479 bp, Homo sapiens
  Payload ID: 5694
  Gene Symbol: XPO1
  Gene Name: exportin 1
  Uniprot ID: O14980
  ENST ID: ENST00000406957
  CDS Start-End: 144-3359
ggagaagcggctgcagcggccgcggcaggagcagcgggagctacagcatcagcaagagcaacagtagctacagccccggcggcggtgcctgttccagtctttgctgctgcagaaggagcagttggttcaatctctggtaatctatgccagcaattatgacaatgttagcagaccatgcagctcgtcagctgcttgatttcagccaaaaactggatatcaacttattagataatgtggtgaattgcttataccatggagaaggagcccagcaaagaatggctcaagaagtactgacacatttaaaggagcatcctgatgcttggacaagagtcgacacaattttggaattttctcagaatatgaatacgaaatactatggactacaaattttggaaaatgtgataaaaacaaggtggaagattcttccaaggaaccagtgcgaaggaataaaaaaatacgttgttggcctcattatcaagacgtcatctgacccaacttgtgtagagaaagaaaaggtgtatatcggaaaattaaatatgatccttgttcagatactgaaacaagaatggcccaaacattggccaacttttatcagtgatattgttggagcaagtaggaccagcgaaagtctctgtcaaaataatatggtgattcttaaactcttgagtgaagaagtatttgatttctctagtggacagataacccaagtcaaatctaagcatttaaaagacagcatgtgcaatgaattctcacagatatttcaactgtgtcagtttgtaatggaaaattctcaaaatgctccacttgtacatgcaaccttggaaacattgctcagatttctgaactggattcccctgggatatatttttgagaccaaattaatcagcacattgatttataagttcctgaatgttccaatgtttcgaaatgtctctctgaagtgcctcactgagattgctggtgtgagtgtaagccaatatgaagaacaatttgtaacactatttactctgacaatgatgcaactaaagcagatgcttcctttaaataccaatattcgacttgcgtactcaaatggaaaagatgatgaacagaacttcattcaaaatctcagtttgtttctctgcacctttcttaaggaacatgatcaacttatagaaaaaagattaaatctcagggaaactcttatggaggcccttcattatatgttgttggtatctgaagtagaagaaactgaaatctttaaaatttgtcttgaatactggaatcatttggctgctgaactctatagagagagtccattctctacatctgcctctccgttgctttctggaagtcaacattttgatgttcctcccaggagacagctatatttgcccatgttattcaaggtccgtttattaatggttagtcgaatggctaaaccagaggaagtattggttgtagagaatgatcaaggagaagttgtgagagaattcatgaaggatacagattccataaatttgtataagaatatgagggaaacattggtttatcttactcatctggattatgtagatacagaaagaataatgacagagaagcttcacaatcaagtgaatggtacagagtggtcatggaaaaatttgaatacattgtgttgggcaataggctccattagtggagcaatgcatgaagaggacgaaaaacgatttcttgttactgttataaaggatctattaggattatgtgaacagaaaagaggcaaagataataaagctattattgcatcaaatatcatgtacatagtaggtcaatacccacgttttttgagagctcactggaaatttctgaagactgtagttaacaagctgttcgaattcatgcatgagacccatgatggagtccaggatatggcttgtgatactttcattaaaatagcccaaaaatgccgcaggcatttcgttcaggttcaggttggagaagtgatgccatttattgatgaaattttgaacaacattaacactattatttgtgatcttcagcctcaacaggttcatacgttttatgaagctgtggggtacatgattggtgcacaaacagatcaaacagtacaagaacacttgatagaaaagtacatgttactccctaatcaagtgtgggatagtataatccagcaggcaaccaaaaatgtggatatactgaaagatcctgaaacagtcaagcagcttggtagcattttgaaaacaaatgtgagagcctgcaaagctgttggacacccctttgtaattcagcttggaagaatttatttagatatgcttaatgtatacaagtgcctcagtgaaaatatttctgcagctatccaagctaatggtgaaatggttacaaagcaaccattgattagaagtatgcgaactgtaaaaagggaaactttaaagttaatatctggttgggtgagccgatccaatgatccacagatggtcgctgaaaattttgttccccctctgttggatgcagttctcattgattatcagagaaatgtcccagctgctagagaaccagaagtgcttagtactatggccataattgtcaacaagttagggggacatataacagctgaaatacctcaaatatttgatgctgtttttgaatgcacattgaatatgataaataaggactttgaagaatatcctgaacatagaacgaactttttcttactacttcaggctgtcaattctcattgtttcccagcattccttgctattccacctacacagtttaaacttgttttggattccatcatttgggctttcaaacatactatgaggaatgtcgcagatacgggcttacagatactttttacactcttacaaaatgttgcacaagaagaagctgcagctcagagtttttatcaaacttatttttgtgatattctccagcatatcttttctgttgtgacagacacttcacatactgctggtttaacaatgcatgcatcaattcttgcatatatgtttaatttggttgaagaaggaaaaataagtacatcattaaatcctggaaatccagttaacaaccaaatctttcttcaggaatatgtggctaatctccttaagtcggccttccctcacctacaagatgctcaagtaaagctctttgtgacagggcttttcagcttaaatcaagatattcctgctttcaaggaacatttaagagatttcctagttcaaataaaggaatttgcaggtgaagacacttctgatttgtttttggaagagagagaaatagccctacggcaggctgatgaagagaaacataaacgtcaaatgtctgtccctggcatctttaatccacatgagattccagaagaaatgtgtgattaaaatccaaattcatgctgttttttttctctgcaactcgttagcagaggaaaacagcatgtgggtatttgtcgaccaaaatgatgccaatttgtaaattaaaatgtcacctagtggcccttt

SEQ ID NO: 131647 - DNA, 4105 bp, Homo sapiens
  Payload ID: 5694
  Gene Symbol: XPO1
  Gene Name: exportin 1
  Uniprot ID: O14980
  ENST ID: ENST00000404992
  CDS Start-End: 408-3623
agcttgggatgggggagggaggggctgccgactccctgttcctccagcaaggaaactcgaaagctctccggttttgcagagtggcatgtgaagtaggaaagatcagtttttcaggggcctgcacatgggattccgtcttgtagttccttttcaggggtttgaatgtgataagttggttaaaccatttactgttggccttgtacagtggaggatgccctgattctccttcattccgatgtctgtgagtttgggttgggtgggaggaagtggtgtagtagaggaagcattcagtactggctcagcccggacctcctctgatcacgccgaggccatgctgcatagagaaaggggcggtgaacttaaggcgcctggtctaaatgcctcctccgagtaagggcgggtaatctatgccagcaattatgacaatgttagcagaccatgcagctcgtcagctgcttgatttcagccaaaaactggatatcaacttattagataatgtggtgaattgcttataccatggagaaggagcccagcaaagaatggctcaagaagtactgacacatttaaaggagcatcctgatgcttggacaagagtcgacacaattttggaattttctcagaatatgaatacgaaatactatggactacaaattttggaaaatgtgataaaaacaaggtggaagattcttccaaggaaccagtgcgaaggaataaaaaaatacgttgttggcctcattatcaagacgtcatctgacccaacttgtgtagagaaagaaaaggtgtatatcggaaaattaaatatgatccttgttcagatactgaaacaagaatggcccaaacattggccaacttttatcagtgatattgttggagcaagtaggaccagcgaaagtctctgtcaaaataatatggtgattcttaaactcttgagtgaagaagtatttgatttctctagtggacagataacccaagtcaaatctaagcatttaaaagacagcatgtgcaatgaattctcacagatatttcaactgtgtcagtttgtaatggaaaattctcaaaatgctccacttgtacatgcaaccttggaaacattgctcagatttctgaactggattcccctgggatatatttttgagaccaaattaatcagcacattgatttataagttcctgaatgttccaatgtttcgaaatgtctctctgaagtgcctcactgagattgctggtgtgagtgtaagccaatatgaagaacaatttgtaacactatttactctgacaatgatgcaactaaagcagatgcttcctttaaataccaatattcgacttgcgtactcaaatggaaaagatgatgaacagaacttcattcaaaatctcagtttgtttctctgcacctttcttaaggaacatgatcaacttatagaaaaaagattaaatctcagggaaactcttatggaggcccttcattatatgttgttggtatctgaagtagaagaaactgaaatctttaaaatttgtcttgaatactggaatcatttggctgctgaactctatagagagagtccattctctacatctgcctctccgttgctttctggaagtcaacattttgatgttcctcccaggagacagctatatttgcccatgttattcaaggtccgtttattaatggttagtcgaatggctaaaccagaggaagtattggttgtagagaatgatcaaggagaagttgtgagagaattcatgaaggatacagattccataaatttgtataagaatatgagggaaacattggtttatcttactcatctggattatgtagatacagaaagaataatgacagagaagcttcacaatcaagtgaatggtacagagtggtcatggaaaaatttgaatacattgtgttgggcaataggctccattagtggagcaatgcatgaagaggacgaaaaacgatttcttgttactgttataaaggatctattaggattatgtgaacagaaaagaggcaaagataataaagctattattgcatcaaatatcatgtacatagtaggtcaatacccacgttttttgagagctcactggaaatttctgaagactgtagttaacaagctgttcgaattcatgcatgagacccatgatggagtccaggatatggcttgtgatactttcattaaaatagcccaaaaatgccgcaggcatttcgttcaggttcaggttggagaagtgatgccatttattgatgaaattttgaacaacattaacactattatttgtgatcttcagcctcaacaggttcatacgttttatgaagctgtggggtacatgattggtgcacaaacagatcaaacagtacaagaacacttgatagaaaagtacatgttactccctaatcaagtgtgggatagtataatccagcaggcaaccaaaaatgtggatatactgaaagatcctgaaacagtcaagcagcttggtagcattttgaaaacaaatgtgagagcctgcaaagctgttggacacccctttgtaattcagcttggaagaatttatttagatatgcttaatgtatacaagtgcctcagtgaaaatatttctgcagctatccaagctaatggtgaaatggttacaaagcaaccattgattagaagtatgcgaactgtaaaaagggaaactttaaagttaatatctggttgggtgagccgatccaatgatccacagatggtcgctgaaaattttgttccccctctgttggatgcagttctcattgattatcagagaaatgtcccagctgctagagaaccagaagtgcttagtactatggccataattgtcaacaagttagggggacatataacagctgaaatacctcaaatatttgatgctgtttttgaatgcacattgaatatgataaataaggactttgaagaatatcctgaacatagaacgaactttttcttactacttcaggctgtcaattctcattgtttcccagcattccttgctattccacctacacagtttaaacttgttttggattccatcatttgggctttcaaacatactatgaggaatgtcgcagatacgggcttacagatactttttacactcttacaaaatgttgcacaagaagaagctgcagctcagagtttttatcaaacttatttttgtgatattctccagcatatcttttctgttgtgacagacacttcacatactgctggtttaacaatgcatgcatcaattcttgcatatatgtttaatttggttgaagaaggaaaaataagtacatcattaaatcctggaaatccagttaacaaccaaatctttcttcaggaatatgtggctaatctccttaagtcggccttccctcacctacaagatgctcaagtaaagctctttgtgacagggcttttcagcttaaatcaagatattcctgctttcaaggaacatttaagagatttcctagttcaaataaaggaatttgcaggtgaagacacttctgatttgtttttggaagagagagaaatagccctacggcaggctgatgaagagaaacataaacgtcaaatgtctgtccctggcatctttaatccacatgagattccagaagaaatgtgtgattaaaatccaaattcatgctgttttttttctctgcaactcgttagcagaggaaaacagcatgtgggtatttgtcgaccaaaatgatgccaatttgtaaattaaaatgtcacctagtggccctttttcttatgtgtttttttgtataagaaattttctgtgaaatatccttccattgtttaagcttttgttttggtcatctttatttagtttgcatgaagttgaaaattaaggcatttttaaaaattttacttcatgcccatttttgtggctgggctggggggaggaggcaaattcgatttgaacatatacttgtaattctaatgcaaaattatacaatttttcctgtaaacaataccaatttttaattagggagcattttccttctagtctatttcagcctagaagaaaagataatgagtaaaacaaattgcgttgtttaaaggattatagtgctgcattgtctgaagttagcacctcttggactg

SEQ ID NO: 131648 - DNA, 537 bp, Homo sapiens
  Payload ID: 5694
  Gene Symbol: XPO1
  Gene Name: exportin 1
  ENST ID: ENST00000437159
  CDS Start-End: 1-219
agaatggctcaagaagtactgacacatttaaaggagcatcctgatgcttggacaagagtcgacacaattttggaattttctcagaatatgaatacgaaatactatggactacaaattttggaaaatgtgataaaaacaaggtggaagattcttccaaggaaccagtgcgaagatactgaaacaagaatggcccaaacattggccaacttttatcagtgatattgttggagcaagtaggaccagcgaaagtctctgtcaaaataatatggtgattcttaaactcttgagtgaagaagtatttgatttctctagtggacagataacccaagtcaaatctaagcatttaaaagacagcatgtgcaatgaattctcacagatatttcaactgtgtcagtttgtaatggaaaattctcaaaatgctccacttgtacatgcaaccttggaaacattgctcagatttctgaactggattcccctgggatatatttttgagaccaaattaatcagcacattgatttataagttcctgaatgttcc

SEQ ID NO: 131649 - DNA, 318 bp, Homo sapiens
  Payload ID: 5694
  Gene Symbol: XPO1
  Gene Name: exportin 1
  ENST ID: ENST00000436018
  CDS Start-End: 142-318
ggctttccttcgctctcttttctactcatccctgctcttcgtcccacctcctcctcctccacccctctcctcttgcctttcgaccctccccacttcccctcccccactctgcgggcaaatcgctgctgaaaagagtaatctatgccagcaattatgacaatgttagcagaccatgcagctcgtcagctgcttgatttcagccaaaaactggatatcaacttattagataatgtggtgaattgcttataccatggagaaggagcccagcaaagaatggctcaagaagtactgacacatttaaaggagcatcctgatgct

SEQ ID NO: 131650 - DNA, 682 bp, Homo sapiens
  Payload ID: 5694
  Gene Symbol: XPO1
  Gene Name: exportin 1
  ENST ID: ENST00000420673
  CDS Start-End: 382-682
acttgcttaaaaagttttgacatcaagatactgaactgtatcacgttttaggaccataaaatcctaatagtggatgcgtttaaataataggttagcatactttataaatgttagtagaataggaaagtcttcctggtgtataaactaaacactagaaaagttgaatggaccataataatttatgtaattatcaaatagctaagtaatttcagcttttgttacttgcttttactatctcagttttctgtaattaaagtctctaaagtattcattaaaatatttgtaataacatggttgaagtaaaataacttgtaggaagtttttgataataccaaaacttgataggcagcttcaattttttttctttattttcagtaatctatgccagcaattatgacaatgttagcagaccatgcagctcgtcagctgcttgatttcagccaaaaactggatatcaacttattagataatgtggtgaattgcttataccatggagaaggagcccagcaaagaatggctcaagaagtactgacacatttaaaggagcatcctgatgcttggacaagagtcgacacaattttggaattttctcagaatatgaatacgaaatactatggactacaaattttggaaaatgtgataaaaacaaggtggaagattcttccaaggaaccagtgcgaag

SEQ ID NO: 131651 - DNA, 488 bp, Homo sapiens
  Payload ID: 5694
  Gene Symbol: XPO1
  Gene Name: exportin 1
  ENST ID: ENST00000457483
  CDS Start-End: 207-488
gtcccctctcccccctccccaccttccctcgccctaatcccccaacgaggaaggaaggagcagttggttcaatctctggatggagtctcattctcttgcccaggctagagtgtggtggtgcatctcggcttactgcaaactccgtctcctgggttcaagcagttctcctgcctcagcttcccaagtagctgggattacagtaatctatgccagcaattatgacaatgttagcagaccatgcagctcgtcagctgcttgatttcagccaaaaactggatatcaacttattagataatgtggtgaattgcttataccatggagaaggagcccagcaaagaatggctcaagaagtactgacacatttaaaggagcatcctgatgcttggacaagagtcgacacaattttggaattttctcagaatatgaatacgaaatactatggactacaaattttggaaaatgtgataaaaacaaggtggaagattctt

SEQ ID NO: 131652 - DNA, 565 bp, Homo sapiens
  Payload ID: 5694
  Gene Symbol: XPO1
  Gene Name: exportin 1
  ENST ID: ENST00000443240
  CDS Start-End: 168-565
ggctttccttcgctctcttttctactcatccctgctcttcgtcccacctcctcctcctccacccctctcctcttgcctttcgaccctccccacttcccctcccccactctgcgggcaaatcgctgctgaaaagaggaaggagcagttggttcaatctctggtaatctatgccagcaattatgacaatgttagcagaccatgcagctcgtcagctgcttgatttcagccaaaaactggatatcaacttattagataatgtggtgaattgcttataccatggagaaggagcccagcaaagaatggctcaagaagtactgacacatttaaaggagcatcctgatgcttggacaagagtcgacacaattttggaattttctcagaatatgaatacgaaatactatggactacaaattttggaaaatgtgataaaaacaaggtggaagattcttccaaggaaccagtgcgaaggaataaaaaaatacgttgttggcctcattatcaagacgtcatctgacccaacttgtgtagagaaagaaaaggtgtatatcggaaaattaaatatgat

SEQ ID NO: 131653 - DNA, 579 bp, Homo sapiens
  Payload ID: 5694
  Gene Symbol: XPO1
  Gene Name: exportin 1
  ENST ID: ENST00000449444
  CDS Start-End: 394-579
acaacctaaggagcagtctttcgccttgtagcgacttgtttttcacctagtgtgaagttattaagcaacggttatgattttctgggttttgtttaggaattggcattgggtgtcacttgtagagtcacattatccattaagctggataatccctagtgtatgttatccagtgagtggattttaggattgaagagcccaatgggaatgagcgttcgtggttacacctctcgcactatggcttgtttgctgtctgattgtatatcttaagtgtgggacactgctgttagtggaaagaatgttttggaagcggtttgatttgggggactaaatgtgcttggcattgaccacaaagccgccatttctgtactatgtacagttcaggaatagtaatctatgccagcaattatgacaatgttagcagaccatgcagctcgtcagctgcttgatttcagccaaaaactggatatcaacttattagataatgtggtgaattgcttataccatggagaaggagcccagcaaagaatggctcaagaagtactgacacatttaaaggagcatcctgatgcttggacaaga

SEQ ID NO: 131654 - DNA, 6776 bp, Homo sapiens
  Payload ID: 5694
  Gene Symbol: XPO1
  Gene Name: exportin 1
  ENST ID: ENST00000428210
  CDS Start-End: 677-925
ggccgcggcaggagcagcgggagctacagcatcagcaagagcaacagtagctacagccccggcggcggtgcctgttccagtctttgctgctgcagtccgtgcaaccacccagagggggaggggggaaccaccagtcgctgaggaacaagagaaggggggaaagtttaggcgagccttgggggggggggggccagcgccggagccgcgtgagagagggagccgtgttttggtaggggggagtcggactgcaactggcagcagagcgtctccccggccgtgtggactctacaccccctactcctgccgcttctgctgctgcctgtggctggagggtccccctggggctgaatctttgggacttgaccccgttccctcccccttccctcactccccagccgggcgggagcatttattccccagattaattccccttttgggggggggcgggtgtgtgtgtgtgtgtgtgtgtgtgtgtgtgttgggggaagcgtccctgaaatagtaaatattattgagctctttttgcccttttcctgtccgtttttttaatttccttttttgaggtgggaaaactgaaacccaccttgattcgtcccctctcccccctccccaccttccctcgccctaatcccccaacgaggaaggaaggagcagttggttcaatctctggtaatctatgccagcaattatgacaatgttagcagaccatgcagctcgtcagctgcttgatttcagccaaaaactggatatcaacttattagataatgtggtgaattgcttataccatggagaaggagcccagcaaagaatggctcaagaagtactgacacatttaaaggagcatcctgatgcttggacaagagtcgacacaattttggaattttctcagaatatgaatacgaaagtaagcaagtggtggttttaaaatctgttatttcttttcttccagtcataaactttgaggaaggtatctcatttttagtattagcatttgttatctcaaattattttatattgttaatttgtttcaaaatttagtcttaagcatataattaattcttgcaaatagtcctaagaattatgaatgaagttttgtaatgggactagtatgcaaggtggcttttttggttgtctgattttgtttttttctttttagtatatgtatacaggtctaagtagcataaattctgaatgttattcagagattaaacataacattaaggaattattttgggcaagtaatcaatataatacaggccaggcacctctgacaccaagttgtgtggacagcttaaaaccctactccatggcattgggcttctaatgggacagcactcagtttttatttacaatggaaaatgttataattctggtccttttttaagtttgaacagaagggttgatcaaaatgtgttttgtctgttttaggcttgatgattcacgcttctctttaaactgccttaaagtaataaatactatggcattctgtttaatacacgaaaggtttccacttgatatacattgtgttaaaacagaagatagccatattcacatctgtttctgaaaccagactttgttaattaacagttttaaaatattaattagttttgacatcttgtaaattttaggtcaaaaatacagtccagaacttcctcaaagtgctaaccttaagtaacataacagtgtttgcctgtttgcttgcctggtaaattttgctttttatactgacagacattactaatgtttaagttgatttatcaacagtatttttaaaaactcaaatttgtcttgtgaaaaatgagatgattagaggaacagaaagaaagcaacaggaagaaaaggggtgtcttcctgtgcaactgacacagctaggctttgacggcaggcctccacaagtactatggactacaaattttggaaaatgtgataaaaacaaggtggaagattcttccaaggaaccagtgcgaaggaataaaaaaatacgttgttggcctcattatcaagacgtcatctgacccaacttgtgtagagaaagaaaaggtgtatatcggaaaattaaatatgatccttgttcagatactgaaacaagaatggcccaaacattggccaacttttatcagtgatattgttggagcaagtaggaccagcgaaagtctctgtcaaaataatatggtgattcttaaactcttgagtgaagaagtatttgatttctctagtggacagataacccaagtcaaatctaagcatttaaaagacagcatgtgcaatgaattctcacagatatttcaactgtgtcagtttgtaatggaaaattctcaaaatgctccacttgtacatgcaaccttggaaacattgctcagatttctgaactggattcccctgggatatatttttgagaccaaattaatcagcacattgatttataagttcctgaatgttccaatgtttcgaaatgtctctctgaagtgcctcactgagattgctggtgtgagtgtaagccaatatgaagaacaatttgtaacactatttactctgacaatgatgcaactaaagcagatgcttcctttaaataccaatattcgacttgcgtactcaaatggaaaagatgatgaacagaacttcattcaaaatctcagtttgtttctctgcacctttcttaaggaacatgatcaacttatagaaaaaagattaaatctcagggaaactcttatggaggcccttcattatatgttgttggtatctgaagtagaagaaactgaaatctttaaaatttgtcttgaatactggaatcatttggctgctgaactctatagagagagtccattctctacatctgcctctccgttgctttctggaagtcaacattttgatgttcctcccaggagacagctatatttgcccatgttattcaaggtaacagagcggttggttgagtgttcttcctgttgcatactgtggttttgaggtctgaatccaaatacttctaatctgtgtaaataaattagctataaaaagagaacccaacaacttctccatgagtgtggaaaactagaacatgaaaggagttgagtctagaaccttgattctcaagagtgtggtccttctctcagtatcaacattggttgtgatttcgttaggcaaattcattggccacctgccaatctactaaaccagagtctaggaatgagacacaggaaactcctgtaacagaagttggttaaaaaaatcacattaaaacacacttaaataattataaagccatttttgtagaattacagtgaaaaaaaattttttcttttggagacagggtcttgctctgtggctcaggttggagtgcagtggcgtggtcatagctcactacaatcttgaactcctagactaaagcaattctcttgtgtcagcctcccaagtaattggttgcaggcacacaccaccatgcctagcaaattttaaattttttagttttacttcatttatatttacatagttttttctgttgtgctttaagccccagtatttttattgttttagagattgggtgtcattttgtgttgctcaagctgctctcaaattcctggccacaacagttctttttgcctcggccctccggaatagttggaattataggcatgaatccctacacatggctggcttgtggtttttttggttttgtttgtttttaactaagcttctacactaatgatttcagtgatctaacgatttttttcttgattgatatattgttgagtataggtccgtttattaatggttagtcgaatggctaaaccagaggaagtattggttgtagagaatgatcaaggagaagttgtgagagaattcatgaaggatacagattccataaatttgtataagaatatgagggaaacattgggtaagttaataaatactgttaatctttacctttataaatctattctggggtggaaatacattttaggaaatgtacttgtagtttctaaatattttctaaatgtattgttactcatcaataaaattctgctcattatttgcatttgaaaccatgtttttctttgtagtttatcttactcatctggattatgtagatacagaaagaataatgacagagaagcttcacaatcaagtgaatggtacagagtggtcatggaaaaatttgaatacattgtgttgggcaataggctccattagtggagcaatgcatgaagaggacgaaaaacgatttcttgttactgttataaaggatctattaggattatgtgaacagaaaagaggcaaagataataaagctattattgcatcaaatatcatgtacatagtaggtcaatacccacgttttttgagagctcactggaaatttctgaagactgtagttaacaagctgttcgaattcatgcatgagacccatgatggagtccaggatatggcttgtgatactttcattaaaatagcccaaaaatgccgcaggcatttcgttcaggttcaggttggagaagtgatgccatttattgatgaaattttgaacaacattaacactattatttgtgatcttcagcctcaacaggttcatacgttttatgaagctgtggggtacatgattggtgcacaaacagatcaaacagtacaagaacacttgatagaaaagtacatgttactccctaatcaagtgtgggatagtataatccagcaggcaaccaaaaatgtggatatactgaaagatcctgaaacagtcaagcagcttggtagcattttgaaaacaaatgtgagagcctgcaaagctgttggacacccctttgtaattcagcttggaagaatttatttagatatgcttaatgtatacaagtgcctcagtgaaaatatttctgcagctatccaagctaatggtgaaatggttacaaagcaaccattgattagaagtatgcgaactgtaaaaagggaaactttaaagttaatatctggttgggtgagccgatccaatgatccacagatggtcgctgaaaattttgttccccctctgttggatgcagttctcattgattatcagagaaatgtcccagctgctagagaaccagaagtgcttagtactatggccataattgtcaacaagttagggggacatataacagctgaaatacctcaaatatttgatgctgtttttgaatgcacattgaatatgataaataaggactttgaagaatatcctgaacatagaacgaactttttcttactacttcaggctgtcaattctcattgtttcccagcattccttgctattccacctacacagtttaaacttgttttggattccatcatttgggctttcaaacatactatgaggaatgtcgcagatacgggcttacagatactttttacactcttacaaaatgttgcacaagaagaagctgcagctcagagtttttatcaaacttatttttgtgatattctccagcatatcttttctgttgtgacagacacttcacatactgctggtttaacaatgcatgcatcaattcttgcatatatgtttaatttggttgaagaaggaaaaataagtacatcattaaatcctggaaatccagttaacaaccaaatctttcttcaggaatatgtggctaatctccttaagtcggccttccctcacctacaagatgctcaagtaaagctctttgtgacagggcttttcagcttaaatcaagatattcctgctttcaaggaacatttaagagatttcctagttcaaataaaggaatttgcaggtgaagacacttctgatttgtttttggaagagagagaaatagccctacggcaggctgatgaagagaaacataaacgtcaaatgtctgtccctggcatctttaatccacatgagattccagaagaaatgtgtgattaaaatccaaattcatgctgttttttttctctgcaactcgttagcagaggaaaacagcatgtgggtatttgtcgaccaaaatgatgccaatttgtaaattaaaatgtcacctagtggccctttttcttatgtgtttttttgtataagaaattttctgtgaaatatccttccattgtttaagcttttgttttggtcatctttatttagtttgcatgaagttgaaaattaaggcatttttaaaaattttacttcatgcccatttttgtggctgggctggggggaggaggcaaattcgatttgaacatatacttgtaattctaatgcaaaattatacaatttttcctgtaaacaataccaatttttaattagggagcattttccttctagtctatttcagcctagaagaaaagataatgagtaaaacaaattgcgttgtttaaaggattatagtgctgcattgtctgaagttagcacctcttggactgaatcgtttgtctagactacatgtattacaaagtctctttggcaagattgcagcaagatcatgtgcatatcatcccattgtaaagcgacttcaaaaatatgggaacacagttagttatttttacacagttctttttgtttttgtgtgtgtgtgctgtcgcttgtcgacaacagctttttgttttcctcaatgaggagtgttgctcatttgtgagccttcattaactcgaagtgaaatggttaaaaatatttatcctgttagaataggctgcatctttttaacaactcattaaaaaacaaaacaactctggcttttgagatgacttatactaatttacattgtttaccaagctgtagtgctttaagaacactacttaaaaagcaaaataaacttggtttacattta

SEQ ID NO: 131655 - DNA, 382 bp, Homo sapiens
  Payload ID: 5694
  Gene Symbol: XPO1
  Gene Name: exportin 1
  ENST ID: ENST00000422552
  CDS Start-End: 97-382
cggggttttgccatgttggccaggctggtctggaactcctgacctcaagtgattcgcccacctcggcctcccaaagtgctgggattacagtaatctatgccagcaattatgacaatgttagcagaccatgcagctcgtcagctgcttgatttcagccaaaaactggatatcaacttattagataatgtggtgaattgcttataccatggagaaggagcccagcaaagaatggctcaagaagtactgacacatttaaaggagcatcctgatgcttggacaagagtcgacacaattttggaattttctcagaatatgaatacgaaatactatggactacaaattttggaaaatgtgataaaaacaaggtggaagattcttccaa

SEQ ID NO: 131656 - DNA, 643 bp, Homo sapiens
  Payload ID: 5694
  Gene Symbol: XPO1
  Gene Name: exportin 1
  ENST ID: ENST00000451765
  CDS Start-End: 106-643
ggtggagagcttgggatgggggagggaggggctgccgactccctgttcctccagcaaggaaactcgaaagctctccggttttgcagagtggcatgtgaataatctatgccagcaattatgacaatgttagcagaccatgcagctcgtcagctgcttgatttcagccaaaaactggatatcaacttattagataatgtggtgaattgcttataccatggagaaggagcccagcaaagaatggctcaagaagtactgacacatttaaaggagcatcctgatgcttggacaagagtcgacacaattttggaattttctcagaatatgaatacgaaatactatggactacaaattttggaaaatgtgataaaaacaaggtggaagattcttccaaggaaccagtgcgaaggaataaaaaaatacgttgttggcctcattatcaagacgtcatctgacccaacttgtgtagagaaagaaaaggtgtatatcggaaaattaaatatgatccttgttcagatactgaaacaagaatggcccaaacattggccaacttttatcagtgatattgttggagcaagtaggaccagcgaaagtctctgtcaaaataatatggtgattcttaaactcttgagtgaagaagtatttg

SEQ ID NO: 131657 - DNA, 9921 bp, Homo sapiens
  Payload ID: 5695
  Gene Symbol: XPO4
  Gene Name: exportin 4
  Uniprot ID: Q9C0E2
  ENST ID: ENST00000255305
  CDS Start-End: 73-3528
cgcggcggcgattggccggccgcggcgcccgctcccagaatgcagcgcatggcgcgtcattgaagagagaccatgatggcggcggcgctggggcccccagaagtgatcgctcagctggagaacgcggctaaagttctgatggcaccaccttccatggtcaataatgaacaacgccagcatgcagagcacatattcttatcatttaggaaatcaaaatcaccatttgcagtttgcaagcatattttggaaactagtaaagtggactatgtcctctttcaagctgccacagccataatggaagcagttgtccgagagtggattctcttggaaaaaggtagcatcgagtctctgcgaacattccttttaacctatgtcttacaaaggcccaaccttcaaaagtatgttcgggaacagattctactagcagtagcagtaattgtaaaaagaggatcattagataaatcaattgactgcaaaagcatttttcatgaagtcagccagttgattagtagtggcaatcccactgtgcaaactctggcctgttctattctgactgcgctattgagtgaattttcaagttcaagtaaaactagcaacattggattgagcatggaattccatggtaactgcaaaagagtttttcaggaagaagaccttcgtcagatcttcatgttaactgttgaagttctgcaggagttcagcaggcgggaaaacctcaatgctcagatgtcttcagtatttcagcgttaccttgcactcgccaatcaagtcttgagctggaactttcttcctccaaatttgggcagacattatatagctatgtttgaatcctcgcaaaatgtgctgttgaagccaacagagtcctggcgggagactcttctggacagcagagttatggagcttttcttcacagtacatcgaaaaatcagagaagattcagatatggcacaagattctctgcagtgccttgcccagttagcttctcttcatggacccatcttcccagatgaaggatcacaagttgattatctagcacacttcattgagggattactgaatactatcaatggaattgaaatagaagattctgaagctgtggggatctccagcattatcagcaacctgataaccgtgttcccacgaaatgttttaactgccattccaagtgaacttttctcctcctttgttaactgcctcacacacctcacttgttcttttgggcgaagtgctgcattggaagaagtgcttgataaagatgacatggtatacatggaagcatatgataaattgttggagtcctggttaactttggttcaagatgacaaacatttccataaaggcttttttacccaacatgcagttcaagttttcaattcctatattcagtgccacctagctgctccagatggcacaagaaatttgactgccaatggtgtggcctctcgtgaggaggaagaaataagtgaacttcaagaggatgatcgagaccagttttctgatcaactggccagtgtaggaatgctaggaagaattgctgcagaacactgtatacctcttctgacaagtttattagaagaaagagtaacaagactccatggtcagttacaacgacatcagcaacagttacttgcttcaccgggttcaagcactgttgacaacaaaatgcttgatgatctctatgaagatattcactggcttattttagttacaggctacctcttagctgatgatactcagggagagactccgctaatacctccagaaataatggaatattccattaagcattcatctgaagttgacattaatacaacacttcaaattttgggatctccaggagaaaaggcttcttccatcccagggtacaacagaacagattctgtgattaggctgttgtctgccattctcagagtttcagaagttgaatctcgagcaataagagcagatctcactcatctactaagtccccagatgggcaaagatattgtttggtttttaaaacgctgggcaaagacttatctcctggtggatgaaaaactgtatgatcagataagtctgccattcagtacagcgttcggagcagatacagagggttctcagtggataattggctacctcttacaaaaagtcatcagtaacctctcagtctggagtagtgagcaggaccttgcaaatgacactgtgcagctccttgtcactttggtggaaagaagagaaagggcaaacttagtaattcaatgtgagaactggtggaatttagctaagcagtttgcaagccgaagcccacctcttaatttcttgtcaagtcctgtgcagaggacattgatgaaggctctagtcttaggaggttttgcacatatggacacagaaaccaaacagcagtattggacagaggttcttcagccacttcagcagcgattcttaagagtgataaaccaagaaaacttccagcagatgtgtcagcaagaggaagtcaagcaggaaatcactgccacactagaggccctgtgtggcattgctgaggctacccagattgacaacgtagcaatcctgtttaattttttaatggacttccttaccaattgcattggattgatggaagtttacaagaataccccagagactgtcaatctcattatagaagtttttgttgaagttgcacataaacagatatgctatcttggagagtccaaagctatgaacttatatgaagcctgccttactttgttgcaagtgtattctaagaataatttagggcggcaaagaatagatgttacagcagaagaagagcaataccaagacctgcttctcattatggaacttcttactaacctgctgtcaaaagaattcatagatttcagtgatacagatgaagtgtttagaggacatgagccaggtcaagcagcaaacagatctgtgtcagcagcggatgttgtgttgtatggagtaaacctaattctgcccttgatgtcacaggatctcttgaagtttccaaccctttgtaatcagtactacaaattaatcacatttatctgtgagatttttcctgaaaaaataccacagcttcctgaggatctgtttaaaagtctgatgtactccctagaattaggaatgacatcaatgagttcggaggtttgccagctttgcctggaggccttgacaccgttagctgaacagtgtgcaaaagcacaagaaacagactcaccactttttctagcaacacggcactttcttaagctggtttttgatatgctggttttgcaaaagcacaacacagagatgaccactgcggctggcgaagctttctacacgttggtgtgtttgcaccaggctgaatattctgaactggtcgaaacattactatcaagtcagcaagacccagttatttaccagagattagcagatgccttcaacaagctcactgcaagcagcactcctcctacgctggatcggaagcagaagatggccttcttaaagagtttagaagaatttatggcaaatgttggtggtctcctttgtgtaaaataaacaacagaactttatgcttaatttagatcctttctgcaaagtgcactgaattgctgaaagttgacttgagtcttgtcctattcctcagttcatttggccattttggattttggagagcctgaaactttgatatgtatgtaatacagtgaaacaggagaggtcaacttggcatcagcttctgctgttaagtgttagccacaatctgtcatatatatgtcttttagattctgaatggtgatttaaaattttcaaaatgaaattccatatatgtgcaaacagatatgggcaccacgaaatacatatgcagtgccttttttccttttaacataggtggctagccaaagtttagaatttttgtcattaaatatgaaatggatatatgctaggcagtgtttctcaaaatctccatagatcgcctgcatcacttgaggagctggtgaaaaggcagattcttaggcccaactgtagaccttcagagtcagaatgtctggttgttgggcccaggagtcttcatgttaataagcttctccctttcgtcaccccaaaagttttgaatcaatgaaagagacattgaaaactcttaagaggttttgtgctttctagcttttcctccctttgatgattgggttttataattcagcaggaaggggaaacatcaccaggggtttgttggctttttcttagcttgctttcttgcttgcttgctttcttgcttttcttgctttctgtctctctctttcttttctctctctctctcacatcaacccagtgctgcaggttttgtgtaatacaagtcactaatcatactctgatgcctgaacttgaggaggaaaatacatgtatatttttgttccgtaaaaataaccttaggaactgtagccatttcattgccttaattttaagaggaaaatacaaaaacagctgatttgttttagtaagaaaccacgtcttgatgcttcagagttggtttagggtgttagctgctatgaacctgttgcccctttcgatcgtgtatttatgtaggtttatcagtgaaatgaaaggcttgtttccgtctagtctaactttttgagtgtgtttctatccagccacatagcccatatctactctaaatggcttgcttaagcaataattattttaaaggatgtgaatcactgattcacacagactattgcacgttggggcattaggggcaataattcttatccagacatgggagccagtgaatttaatttcagagattaaaaattcactttagatcctctagtttgatctcttaatcaggatttttatacagctgccaggctcccctaattcagtgtgccagcttacaatgtggaaatgaaagctaatttatacacagcaggcatatgaaactccactcattgcagtactttcacagcacagtgacaggtagaggactctggcacaggtgcactcatgaaactctgcttccaccatgttcctgacacctatctattaaaccattctgcaaatacggtttttctacctgattgcatatagcatatgtgtcattacatgtgatgctgtgcaaaactttgtataattctgtgttattaacagttaacaaaactggagcatctgaattacatccaacctgtgcatgtgatgttaggtagatgtgaatgcagggccttgggccataacttacatttctctcaatttgattagctttgagtcacaattaaggggaagcaaaaacatcttgaaaagactgctaggaaggaaattaatatcagtcatccagaagtacacgtttctgtattttaaaaaatactttgatgcatttatttttaggtgttttttttttccccttaaaaaacttgaagtgatatgcagcagtaatctatttgttttgcattgttcttggtgttttgtgtttcccagatccctcaagctttctcagctgttgtgaattatgtgtatctgtgtgtgtgctaagtacagtctctttaccaaagggcactgaaacacacaattgactggacaggtccacgcgccatgacaaaactataatcaagttattaaaactaaagaggagtgggaaaggaatgccttggtaagtaaaaaggcatctatatttaataacttttatccagatggcaacatatttgcaaaatttgcccagatcctattacaatactaaaaatagaaaatttcacctccatattcctgaggtgtaatttcattagactagttttagtttaaaaagaccttcttcagattggaccaaataatacttataagatcagcagaatgttgaatattagctcactggggtggggagaagccactaccattttttaggtgatggggatgccactgagttgcaacggctagaccttttcagggtggttgtgtccatgtttgcctgattggatgcttattcactttgtgttttcttttgttttattttgtccaattttgtctttagctgtgtttattaacttctccggtcttgttttgttttaatgctcttggcccagtgggtgtcaagaacactggcttaattcaagtcagttgattttttttctattaaaactgttgttaaaatattttttaaaacaaaaacattatttgtgccctcttttatatatgtcaaagggacactgtcaagtatttcatttttagatttttgttttataaaatttctgttgttcatatagtatcctttaacctctagttttccatacatcctttgtttgtttctcattttattttccttgacccatttatttcccaaggcacaatcactaaagactttgtactttcacagtctgttaatgtggtagcacctgtaactgtgttcttgttctgttaaaaggattgatttgcttttatagtccttgtgctggatgagtggctgcctcagtagcaaaactacctgacagtatttgacagtgtcctttccagcaccattatttgggtctttcagggtggccatctctgttagaagacagtagcatgttaacatcactgcattgagtttttgtctggtgtaaagtatgacttttaatgtaaacaaactgcaggtttttttcaaactaattttaagaatttagtcttatttcgttgtaaactgtgtatctaattatattacattactctgttcagatgggatggttactaccacttgtccatgattttcatttgaaaagcaagtatctatatcatttccccccagtcagcattatttaacactccccttaactgtctttgaactttctcttttaacaaaaatgtcaagtctttatagttgtaatatcaccatgtttcccatttctgttaatacttctatgaacccctaaagtattgaagggaactagctgtcagtttcaaggattacaagtttgagtctcctagtattcaacatcattctgaaccctgaaataatatttttctctgttaaacaatttttatctgtttgccacctctgttgttagaggtggttgtcaattgaccttactaagttagctgtctttgatgaggaattattgttattggttcctgaataaaacattaaccttttaagtcagaaggaacctcggtacttcttaaggtttgtttgtgttttctaaaaccagagaataaggaactgatttggctatgaggtttaacattataattttctgtaagctttcccacaaaaaaacattgttgatttgaggatataataatgttttaatctttttaaaatataagtggttattctctgacttggtaactatgttctgaaaacactgcatttaagaatttttaaaaattggttttctaaaattaaaatgtccaaattaggcatattgctgagctcaaattgatgtgaaatgccatggttccagttgaattttaagcatattttcatttagatataaaatatatgaagtatgctttgttgattatagtgagaacccatgacatagttaaccaaagaatatgtttggttcaaataaaaatagaagcttaatactgggcattcatactttttaaagagaatgaatgaagaaatcggtttcctgctgtagttctctatgggtaagtcttagtaaagacgagaatgctgaagtcggccgtggcgattccctcctaggaactgggaggtgtggcttgcccattacccgcttgaagctcacatctttaccctcctctcccactgtggtttgatcttcacctattcccaggccctcccagcaattggagaggtgtctttttttttggttttggttttttttctccccgtctgcattcttaggcctcttagctattaggaactgtcagatacatactagtagctaattttcctagcctgaaattatatactgcatctgcactatgtacctactagggatctgacctcaagtgttttctgagcccaggcttcctggtgtggtgtcttttaccacataaaattattacaaattgcaaatgttggtattgtgatttgattatctgtacaaagaaagaagctctatgcagtgagtttgtggtttaatggtcacaaaaatgttagcactgctaccactcagcacgtgtaaaattttttaaatttataaatattaaaattttaaacttacactaagacttttcagttttatttaaagacccagggatgagtgtactgtttaaatatttacctctattaacataactaatgaaggtataaaattgcatttagtttttcagaagatgctgcaatatgattttaggaaataaggctatgtattgagccagttataggctgaatatcaggttgataaaattttatttgtatttttaaaattcataaatgggagttaaaatgtgtcttttcactaaatatttttattacatttttgttttgaccatgtgtgatttgttcatgggtatttagctagactcttttatgaaatgcattgaaatggtgctagtttgtttaccattataggaagattgacactggggacattacacggtcctaaaataattttaaatttaaaaaaatgaagacatctgtacagataaaaatcaagatttgcatcaccttctgggagaacccgtggtactcacagaatatccagtattagaaatataaaaattttgtctatattttataatatttatctcagcccacagtcttagaaacagtttcacagttactagttaagtcattatctttggtgcatatttagtaaatacttttagcaagtcattctttttggcctttcagggaaagtggtgaattaccatattactgtgtgctagatagatccaccctttgcccagtgttaaatcttgtaaacatatgaagtgaaaagttaatttttaaagaaaatgcatctttaaaatgttcatttttaacctgaatttgctttgaatattctttgatttgtaatgttgttatttagcttatattgagatttattccactccaaaggtggataaagaaaagttgtttaagaaaaccaattagagtgtattttgaatttttgtttctttcattaccaagtgtggggccatacacacaggctaatcatctgtcatttgagacccacagatgatttcaaaggtcccaaataaatacacatctataactgttttttaaaagacatctttaatggtgctctccaaaaatacaattcggttgcttatgagtgatgcctttgacaggctgattagattataaaacagttttgtttttttaaacatagggtctcagattgagtcttgtgcattctatgtaatctcaaatggcagttcagtttgactttcttttaaaactaagtggaaatggtatatttggtgaaactaatgaaagaatcttttgctgggaaattccatacagcacccccagcagcatcctgtctcagtctggcgtataattcaacctcctactgagtgtccctgtaaattatttttaatatatagcatgagagtgaactgaggtaagtcattgatgtttcccagagatgatgaatgaacaaaagcaaataggatctgctaaacatttttattcccacagtagtgagcagttttgttcttgttttgataatgttcatttctgcctaatcttaggcttcaaatacacctttaagaaagcccaagatgtattgagtagtagaacttcttatttgtacacctgtttataactgcactgccctggatgttatggttatttctaaggactgacctggtaaagctacttgaactggtagactgcagggtagaggcagacctagattcaatgtctaactaagctgcttagggcttacattaatttccacaggtctgttatccatatcatgagtttataagtgttcctcccaaagaaaaaatttaaaagtgatggatgaaatataatagtagatgctcaataaattccattgtatttaaagatta

SEQ ID NO: 131658 - DNA, 9884 bp, Homo sapiens
  Payload ID: 5695
  Gene Symbol: XPO4
  Gene Name: exportin 4
  ENST ID: ENST00000400602
  CDS Start-End: 37-3492
agaatgcagcgcatggcgcgtcattgaagagagaccatgatggcggcggcgctggggcccccagaagtgatcgctcagctggagaacgcggctaaagttctgatggcaccaccttccatggtcaataatgaacaacgccagcatgcagagcacatattcttatcatttaggaaatcaaaatcaccatttgcagtttgcaagcatattttggaaactagtaaagtggactatgtcctctttcaagctgccacagccataatggaagcagttgtccgagagtggattctcttggaaaaaggtagcatcgagtctctgcgaacattccttttaacctatgtcttacaaaggcccaaccttcaaaagtatgttcgggaacagattctactagcagtagcagtaattgtaaaaagaggatcattagataaatcaattgactgcaaaagcatttttcatgaagtcagccagttgattagtagtggcaatcccactgtgcaaactctggcctgttctattctgactgcgctattgagtgaattttcaagttcaagtaaaactagcaacattggattgagcatggaattccatggtaactgcaaaagagtttttcaggaagaagaccttcgtcagatcttcatgttaactgttgaagttctgcaggagttcagcaggcgggaaaacctcaatgctcagatgtcttcagtatttcagcgttaccttgcactcgccaatcaagtcttgagctggaactttcttcctccaaaactgggcagacattatatagctatgtttgaatcctcgcaaaatgtgctgttgaagccaacagagtcctggcgggagactcttctggacagcagagttatggagcttttcttcacagtacatcgaaaaatcagagaagattcagatatggcacaagattctctgcagtgccttgcccagttagcttctcttcatggacccatcttcccagatgaaggatcacaagttgattatctagcacacttcattgagggattactgaatactatcaatggaattgaaatagaagattctgaagctgtggggatctccagcattatcagcaacctgataaccgtgttcccacgaaatgttttaactgccattccaagtgaacttttctcctcctttgttaactgcctcacacacctcacttgttcttttgggcgaagtgctgcattggaagaagtgcttgataaagatgacatggtatacatggaagcatatgataaattgttggagtcctggttaactttggttcaagatgacaaacatttccataaaggcttttttacccaacatgcagttcaagttttcaattcctatattcagtgccacctagctgctccagatggcacaagaaatttgactgccaatggtgtggcctctcgtgaggaggaagaaataagtgaacttcaagaggatgatcgagaccagttttctgatcaactggccagtgtaggaatgctaggaagaattgctgcagaacactgtatacctcttctgacaagtttattagaagaaagagtaacaagactccatggtcagttacaacgacatcagcaacagttacttgcttcaccgggttcaagcactgttgacaacaaaatgcttgatgatctctatgaagatattcactggcttattttagttacaggctacctcttagctgatgatactcagggagagactccgctaatacctccagaaataatggaatattccattaagcattcatctgaagttgacattaatacaacacttcaaattttgggatctccaggagaaaaggcttcttccatcccagggtacaacagaacagattctgtgattaggctgttgtctgccattctcagagtttcagaagttgaatctcgagcaataagagcagatctcactcatctactaagtccccagatgggcaaagatattgtttggtttttaaaacgctgggcaaagacttatctcctggtggatgaaaaactgtatgatcagataagtctgccattcagtacagcgttcggagcagatacagagggttctcagtggataattggctacctcttacaaaaagtcatcagtaacctctcagtctggagtagtgagcaggaccttgcaaatgacactgtgcagctccttgtcactttggtggaaagaagagaaagggcaaacttagtaattcaatgtgagaactggtggaatttagctaagcagtttgcaagccgaagcccacctcttaatttcttgtcaagtcctgtgcagaggacattgatgaaggctctagtcttaggaggttttgcacatatggacacagaaaccaaacagcagtattggacagaggttcttcagccacttcagcagcgattcttaagagtgataaaccaagaaaacttccagcagatgtgtcagcaagaggaagtcaagcaggaaatcactgccacactagaggccctgtgtggcattgctgaggctacccagattgacaacgtagcaatcctgtttaattttttaatggacttccttaccaattgcattggattgatggaagtttacaagaataccccagagactgtcaatctcattatagaagtttttgttgaagttgcacataaacagatatgctatcttggagagtccaaagctatgaacttatatgaagcctgccttactttgttgcaagtgtattctaagaataatttagggcggcaaagaatagatgttacagcagaagaagagcaataccaagacctgcttctcattatggaacttcttactaacctgctgtcaaaagaattcatagatttcagtgatacagatgaagtgtttagaggacatgagccaggtcaagcagcaaacagatctgtgtcagcagcggatgttgtgttgtatggagtaaacctaattctgcccttgatgtcacaggatctcttgaagtttccaaccctttgtaatcagtactacaaattaatcacatttatctgtgagatttttcctgaaaaaataccacagcttcctgaggatctgtttaaaagtctgatgtactccctagaattaggaatgacatcaatgagttcggaggtttgccagctttgcctggaggccttgacaccgttagctgaacagtgtgcaaaagcacaagaaacagactcaccactttttctagcaacacggcactttcttaagctggtttttgatatgctggttttgcaaaagcacaacacagagatgaccactgcggctggcgaagctttctacacgttggtgtgtttgcaccaggctgaatattctgaactggtcgaaacattactatcaagtcagcaagacccagttatttaccagagattagcagatgccttcaacaagctcactgcaagcagcactcctcctacgctggatcggaagcagaagatggccttcttaaagagtttagaagaatttatggcaaatgttggtggtctcctttgtgtaaaataaacaacagaactttatgcttaatttagatcctttctgcaaagtgcactgaattgctgaaagttgacttgagtcttgtcctattcctcagttcatttggccattttggattttggagagcctgaaactttgatatgtatgtaatacagtgaaacaggagaggtcaacttggcatcagcttctgctgttaagtgttagccacaatctgtcatatatatgtcttttagattctgaatggtgatttaaaattttcaaaatgaaattccatatatgtgcaaacagatatgggcaccacgaaatacatatgcagtgccttttttccttttaacataggtggctagccaaagtttagaatttttgtcattaaatatgaaatggatatatgctaggcagtgtttctcaaaatctccatagatcgcctgcatcacttgaggagctggtgaaaaggcagattcttaggcccaactgtagaccttcagagtcagaatgtctggttgttgggcccaggagtcttcatgttaataagcttctccctttcgtcaccccaaaagttttgaatcaatgaaagagacattgaaaactcttaagaggttttgtgctttctagcttttcctccctttgatgattgggttttataattcagcaggaaggggaaacatcaccaggggtttgttggctttttcttagcttgctttcttgcttgcttgctttcttgcttttcttgctttctgtctctctctttcttttctctctctctctcacatcaacccagtgctgcaggttttgtgtaatacaagtcactaatcatactctgatgcctgaacttgaggaggaaaatacatgtatatttttgttccgtaaaaataaccttaggaactgtagccatttcattgccttaattttaagaggaaaatacaaaaacagctgatttgttttagtaagaaaccacgtcttgatgcttcagagttggtttagggtgttagctgctatgaacctgttgcccctttcgatcgtgtatttatgtaggtttatcagtgaaatgaaaggcttgtttccgtctagtctaactttttgagtgtgtttctatccagccacatagcccatatctactctaaatggcttgcttaagcaataattattttaaaggatgtgaatcactgattcacacagactattgcacgttggggcattaggggcaataattcttatccagacatgggagccagtgaatttaatttcagagattaaaaattcactttagatcctctagtttgatctcttaatcaggatttttatacagctgccaggctcccctaattcagtgtgccagcttacaatgtggaaatgaaagctaatttatacacagcaggcatatgaaactccactcattgcagtactttcacagcacagtgacaggtagaggactctggcacaggtgcactcatgaaactctgcttccaccatgttcctgacacctatctattaaaccattctgcaaatacggtttttctacctgattgcatatagcatatgtgtcattacatgtgatgctgtgcaaaactttgtataattctgtgttattaacagttaacaaaactggagcatctgaattacatccaacctgtgcatgtgatgttaggtagatgtgaatgcagggccttgggccataacttacatttctctcaatttgattagctttgagtcacaattaaggggaagcaaaaacatcttgaaaagactgctaggaaggaaattaatatcagtcatccagaagtacacgtttctgtattttaaaaaatactttgatgcatttatttttaggtgttttttttttccccttaaaaaacttgaagtgatatgcagcagtaatctatttgttttgcattgttcttggtgttttgtgtttcccagatccctcaagctttctcagctgttgtgaattatgtgtatctgtgtgtgtgctaagtacagtctctttaccaaagggcactgaaacacacaattgactggacaggtccacgcgccatgacaaaactataatcaagttattaaaactaaagaggagtgggaaaggaatgccttggtaagtaaaaaggcatctatatttaataacttttatccagatggcaacatatttgcaaaatttgcccagatcctattacaatactaaaaatagaaaatttcacctccatattcctgaggtgtaatttcattagactagttttagtttaaaaagaccttcttcagattggaccaaataatacttataagatcagcagaatgttgaatattagctcactggggtggggagaagccactaccattttttaggtgatggggatgccactgagttgcaacggctagaccttttcagggtggttgtgtccatgtttgcctgattggatgcttattcactttgtgttttcttttgttttattttgtccaattttgtctttagctgtgtttattaacttctccggtcttgttttgttttaatgctcttggcccagtgggtgtcaagaacactggcttaattcaagtcagttgattttttttctattaaaactgttgttaaaatattttttaaaacaaaaacattatttgtgccctcttttatatatgtcaaagggacactgtcaagtatttcatttttagatttttgttttataaaatttctgttgttcatatagtatcctttaacctctagttttccatacatcctttgtttgtttctcattttattttccttgacccatttatttcccaaggcacaatcactaaagactttgtactttcacagtctgttaatgtggtagcacctgtaactgtgttcttgttctgttaaaaggattgatttgcttttatagtccttgtgctggatgagtggctgcctcagtagcaaaactacctgacagtatttgacagtgtcctttccagcaccattatttgggtctttcagggtggccatctctgttagaagacagtagcatgttaacatcactgcattgagtttttgtctggtgtaaagtatgacttttaatgtaaacaaactgcaggtttttttcaaactaattttaagaatttagtcttatttcgttgtaaactgtgtatctaattatattacattactctgttcagatgggatggttactaccacttgtccatgattttcatttgaaaagcaagtatctatatcatttccccccagtcagcattatttaacactccccttaactgtctttgaactttctcttttaacaaaaatgtcaagtctttatagttgtaatatcaccatgtttcccatttctgttaatacttctatgaacccctaaagtattgaagggaactagctgtcagtttcaaggattacaagtttgagtctcctagtattcaacatcattctgaaccctgaaataatatttttctctgttaaacaatttttatctgtttgccacctctgttgttagaggtggttgtcaattgaccttactaagttagctgtctttgatgaggaattattgttattggttcctgaataaaacattaaccttttaagtcagaaggaacctcggtacttcttaaggtttgtttgtgttttctaaaaccagagaataaggaactgatttggctatgaggtttaacattataattttctgtaagctttcccacaaaaaaacattgttgatttgaggatataataatgttttaatctttttaaaatataagtggttattctctgacttggtaactatgttctgaaaacactgcatttaagaatttttaaaaattggttttctaaaattaaaatgtccaaattaggcatattgctgagctcaaattgatgtgaaatgccatggttccagttgaattttaagcatattttcatttagatataaaatatatgaagtatgctttgttgattatagtgagaacccatgacatagttaaccaaagaatatgtttggttcaaataaaaatagaagcttaatactgggcattcatactttttaaagagaatgaatgaagaaatcggtttcctgctgtagttctctatgggtaagtcttagtaaagacgagaatgctgaagtcggccgtggcgattccctcctaggaactgggaggtgtggcttgcccattacccgcttgaagctcacatctttaccctcctctcccactgtggtttgatcttcacctattcccaggccctcccagcaattggagaggtgtctttttttttggttttggttttttttctccccgtctgcattcttaggcctcttagctattaggaactgtcagatacatactagtagctaattttcctagcctgaaattatatactgcatctgcactatgtacctactagggatctgacctcaagtgttttctgagcccaggcttcctggtgtggtgtcttttaccacataaaattattacaaattgcaaatgttggtattgtgatttgattatctgtacaaagaaagaagctctatgcagtgagtttgtggtttaatggtcacaaaaatgttagcactgctaccactcagcacgtgtaaaattttttaaatttataaatattaaaattttaaacttacactaagacttttcagttttatttaaagacccagggatgagtgtactgtttaaatatttacctctattaacataactaatgaaggtataaaattgcatttagtttttcagaagatgctgcaatatgattttaggaaataaggctatgtattgagccagttataggctgaatatcaggttgataaaattttatttgtatttttaaaattcataaatgggagttaaaatgtgtcttttcactaaatatttttattacatttttgttttgaccatgtgtgatttgttcatgggtatttagctagactcttttatgaaatgcattgaaatggtgctagtttgtttaccattataggaagattgacactggggacattacacggtcctaaaataattttaaatttaaaaaaatgaagacatctgtacagataaaaatcaagatttgcatcaccttctgggagaacccgtggtactcacagaatatccagtattagaaatataaaaattttgtctatattttataatatttatctcagcccacagtcttagaaacagtttcacagttactagttaagtcattatctttggtgcatatttagtaaatacttttagcaagtcattctttttggcctttcagggaaagtggtgaattaccatattactgtgtgctagatagatccaccctttgcccagtgttaaatcttgtaaacatatgaagtgaaaagttaatttttaaagaaaatgcatctttaaaatgttcatttttaacctgaatttgctttgaatattctttgatttgtaatgttgttatttagcttatattgagatttattccactccaaaggtggataaagaaaagttgtttaagaaaaccaattagagtgtattttgaatttttgtttctttcattaccaagtgtggggccatacacacaggctaatcatctgtcatttgagacccacagatgatttcaaaggtcccaaataaatacacatctataactgttttttaaaagacatctttaatggtgctctccaaaaatacaattcggttgcttatgagtgatgcctttgacaggctgattagattataaaacagttttgtttttttaaacatagggtctcagattgagtcttgtgcattctatgtaatctcaaatggcagttcagtttgactttcttttaaaactaagtggaaatggtatatttggtgaaactaatgaaagaatcttttgctgggaaattccatacagcacccccagcagcatcctgtctcagtctggcgtataattcaacctcctactgagtgtccctgtaaattatttttaatatatagcatgagagtgaactgaggtaagtcattgatgtttcccagagatgatgaatgaacaaaagcaaataggatctgctaaacatttttattcccacagtagtgagcagttttgttcttgttttgataatgttcatttctgcctaatcttaggcttcaaatacacctttaagaaagcccaagatgtattgagtagtagaacttcttatttgtacacctgtttataactgcactgccctggatgttatggttatttctaaggactgacctggtaaagctacttgaactggtagactgcagggtagaggcagacctagattcaatgtctaactaagctgcttagggcttacattaatttccacaggtctgttatccatatcatgagtttataagtgttcctcccaaagaaaaaatttaaaagtgatggatgaaatataatagtagatgctcaataaattccattgtatttaaagatt

SEQ ID NO: 131659 - DNA, 5364 bp, Homo sapiens
  Payload ID: 5696
  Gene Symbol: XPO5
  Gene Name: exportin 5
  Uniprot ID: Q9HAV4
  ENST ID: ENST00000265351
  CDS Start-End: 212-3826
acttccgcgggcgcgtgcgcagtggcgggccgggcgcgtgcgcagcgccggcttcttcccagcgcgagttgctgctaacgctcctcctccagcttcccacccccgccgcccgccgcggcccggtaccaacgggtggtctcgccgagggagctgtcgtgcctcgtggtcccgggactgcagtggtgtgcgctctcggcgcgtggcgctaggcatggcgatggatcaagtaaacgcgctgtgcgagcagctggtgaaagcggtgacggtcatgatggaccccaactccacccagcgctaccggctggaagccctcaagttttgtgaggagtttaaagaaaagtgtcctatctgtgtcccctgtggcttgaggttggctgagaaaacacaagttgccatcgtcagacattttggccttcagatcctggaacacgttgtcaagtttcggtggaacggcatgtctcgattggagaaggtgtatctgaagaacagtgtcatggagctgattgcaaatggaacattgaacattttggaagaggagaaccatattaaagatgctctgtctcgaattgtagtggaaatgatcaagcgagagtggccacagcattggcctgacatgctaatagaattggacactctttccaaacaaggggaaacacagacagaattggtgatgtttatccttttgcgactggcagaggatgtagtgacttttcagacacttccccctcaaagaagaagggacatccagcaaacattaacccagaacatggaaaggatcttcagttttctgcttaacacacttcaagaaaatgtaaacaagtatcagcaagtgaagacagatacttctcaggagtcaaaggcgcaagcaaactgtcgagtaggagttgcagcactgaatactctagcaggctatattgactgggtgtctatgagtcacatcactgctgaaaactgtaaactcctggagatactgtgtttgctgttgaatgaacaggaacttcagttgggagccgctgagtgtcttctcattgcagtcagcagaaaaggcaagttggaagaccggaagcccttgatggtcttatttggagatgttgccatgcattatatactctccgccgcacagactgctgatggaggaggtttggtagaaaaacactacgtctttctgaagaggctctgtcaggtgttgtgtgcgctgggcaatcagctgtgtgcattgctgggtgcagattctgatgtagaaacaccatcaaactttggaaaatacctggaatcttttcttgctttcacaacccatccaagtcagtttctacgctcttcaactcagatgacttggggagccctcttcaggcatgaaatcctgtcccgtgatcctttgctattagcaataataccaaaatatcttcgtgcttccatgactaacttggtcaagatgggctttccttctaaaacagacagccctagctgtgaatattctcggtttgattttgatagcgatgaggacttcaatgctttcttcaactcctcccgagcacaacaaggagaggtgatgaggttggcatgtcgtttggatcccaaaactagcttccagatggctggggagtggctaaagtatcaactatcaacttttcttgatgctggttctgtgaattcttgttctgcagttggaactggagaaggaagcctctgttccgtcttctcaccttcattcgtgcagtgggaagccatgactctttttttggaaagtgttatcacccagatgtttcgaacactaaatagagaagaaattcctgttaatgatggaatagagctattgcagatggttctgaactttgataccaaggatcccctcatcctgtcctgcgtccttactaatgtctctgcactctttccatttgtcacctacagaccagagttcctgccccaggtcttctctaagctattttcatctgtcacttttgaaactgttgaagaaagtaaggcccccagaacccgggcagtgaggaatgtgaggaggcatgcttgttcctccatcatcaagatgtgtcgtgactacccccagcttgtgctgcccaattttgacatgctttataaccatgtgaagcaactcctctccaatgagctactcctgacacaaatggagaagtgtgccctcatggaagccctggttctcattagcaaccaatttaagaactacgagcgtcagaaggtgttcctagaggagctgatggcaccagtggccagcatctggctttctcaagacatgcacagagtgctgtcagatgttgatgctttcattgcgtatgtgggtacagatcagaagagctgtgacccaggcctggaggatccgtgtggcttaaaccgtgcacgaatgagcttttgtgtatacagcattctgggtgtggtgaaacgaacttgctggcccactgacctagaagaggccaaagctgggggatttgtggtgggttatacatccagtggaaatccaatcttccgtaacccctgcacagagcagattctgaaacttcttgacaatttgcttgcgcttataagaacccacaatacattatatgcaccagaaatgctagccaaaatggcagagcctttcaccaaggctctggatatgcttgacgcggaaaaatctgctatattaggattacctcaacctctcttggaactcaatgactctcctgtcttcaaaaccgtcttggaaagaatgcagcgtttcttctctaccctctatgaaaactgttttcatatcctagggaaggcaggcccttccatgcagcaagacttctatactgtggaggaccttgctacccagcttctcagctcagcctttgtcaacttgaacaatattcctgactaccgactcagacccatgcttcgtgtctttgtaaagcctctggtgctcttctgtcccccagagcactatgaagccctggtatcccccatcctcggacctcttttcacctacctccatatgaggctttctcagaaatggcaagttatcaaccaaaggagcctgctgtgtggagaagatgaggctgcagatgaaaacccagagtctcaagagatgctggaggagcaactggtgaggatgttaacccgagaagtcatggacctaatcacggtttgctgtgtttcaaagaagggtgctgaccacagtagtgctcccccagcagatggagacgatgaagaaatgatggccacagaggtcaccccctcagctatggcagagcttacagacctgggcaaatgtctgatgaagcatgaggatgtttgtacagcgctattaattacagccttcaattccctggcctggaaagatactctgtcctgccagaggacaacctcacagctctgctggcctctcctcaaacaagtgctgtcagggacactgctcgcagatgcagttacgtggcttttcaccagtgtgctgaaaggcttacagatgcacgggcagcacgacgggtgcatggcttccctggtccatctggccttccagatatacgaggcactgcgccccaggtacctggagataagagctgtaatggagcaaatccctgaaatacagaaggactcactggaccagtttgactgcaagcttttaaacccctccctgcagaaagtggctgacaagcgccgaaaggaccaattcaaacgcctcattgctggttgcattgggaaacccttgggagagcagttccgaaaagaagttcacattaagaatcttccctcacttttcaaaaaaacaaagccaatgctggagacggaggtgctggacaatgatgggggtggcctggccaccatctttgaaccctgaatcaagcttttgggcatccttcctcggcctttcttgtcatctcttctttccctttgtagccgatctctaggcccttcttgcactgccacctcactttccaccactgtcagcctggaaagagatccaggtctggagctggagagaacaggccctgtgcaggaccagaagtaattatactaaagtatcaagaaagggagttagggcttaaactattctgtctagatgtcccagatagttcccattctacttggagatttggcttttccaagaaaagctagagcagagcagcccttctcccacaagccctcccacccccgtgcagccacatacctgtacagaatggtaactaagggtgctgtgcccaaccctgcgactagcaaggctcgcagcaagagcacagccctcaactacttgtgccagagtttctcttggaccactccaactcccactgagcccttttgctgctgggctggcaggaaactttccccactccctaaggggcatgtctgggttaggtgctaagtgctgaagagaacttggtcagttctctcaactttgctttgggcaagaatctggtcacctgatgggatccatggtacaggctactgctaaacttggcacagtatcaagtatagtacctccaaggaccagggctgggaagtctttagtgctaacatcccctttagagttcacacatcttgcccttccatgaatgacccctcagtctggcctccccagcctcaaggtccactcaggcacaagagccacagtaccctagatagtgtcacatgacaccgttgtcatccaaggataatacagaccaactaggctacatctgtgatgagcagctagcaaagccgctggtcttctcctaggactaagtccaggtgccttccacaatctcatggtctttcaggtccctggttacttttctcaaaggccatttccaaaagaatacatgccttcacatcacaacctgtactgtgagtccattctagaggtcactgaaaggccctgtaaagagaggacatggatacgggacctggccctgaggttattactggccgtaaggcagagttaatccatacagaaaccagtgtgtccatgtgctctgcacaaaaacagacctgttgtccatccagtccactgacaagagggtttccccgagagccgaagtggactgaagctacagtttttagctggtgcgggccacaggcagggtcagattgagaagaagcaaagctggggaagcagaagttgggagtcttgtgttgctccctcttcctgtgtggtgctctgggtttctgtggatcgtgaaggcgatctcaagagtgtttccctccaaacctgatagctgcctattcctgtctggttggggctgtggaggatgtagttgtatttattgcattgtaatatttttaacatcctgtgacttcatgctagaaattttctattgtttatagaaactttttgtagaaacattaactctaaagcacatctgcatgtcagtaaaaatctcagtttcgtacagaaaggga

SEQ ID NO: 131660 - DNA, 568 bp, Homo sapiens
  Payload ID: 5696
  Gene Symbol: XPO5
  Gene Name: exportin 5
  ENST ID: ENST00000398799
  CDS Start-End: 122-352
agcttcccacccccgccgcccgccgcggcccggtaccaacgggtggtctcgccgagggagctgtcgtgcctcgtggtcccgggactgcagtggtgtgcgctctcggcgcgtggcgctaggcatggcgatggatcaagtaaacgcgctgtgcgagcagctggtgaaagcggtgacggtcatgatggaccccaactccacccagcgctaccggctggaagccctcaagttttgtgaggagtttaaagaaaagtgtcctatctgtgtcccctgtggcttgaggttggctgagaaaacacaagttgccatcgtcagacattttggccttcagatcctggaacacgttgtcaagtaaggagctcttggacattaccactgaagtctgagagaacagatctttatatcttatataacctatagagatgctgtttaggtttcggtggaacggcatgtctcgattggagaaggtgtatctgaagaacagtgtcatggagctgattgcaaatggaacattgaacattttggaagaggagaaccatattaaagatgctctgtctcgaattgtagtgga

SEQ ID NO: 131661 - DNA, 868 bp, Homo sapiens
  Payload ID: 5696
  Gene Symbol: XPO5
  Gene Name: exportin 5
  ENST ID: ENST00000398835
  CDS Start-End: 1-74
atgtgggtacagatcagaagagctgtgacccaggcctggaggatccgtgtggcttaaaccgtgcacgatcttgaattcttgagttagttcccacagcagagcagatggtcttttctatgaagtcattattttggctttaaggatctctaaatagctctgaagactgaaggtgtaatgaggaagtaggtcagaacttggtcagcaggatgagcttttgtgtatacagcattctgggtgtggtgaaacgaacttgctggcccactgacctagaagaggccaaagctgggggatttgtggtgggttatacatccagtggaaatccaatcttccgtaacccctgcacagagcagattctgaaacttcttgacaatttgcttgcgcttataagaacccacaatacattatatgcaccagaaatgctagccaaaatggcagagcctttcaccaaggctctggatatgcttgacgcggaaaaatctgctatattaggattacctcaacctctcttggaactcaatgactctcctgtcttcaaaaccgtcttggaaagaatgcagcgtttcttctctaccctctatgaaaactgttttcatatcctagggaaggcaggcccttccatgcagcaagacttctatactgtggaggaccttgctacccagcttctcagctcagcctttgtcaacttgaacaatattcctgactaccgactcagacccatgcttcgtgtctttgtaaagcctctggtgctcttctgtcccccagagcactatgaagccctggtatcccccatcctcggacctcttttcacctacctccatatgaggctttctcagaaatggcaagttatcaaccaaaggagcctgctgtg

SEQ ID NO: 131662 - DNA, 758 bp, Homo sapiens
  Payload ID: 5696
  Gene Symbol: XPO5
  Gene Name: exportin 5
  ENST ID: ENST00000455285
  CDS Start-End: 1-758
agcctctggtgctcttctgtcccccagagcactatgaagccctggtatcccccatcctcggacctcttttcacctacctccatatgaggctttctcagaaatggcaagttatcaaccaaaggagcctgctgtgtggagaagatgaggctgcagatgaaaacccagagtctcaagagatgctggaggagcaactggtgaggatgttaacccgagaagtcatggacctaatcacggtttgctgtgtttcaaagaagggtgctgaccacagtagtgctcccccagcagatggagacggatggagcttaacattctactctctgataacagatgaagaaatgatggccacagaggtcaccccctcagctatggcagagcttacagacctgggcaaatgtctgatgaagcatgaggatgtttgtacagcgctattaattacagccttcaattccctggcctggaaagatactctgtcctgccagaggacaacctcacagctctgctggcctctcctcaaacaagtgctgtcagggacactgctcgcagatgcagttacgtggcttttcaccagtgtgctgaaaggcttacagatgcacgggcagcacgacgggtgcatggcttccctggtccatctggccttccagatatacgaggcactgcgccccaggtacctggagataagagctgtaatggagcaaatccctgaaatacagaaggactcactggaccagtttgactgcaagcttttaaacccctccctg

SEQ ID NO: 131663 - DNA, 800 bp, Homo sapiens
  Payload ID: 5696
  Gene Symbol: XPO5
  Gene Name: exportin 5
  ENST ID: ENST00000496341
  CDS Start-End: 1-324
ggaggtttggtagaaaaacactacgtctttctgaagaggctctgtcaggtgttgtgtgcgctgggcaatcagctgtgtgcattgctgggtgcagattctgatgtagaaacaccatcaaactttggaaaatacctggaatcttttcttgctttcacaacccatccaagtcagtttctacgctcttcaactcagatgacttggggagccctcttcaggcatgaaatcctgtcccgtgatcctttgctattagcaataataccaaaatatcttcgtgcttccatgactaacttggtcaagcctcccgagcacaacaaggagaggtgatgaggttggcatgtcgtttggatcccaaaactagcttccagatggctggggagtggctaaagtatcaactatcaacttttcttgatgctggttctgtgaattcttgttctgcagttggaactggagaaggaagcctctgttccgtcttctcaccttcattcgtgcagtgggaagccatgactctttttttggaaagtgttatcacccagatgtttcgaacactaaatagagaagaaattcctgttaatgatggaatagagctattgcagatggttctgaactttgataccaaggatcccctcatcctgtcctgcgtccttactaatgtctctgcactctttccatttgtcacctacagaccagagttcctgccccaggtcttctctaagctattttcatctgtcacttttgaaactgttgaagaaagtaaggcccccagaacccgggcagtgaggaatgtgaggaggcatgcttgt

SEQ ID NO: 131664 - DNA, 601 bp, Homo sapiens
  Payload ID: 5696
  Gene Symbol: XPO5
  Gene Name: exportin 5
  ENST ID: ENST00000486936
  CDS Start-End: 1-182
ggctttctcagaaatggcaagttatcaaccaaaggagcctgctgtgtggagaagatgaggctgcagatgaaaacccagagtctcaagagatgctggaggagcaactgcggtttgctgtgtttcaaagaagggtgctgaccacagtagtgctcccccagcagatggagacgatgaagaaatgatggccacagaggtcaccccctcagctatggcagagcttacagacctgggcaaatgtctgatgaagcatgaggatgtttgtacagcgctattaattacagccttcaattccctggcctggaaagatactctgtcctgccagaggacaacctcacagctctgctggcctctcctcaaacaagtgctgtcagggacactgctcgcagatgcagttacgtggcttttcaccagtgtgctgaaaggcttacagatgcacgggcagcacgacgggtgcatggcttccctggtccatctggccttccagatatacgaggcactgcgccccaggtacctggagataagagctgtaatggagcaaatccctgaaatacagaaggactcactggaccagtttgactgcaagcttttaaacccctccctg

SEQ ID NO: 131665 - DNA, 4422 bp, Homo sapiens
  Payload ID: 5697
  Gene Symbol: XPO6
  Gene Name: exportin 6
  Uniprot ID: Q96QU8
  ENST ID: ENST00000304658
  CDS Start-End: 502-3879
ggcagtggccgtgtgggttgaggctgcgaggacagcgcgggcccccgggcctctcccctgagccggccgcctgggccgcgcggtcgaggcctgtcagcctccgcccgttcagcctcggggccggggccgccgccacctctgcccgcggaggccggggagcccctgcctgggcccgcagcctcccccgcgggggtcgggcccgggcgggggtcccgagcagctgccctcctcgccggcatccgagcctcatttcctgctttttcagtttccttggggaggggcgggtgggtctggatgaattgtctcggggtcccccgatgaggcgacccgggcggccctgccctttttagagggtcccctcggggcccggtggggaaggggttgtctttgcatgggtgggggacttcccgagtctgccgggaccatgacctgaactgtgcgagcgggacgtgtccgaagcccaagaaccagctcatctgagccgccccctccccggccagcatggcatctgaagaagcctctctcagggcattggaaagtctgatgacagaattttttcacgattgtacaaccaatgaaagaaaacgtgagatagaggagcttcttaataactttgcccagcaaataggagcctggagattctgcctgtactttctctccagcactaggaatgactatgtaatgatgtacagtttaacagtttttgagaatctgatcaataaaatgtggcttggggtcccatctcaggataagatggaaatccgtagctgtctgcccaaactccttttggctcaccataaaaccttaccttactttatccggaacaagctctgcaaagttattgttgatattggacgtcaggattggcccatgttctaccacgacttttttactaacattttacagttgatccagtcccctgtgacaaccccccttgggctgatcatgttgaagacaacttcagaagagctggcttgtccccgtgaggacctcagtgtggctcggaaggaggagttgcggaagctgctactggaccaggtgcagacagtgcttgggctactgacaggtatcttggagactgtctgggacaaacacagtgttactgctgccactccaccaccatccccgacctcaggagaaagtggtgacttactgagtaacctgttgcagagtcccagttcagccaaactgttgaatcagccaattcccatccttgatgtggagagtgagtatatctgttccctggctttggagtgcctggcccatctcttcagttggattcctctgtctgccagcatcaccccatccctccttaccaccatcttccactttgcacgatttggctgtgacatccgggccagaaagatggcgtcagttaacggcagcagccagaactgtgtctcgggtcaggagcgcggccggctgggggtcctggccatgtcctgcatcaatgaactcatgtccaagaactgtgtgcctatggaatttgaggagtatttactgcgtatgttccagcagactttctacctcctgcagaaaatcaccaaggataacaatgcccacacagtgaagagcaggctagaagagctcgatgagagctatatcgagaagtttactgactttcttcggctctttgtgagtgttcacctaagaagaatcgagtcttactcccagttccctgtggtggagtttttgacacttttgttcaagtacacatttcatcagcctactcatgaaggttacttctcttgtttggatatctggacgctgtttttggactatctgacaagtaaaattaaaagtcgtcttggagacaaggaagcagttctcaacaggtacgaagatgccctggtgctcctgctcacagaggtgttgaatcgaatccagttcagatacaaccaagcccagctggaggagttggatgatgagactctggatgacgatcagcagacggagtggcagcggtacttacggcagagcttggaggtggtggccaaagtgatggagctcctgcccacgcacgccttctccacactgttccctgttcttcaggacaatttagaagtttatttgggattacaacagtttatagtcacttcagggtcaggacacaggttgaacatcacggcggagaacgactgccggcggctgcactgctccctgagagacttgagctccctgctgcaggccgtgggccgcctggccgagtactttatcggggatgtgtttgctgcacggttcaatgatgccctcacagtcgtggaaaggttggtcaaagtcactctgtacggatctcagataaaattgtacaacattgaaactgctgtgccatcagtattgaaacctgacctcattgatgtgcatgctcagtccctggctgcgctgcaggcttactctcactggttagcacagtattgcagtgaagttcaccggcagaacacgcagcagttcgtgacactcatctctactaccatggatgcaatcacacctctaatcagcaccaaggtccaagacaagctgctgctatctgcgtgccacttactggtctcactggccaccaccgtgcggcccgtctttctgatcagcatccctgcagtgcagaaagtattcaacagaatcactgatgcctctgccctgcgacttgtcgataaggcccaggtgttggtgtgccgagccctctctaacatcttgctgcttccgtggccaaaccttccagagaatgagcagcagtggcccgtgcgctccatcaaccacgccagcctcatctctgcactctcccgggactatcgcaacctgaagcccagtgctgttgccccacagagaaagatgccactggatgacaccaaactgattatccaccagacactcagcgtcttagaagatattgtggagaatatctcgggggagtccaccaagtctcgacagatttgctaccagtcgctgcaggaatctgttcaggtctccctggccctctttccagcttttatccatcagtcagatgtgactgatgagatgctgagcttcttcctcactctgtttcgaggccttagagtacagatgggtgtgcctttcactgagcaaatcatacagactttcctcaacatgtttaccagagagcagttagccgagagcatcctccacgagggcagcacaggctgccgggtggtggagaagtttctgaagatcctgcaggtggtggtccaggagccaggccaggtgttcaagcccttcctccccagcatcatcgccctgtgcatggagcaagtgtatcccatcattgccgagcgtccctcccctgatgtgaaggccgagctgtttgagctccttttccggacgctccatcacaactggaggtacttcttcaagtccaccgtgctggccagtgtccagagggggatcgctgaggagcagatggagaatgagccccagttcagtgccatcatgcaggctttcggacagtcctttctccagcccgacatccacctttttaaacaaaatctcttctacttggagactctcaacaccaagcagaagctgtaccacaagaagatcttccggactgccatgctgttccagtttgtgaacgtgctgctccaggtcctggtccacaagtcccatgatcttctgcaggaggagattggcatcgccatctacaacatggcctcagtcgactttgatggcttctttgccgccttcctcccagagttcctgaccagctgtgatggtgtggatgccaaccagaaaagtgtgctggggcggaatttcaagatggatcgggacctgccctcattcacccagaatgtgcacaggctggtcaacgacctgcgctactacagactctgcaacgacagcctgccccctggcactgtgaagctctaggcctgctactgcctggggacacggacttctgctgctgccacctgcgccagccctaccttccaccacagatgtctcccagatgggccttggtcacactccttggcttctcccaccgcaagcaacgctgcctgcctctgccgctcctccacatcttgccgctgcccagcagagctggcttctgggtccacctgagcactggacggtgctcccagggcgttggagcaggcggaggggtgtgtggccaggtactaggaggcaccaggaaatcccgcggggtggcccatgcagaccaggcgcacgtggctcatggggcagaattgccaaggacagctcacgacagtgccaccttctcaccattccagccaaggagagatgtgacgttggaactgctctggcacttctgtcaagcctcccccgccccaattgccttgagatctctgctctttgtcagagatttgcaaagactcacgtttttgttgttttctcatcattccattgtgatactaagaaactaagaagcttaatgaaaagaaataaaatgcc

SEQ ID NO: 131666 - DNA, 703 bp, Homo sapiens
  Payload ID: 5697
  Gene Symbol: XPO6
  Gene Name: exportin 6
  ENST ID: ENST00000569315
  CDS Start-End: 1-462
atccacctttttaaacaaaatctcttctacttggagactctcaacaccaagcagaagctgtaccacaagaagatcttccggactgccatgctgttccagtttgtgaacgtgctgctccaggtcctggtccacaagtcccatgatcttctgcaggaggagattggcatcgccatctacaacatggcctcagtcgactttgatggcttctttgccgccttcctcccagagttcctgaccagctgtgatggtgtggatgccaaccagaaaagtgtgctggggcggaatttcaagatggatcgggtgaggagagaaagaggccgggctaagaggagggcagagtgggcacgcaagcctggcacctgtgcagcaaggagggggcacattgaggcctctgggcgtggtctgtgcccaccctgcagcttggcggcagctcacgagatgcctgctgacctggtgctgtagcctgattgaggggcacagccttttccccagtcttggtgtctgtagcacgtatgttcttagtctcagccatggaggtcccgagttcctggctctgcagcccctccatttgtcttggcatctttgttcatacccaggaccctgccgttctccctcctgggtgatgagccccggtggggccagcattggagtgtgcccaggcttgcattcaggctgagatggttggtgcttgggagctgcactt

SEQ ID NO: 131667 - DNA, 835 bp, Homo sapiens
  Payload ID: 5697
  Gene Symbol: XPO6
  Gene Name: exportin 6
  ENST ID: ENST00000564905
  CDS Start-End: 1-484
ggagtggcagcggtacttacggcagagcttggaggtggtggccaaagtgatggagctcctgcccacgcacgccttctccacactgttccctgttcttcaggacaatttagaagtttatttgggattacaacagtttatagtcacttcagggtcaggacacaggttgaacatcacggcggagaacgactgccggcggctgcactgctccctgagagacttgagctccctgctgcaggccgtgggccgcctggccgagtactttatcggggatgtgtttgctgcacggttcaatgatgccctcacagtcgtggaaaggttggtcaaagtcactctgtacggatctcagataaaattgtacaacattgaaactgctgtgccatcagtattgaaacctgacctcattgatgtgtccaagacaagctgctgctatctgcgtgccacttactggtctcactggccaccaccgtgcggcccgtctttctgatcagcatccctgcagtgcagaaagtattcaacagaatcactgatgcctctgccctgcgacttgtcgataaggcccaggtgttggtgtgccgagccctctctaacatcttgctgcttccgtggccaaaccttccagagaatgagcagcagtggcccgtgcgctccatcaaccacgccagcctcatctctgcactctcccgggactatcgcaacctgaagcccagtgctgttgccccacagagaaagatgccactggatgacaccaaactgattatccaccagacactcagcgtcttagaagatattgtggagaatatctcgggggagtccaccaagtctcgacagatttgct

SEQ ID NO: 131668 - DNA, 558 bp, Homo sapiens
  Payload ID: 5697
  Gene Symbol: XPO6
  Gene Name: exportin 6
  ENST ID: ENST00000570033
  CDS Start-End: 131-558
gctcttgctgttgaatgtgacctagaaggaactgaggaacagtggaactgaagatgcagcttattgattttttttcaaattcctttgttaggcatctgaagaagcctctctcagggcattggaaagtctgatgacagaattttttcacgattgtacaaccaatgaaagaaaacgtgagatagaggagcttcttaataactttgcccagcaaataggagcctggagattctgcctgtactttctctccagcactaggaatgactatgtaatgatgtacagtttaacagtttttgagaatctgatcaataaaatgtggcttggggtcccatctcaggataagatggaaatccgtagctgtctgcccaaactccttttggctcaccataaaaccttaccttactttatccggaacaagctctgcaaagttattgttgatattggacgtcaggattggcccatgttctaccacgacttttttactaacattttacagttgatccagtcccctgtgacaaccccccttgggctgatcatgttgaagacaacttcagaagagct

SEQ ID NO: 131669 - DNA, 715 bp, Homo sapiens
  Payload ID: 5697
  Gene Symbol: XPO6
  Gene Name: exportin 6
  ENST ID: ENST00000566073
  CDS Start-End: 664-715
ctagcgggcggctccagggcgggcgcgcgcaaggatgctctagggggcggcggcagtggccgtgtgggttgaggctgcgaggacagcgcgggcccccgggcctctcccctgagccggccgcctgggccgcgcggtcgaggcctgtcagcctccgcccgttcagcctcggggccggggccgccgccacctctgcccgcggaggccggggagcccctgcctgggcccgcagcctcccccgcgggggtcgggcccgggcgggggtcccgagcagctgccctcctcgccggcatccgagcctcatttcctgctttttcagtttccttggggaggggcgggtgggtctggatgaattgtctcggggtcccccgatgaggcgacccgggcggccctgccctttttagagggtcccctcggggcccggtggggaaggggttgtctttgcatgggtgggggacttcccgagtctgccgggaccatgacctgaactgtgcgagcgggacgtgtccgaagcccaagaaccagctcatctgagccgccccctccccggccagcatgtgttctcaagcttcatccgtgtggtggcgtgtgtcagagcttccttccttttgaaagctgaattccattgcatctgaagaagcctctctcagggcattggaaagtctgatgacagaattttttcacgattgtacaaccaatgaaagaaaacgtgagatag

SEQ ID NO: 131670 - DNA, 942 bp, Homo sapiens
  Payload ID: 5697
  Gene Symbol: XPO6
  Gene Name: exportin 6
  ENST ID: ENST00000568065
  CDS Start-End: 1-399
tcctttctccagcccgacatccacctttttaaacaaaatctcttctacttggagactctcaacaccaagcagaagctgtaccacaagaagatcttccggactgccatgctgttccagtttgtgaacgtgctgctccaggtcctggtccacaagtcccatgatcttctgcaggaggagattggcatcgccatctacaacatggcctcagtcgactttgatggcttctttgccgccttcctcccagagttcctgaccagctgtgatggtgtggatgccaaccagaaaagtgtgctggggcggaatttcaagatggatcggaatgtgcacaggctggtcaacgacctgcgctactacagactctgcaacgacagcctgccccctggcactgtgaagctctaggcctgctactgcctggggacacggacttctgctgctgccacctgcgccagccctaccttccaccacagatgtctcccagatgggccttggtcacactccttggcttctcccaccgcaagcaacgctgcctgcctctgccgctcctccacatcttgccgctgcccagcagagctggcttctgggtccacctgagcactggacggtgctcccagggcgttggagcaggcggaggggtgtgtggccaggtactaggaggcaccaggaaatcccgcggggtggcccatgcagaccaggcgcacgtggctcatggggcagaattgccaaggacagctcacgacagtgccaccttctcaccattccagccaaggagagatgtgacgttggaactgctctggcacttctgtcaagcctcccccgccccaattgccttgagatctctgctctttgtcagagatttgcaaagactcacgtttttgttgttttctcatcattccattgtgatactaagaaactaagaagcttaatgaaaagaaataaaatgcc

SEQ ID NO: 131671 - DNA, 4255 bp, Homo sapiens
  Payload ID: 5697
  Gene Symbol: XPO6
  Gene Name: exportin 6
  Uniprot ID: Q96QU8
  ENST ID: ENST00000565698
  CDS Start-End: 361-3696
gaggcgacccgggcggccctgccctttttagagggtcccctcggggcccggtggggaaggggttgtctttgcatgggtgggggacttcccgagtctgccgggaccatgacctgaactgtgcgagcgggacgtgtccgaagcccaagaaccagctcatctgagccgccccctccccggccagcatggtagctcatgtaagtggagtcatgaagtatttggcctgttgtgactgccttatttcacatggcacagtgttctcaagcttcatccgtgtggtggcgtgtgtcagagcttccttccttttgaaagctgaattccattgcatctgaagaagcctctctcagggcattggaaagtctgatgacagaattttttcacgattgtacaaccaatgaaagaaaacgtgagatagaggagcttcttaataactttgcccagcaaataggagcctggagattctgcctgtactttctctccagcactaggaatgactatgtaatgatgtacagtttaacagtttttgagaatctgatcaataaaatgtggcttggggtcccatctcaggataagatggaaatccgtagctgtctgcccaaactccttttggctcaccataaaaccttaccttactttatccggaacaagctctgcaaagttattgttgatattggacgtcaggattggcccatgttctaccacgacttttttactaacattttacagttgatccagtcccctgtgacaaccccccttgggctgatcatgttgaagacaacttcagaagagctggcttgtccccgtgaggacctcagtgtggctcggaaggaggagttgcggaagctgctactggaccaggtgcagacagtgcttgggctactgacaggtatcttggagactgtctgggacaaacacagtgttactgctgccactccaccaccatccccgacctcaggagaaagtggtgacttactgagtaacctgttgcagagtcccagttcagccaaactgttgaatcagccaattcccatccttgatgtggagagtgagtatatctgttccctggctttggagtgcctggcccatctcttcagttggattcctctgtctgccagcatcaccccatccctccttaccaccatcttccactttgcacgatttggctgtgacatccgggccagaaagatggcgtcagttaacggcagcagccagaactgtgtctcgggtcaggagcgcggccggctgggggtcctggccatgtcctgcatcaatgaactcatgtccaagaactgtgtgcctatggaatttgaggagtatttactgcgtatgttccagcagactttctacctcctgcagaaaatcaccaaggataacaatgcccacacagtgaagagcaggctagaagagctcgatgagagctatatcgagaagtttactgactttcttcggctctttgtgagtgttcacctaagaagaatcgagtcttactcccagttccctgtggtggagtttttgacacttttgttcaagtacacatttcatcagcctactcatgaaggttacttctcttgtttggatatctggacgctgtttttggactatctgacaagtaaaattaaaagtcgtcttggagacaaggaagcagttctcaacaggtacgaagatgccctggtgctcctgctcacagaggtgttgaatcgaatccagttcagatacaaccaagcccagctggaggagttggatgatgagactctggatgacgatcagcagacggagtggcagcggtacttacggcagagcttggaggtggtggccaaagtgatggagctcctgcccacgcacgccttctccacactgttccctgttcttcaggacaatttagaagtttatttgggattacaacagtttatagtcacttcagggtcaggacacaggttgaacatcacggcggagaacgactgccggcggctgcactgctccctgagagacttgagctccctgctgcaggccgtgggccgcctggccgagtactttatcggggatgtgtttgctgcacggttcaatgatgccctcacagtcgtggaaaggttggtcaaagtcactctgtacggatctcagataaaattgtacaacattgaaactgctgtgccatcagtattgaaacctgacctcattgatgtgcatgctcagtccctggctgcgctgcaggcttactctcactggttagcacagtattgcagtgaagttcaccggcagaacacgcagcagttcgtgacactcatctctactaccatggatgcaatcacacctctaatcagcaccaaggtccaagacaagctgctgctatctgcgtgccacttactggtctcactggccaccaccgtgcggcccgtctttctgatcagcatccctgcagtgcagaaagtattcaacagaatcactgatgcctctgccctgcgacttgtcgataaggcccaggtgttggtgtgccgagccctctctaacatcttgctgcttccgtggccaaaccttccagagaatgagcagcagtggcccgtgcgctccatcaaccacgccagcctcatctctgcactctcccgggactatcgcaacctgaagcccagtgctgttgccccacagagaaagatgccactggatgacaccaaactgattatccaccagacactcagcgtcttagaagatattgtggagaatatctcgggggagtccaccaagtctcgacagatttgctaccagtcgctgcaggaatctgttcaggtctccctggccctctttccagcttttatccatcagtcagatgtgactgatgagatgctgagcttcttcctcactctgtttcgaggccttagagtacagatgggtgtgcctttcactgagcaaatcatacagactttcctcaacatgtttaccagagagcagttagccgagagcatcctccacgagggcagcacaggctgccgggtggtggagaagtttctgaagatcctgcaggtggtggtccaggagccaggccaggtgttcaagcccttcctccccagcatcatcgccctgtgcatggagcaagtgtatcccatcattgccgagcgtccctcccctgatgtgaaggccgagctgtttgagctccttttccggacgctccatcacaactggaggtacttcttcaagtccaccgtgctggccagtgtccagagggggatcgctgaggagcagatggagaatgagccccagttcagtgccatcatgcaggctttcggacagtcctttctccagcccgacatccacctttttaaacaaaatctcttctacttggagactctcaacaccaagcagaagctgtaccacaagaagatcttccggactgccatgctgttccagtttgtgaacgtgctgctccaggtcctggtccacaagtcccatgatcttctgcaggaggagattggcatcgccatctacaacatggcctcagtcgactttgatggcttctttgccgccttcctcccagagttcctgaccagctgtgatggtgtggatgccaaccagaaaagtgtgctggggcggaatttcaagatggatcgggacctgccctcattcacccagaatgtgcacaggctggtcaacgacctgcgctactacagactctgcaacgacagcctgccccctggcactgtgaagctctaggcctgctactgcctggggacacggacttctgctgctgccacctgcgccagccctaccttccaccacagatgtctcccagatgggccttggtcacactccttggcttctcccaccgcaagcaacgctgcctgcctctgccgctcctccacatcttgccgctgcccagcagagctggcttctgggtccacctgagcactggacggtgctcccagggcgttggagcaggcggaggggtgtgtggccaggtactaggaggcaccaggaaatcccgcggggtggcccatgcagaccaggcgcacgtggctcatggggcagaattgccaaggacagctcacgacagtgccaccttctcaccattccagccaaggagagatgtgacgttggaactgctctggcacttctgtcaagcctcccccgccccaattgccttgagatctctgctctttgtcagagatttgcaaagactcacgtttttgttgttttctcatcattccattgtgatactaagaaactaagaagcttaatgaaaagaaataaaatgcctatgttgttgttctag

SEQ ID NO: 131672 - DNA, 262 bp, Homo sapiens
  Payload ID: 5697
  Gene Symbol: XPO6
  Gene Name: exportin 6
  ENST ID: ENST00000569951
  CDS Start-End: 198-262
gggtgggggacttcccgagtctgccgggaccatgacctgaactgtgcgagcgggacgtgtccgaagcccaagaaccagctcatctgagccgccccctccccggccagcatgaggagcttcttaataactttgcccagcaaataggagcctggagattctgcctgtactttctctccagcactaggaatgactatgtaatgatgtacagtttaacagtttttgagaatctgatcaataaaatgtggcttggggtcccatctca

SEQ ID NO: 131673 - DNA, 403 bp, Homo sapiens
  Payload ID: 5697
  Gene Symbol: XPO6
  Gene Name: exportin 6
  ENST ID: ENST00000573275
  CDS Start-End: 1-403
tgcactctcccgggactatcgcaacctgaagcccagtgctgttgccccacagagaaagatgccactggatgacaccaaactgattatccaccagacactcagcgtcttagaagatattgtggagaatatctcgggggagtccaccaagtctcgacagatttgctaccagtcgctgcaggaatctgttcaggtctccctggccctctttccagcttttatccatcagtcaggccttagagtacagatgggtgtgcctttcactgagcaaatcatacagactttcctcaacatgtttaccagagagcagttagccgagagcatcctccacgagggcagcacaggctgccgggtggtggagaagtttctgaagatcctgcaggtggtggtccaggagccaggccag

SEQ ID NO: 131674 - DNA, 248 bp, Homo sapiens
  Payload ID: 5697
  Gene Symbol: XPO6
  Gene Name: exportin 6
  ENST ID: ENST00000566175
  CDS Start-End: 1-60
aatgcccacacagtgaagagcaggctagaagagctcgatgagaggtggttaatggaatgaagggttgcctgtcctgtagctatatcgagaagtttactgactttcttcggctctttgtgagtgttcacctaagaagaatcgagtcttactcccagttccctgtggtggagtttttgacacttttgttcaagtacacatttcatcagcctactcatgaaggttacttctcttgtttggatatctggacg

SEQ ID NO: 131675 - DNA, 765 bp, Homo sapiens
  Payload ID: 5697
  Gene Symbol: XPO6
  Gene Name: exportin 6
  ENST ID: ENST00000574435
  CDS Start-End: 1-765
gtcccctgtgacaaccccccttgggctgatcatgttgaagacaacttcagaagagctggcttgtccccgtgaggacctcagtgtggctcggaaggaggagttgcggaagctgctactggaccaggtgcagacagtgcttgggctactgacaggtgacttactgagtaacctgttgcagagtcccagttcagccaaactgttgaatcagccaattcccatccttgatgtggagagtgagtatatctgttccctggctttggagtgcctggcccatctcttcagttggattcctctgtctgccagcatcaccccatccctccttaccaccatcttccactttgcacgatttggctgtgacatccgggccagaaagatggcgtcagttaacggcagcagccagaactgtgtctcgggtcaggagcgcggccggctgggggtcctggccatgtcctgcatcaatgaactcatgtccaagaactgtgtgcctatggaatttgaggagtatttactgcgtatgttccagcagactttctacctcctgcagaaaatcaccaaggataacaatgcccacacagtgaagagcaggctagaagagctcgatgagagctatatcgagaagtttactgactttcttcggctctttgtgagtgttcacctaagaagaatcgagtcttactcccagttccctgtggtggagtttttgacacttttgttcaagtacacatttcatcagcctactcatgaaggttacttctcttgtttgga

SEQ ID NO: 131676 - DNA, 4861 bp, Homo sapiens
  Payload ID: 5698
  Gene Symbol: XPO7
  Gene Name: exportin 7
  Uniprot ID: Q9UIA9
  ENST ID: ENST00000252512
  CDS Start-End: 101-3364
gcgcagcggcgacggcgtcggcggcggcggcggcagcggctccggccgaggtgcgcgctgggggggagggggggccggagaggagcatgaatggagcaaaatggcggatcatgtgcagagcctggcccaactagagaatctgtgcaaacagctgtatgaaaccacagacacaaccactcgactccaggcagagaaagccttggttgaatttaccaacagccctgattgcctgagcaagtgccagctactcctcgaaagaggaagttcctcttactcccagttactggcagctacatgccttaccaagcttgtatcacgcacaaacaaccccctaccattggaacagcgaatagatattcggaactatgtgctcaactaccttgccactcggccgaagttggctactttcgtgacacaagcacttattcagttatatgccagaatcacaaaactgggctggtttgactgtcagaaggatgactatgtcttcagaaatgcaatcacagacgtcacaaggtttttacaggatagtgttgaatactgcatcattggtgtcacaattttatctcagctaaccaatgaaattaatcaagcagacaccacccatcctttaaccaagcacagaaaaatagcctcttcttttcgcgattcatcattatttgatatcttcacactttcctgcaatttactaaaacaggcttcaggaaagaatctaaacttgaatgatgaaagtcagcatggcttgctcatgcaactgctcaagctcactcataactgcctcaactttgacttcatcggcacttccactgatgagtcctcagacgacctgtgtacagtgcagattcccaccagctggagatcagccttcttagattcttcaaccttgcagctgttttttgacctgtatcattccatccctccttcattttcacctctggtattatcctgcttggtacagatcgcttcagtcagaagatccctgtttaacaatgcagagagggccaagtttctctctcatcttgttgatggtgttaaacgaatactggaaaacccacagagtttatcagacccaaacaattaccatgagttttgcagactactggcccgattgaagagtaactatcaactgggagaattggtaaaggtggaaaactaccctgaggtcatccgattgatagccaacttcacagtgaccagcctacagcactgggaatttgctccaaatagtgtgcactatcttctgagcctgtggcagcggctggcagcctctgtgccgtatgtcaaagccacagagccccacatgctggaaacttacactcctgaggtcaccaaagcctacatcacatcccggttggaatctgtgcacatcatactgagagatggcctggaagatcccctggaggatacggggctggtccagcagcagttggaccagctgtccaccattgggcgttgtgaatatgagaagacgtgtgcactcctcgtgcagttgtttgaccagtcggcccagtcgtaccaggagctgctacagagcgccagcgcaagcccaatggacattgcagtgcaggagggaaggctgacatggctggtttacattattggagcagtgatcggtggccgggtttcttttgccagcactgatgagcaagacgccatggatggtgagcttgtctgtcgggtgctccagctgatgaacctaacagattctcgtttggcccaggcgggtaatgagaagctagagttggccatgctgagcttttttgaacagtttcgtaagatctacattggggaccaagtgcagaaatcctctaagctgtaccgccgactctcagaagttctgggcttgaatgatgagaccatggtcctaagcgtcttcataggaaaaatcatcaccaacttgaagtactggggccgttgtgaaccaatcacctccaagacactacagcttctcaatgacctgtccattgggtacagtagcgtaaggaagctagtgaagcttagtgcggtacagttcatgctgaacaatcacacgagcgagcacttttcatttttgggtattaacaatcagtccaacctgacagacatgcggtgtcggactaccttctacacagcacttgggcgtctcctcatggtggatttaggagaggatgaagatcagtatgagcagttcatgctgccactcacagcagcatttgaggctgtggcccagatgtttagcaccaatagtttcaacgagcaggaggcaaagcgaactctagttggcctagtaagagacctgagagggatcgctttcgctttcaatgccaagaccagcttcatgatgctctttgaatggatatatccatcctatatgccaattctccaacgggcaattgagctctggtaccatgatccagcctgtactacacctgtactcaagttgatggctgaattggttcataataggtcccagcgactccagtttgatgtctcttcccccaatggcatcttactcttccgagaaaccagcaagatgataacaatgtatggcaatcgcatcctgacactaggagaggtcccaaaggatcaggtctatgctctgaagctcaagggcatctccatctgcttctccatgctgaaggctgctctcagtgggagttacgtcaatttcggagtctttcgtctctatggagacgatgccctggacaatgctctgcagaccttcatcaagctgctcctctctattcctcacagtgatctcttggattaccccaagctcagccagtcttattattcactactggaagtcctgacccaggaccatatgaactttattgcaagcctggaacctcacgtcatcatgtatattctctcttccatttctgaaggacttactgcacttgacaccatggtatgcacaggctgctgctcctgcctggaccacattgtgacatacctcttcaagcagctgtcacgtagcaccaagaagaggaccacacccctgaaccaggagagcgaccgctttctgcacatcatgcagcagcatccagagatgatccagcagatgctgtccacggtgctgaacatcatcatctttgaagactgtaggaaccagtggtctatgtcccgaccactacttggcttgatattgcttaatgaaaagtatttttctgacctaagaaacagtattgtgaacagccagccaccggagaagcagcaggccatgcacctgtgttttgagaacctgatggaaggcatcgagcgaaatcttcttacgaaaaacagagacaggttcacccagaacctgtcagcattccgtcgagaagtcaacgactcaatgaagaattccacttatggcgtgaatagcaatgacatgatgagctgacacctccttggactctacctgtacagagcagcgtccctttggtttggcccagaggggcgaacaattgcaagggagagggcctggctgatcctggctcttttctccaggggtgtggggaaaatggcaaaggtcaactagctgcttccccagggaataggggtgtgagtacactcactagggggcagggcgctgctggttcctgggggactgggtgggaagggtggtgggaggagataagagatacaaactgagactccagcctctcctcctggggccacccaagtggggagaacccctagtgtcctgccacaacctgccttgtataaacatgtacattttttcataacattttgaacaaggtttatattgactcaagtttaaaaacaaaaagtgtgactgaaaaatttttacagagtctagtgcaccaatgctgatgtgaggggttgtgtatgcgagtgaagaaaatgtgtattctggtggcctgaagctttactggacaaggatgtgtgagagtgcagagatatatttagtgacacagtagagaggcaaaaaaaaagctaaaattccaaatgtatattttttcgtattgccctgtcctcacccagaaatgatcaattcctgttactgtattaacccttgttattaggaactctaagccatgccagaacaccgtccctccccttggaccgtgtagattctgccctgggtccctagccccttgcagtgataaataactccagctaaaagtgtttggtgttcttatctccaccctctttcctactttgcttaccctcatcctcagacagatgcctcttgcttttaaaagttggatttaacgacgtgttgtagggttcttggtctgtgtgaaggcagagaccagagagaaggaagtgagcccactgctctcctgggagcaatgtgggtgagtccaccagaggccctgctgtgtgtggccaataaattttagtcttccccagccctcgaggcagtgtgtgtggatgtatgcgtgtggatatttatatatgtaccctgcactcatgaatgtatgaactggaggaagttactacagtggaagggttcttaataacaaggtctacctagcatgaagtatttaacattctcccatcccttaaaaaatatacatttttataaaatgaaaaccataataaatgttttgaatattaaaaaaaataataacctacagaggaaaattaatggagacagctatttgccttgtactttttccacaattgttgctgctagttgtacacatctctagttcagctcttgcccacgggacactcatcaattaggttttatttttatttctttcctctacccccagaaacaagcctgttaattttttttccttctcctctggcgactgtgtgatgaatcctttcttgcgtgatcaggttgcggatagacttgtaagggtgtttgctgcatacagtgtaagcattgtgaccgccaataaacttcaatggtttctactga

SEQ ID NO: 131677 - DNA, 4519 bp, Homo sapiens
  Payload ID: 5698
  Gene Symbol: XPO7
  Gene Name: exportin 7
  ENST ID: ENST00000433566
  CDS Start-End: 56-3322
ggaaccaaagtaagagtttaaagtgcaacagaagagagtctgctgaactttagacatgagggatccagggaggaagagcctggcccaactagagaatctgtgcaaacagctgtatgaaaccacagacacaaccactcgactccaggcagagaaagccttggttgaatttaccaacagccctgattgcctgagcaagtgccagctactcctcgaaagaggaagttcctcttactcccagttactggcagctacatgccttaccaagcttgtatcacgcacaaacaaccccctaccattggaacagcgaatagatattcggaactatgtgctcaactaccttgccactcggccgaagttggctactttcgtgacacaagcacttattcagttatatgccagaatcacaaaactgggctggtttgactgtcagaaggatgactatgtcttcagaaatgcaatcacagacgtcacaaggtttttacaggatagtgttgaatactgcatcattggtgtcacaattttatctcagctaaccaatgaaattaatcaagcagacaccacccatcctttaaccaagcacagaaaaatagcctcttcttttcgcgattcatcattatttgatatcttcacactttcctgcaatttactaaaacaggcttcaggaaagaatctaaacttgaatgatgaaagtcagcatggcttgctcatgcaactgctcaagctcactcataactgcctcaactttgacttcatcggcacttccactgatgagtcctcagacgacctgtgtacagtgcagattcccaccagctggagatcagccttcttagattcttcaaccttgcagctgttttttgacctgtatcattccatccctccttcattttcacctctggtattatcctgcttggtacagatcgcttcagtcagaagatccctgtttaacaatgcagagagggccaagtttctctctcatcttgttgatggtgttaaacgaatactggaaaacccacagagtttatcagacccaaacaattaccatgagttttgcagactactggcccgattgaagagtaactatcaactgggagaattggtaaaggtggaaaactaccctgaggtcatccgattgatagccaacttcacagtgaccagcctacagcactgggaatttgctccaaatagtgtgcactatcttctgagcctgtggcagcggctggcagcctctgtgccgtatgtcaaagccacagagccccacatgctggaaacttacactcctgaggtcaccaaagcctacatcacatcccggttggaatctgtgcacatcatactgagagatggcctggaagatcccctggaggatacggggctggtccagcagcagttggaccagctgtccaccattgggcgttgtgaatatgagaagacgtgtgcactcctcgtgcagttgtttgaccagtcggcccagtcgtaccaggagctgctacagagcgccagcgcaagcccaatggacattgcagtgcaggagggaaggctgacatggctggtttacattattggagcagtgatcggtggccgggtttcttttgccagcactgatgagcaagacgccatggatggtgagcttgtctgtcgggtgctccagctgatgaacctaacagattctcgtttggcccaggcgggtaatgagaagctagagttggccatgctgagcttttttgaacagtttcgtaagatctacattggggaccaagtgcagaaatcctctaagctgtaccgccgactctcagaagttctgggcttgaatgatgagaccatggtcctaagcgtcttcataggaaaaatcatcaccaacttgaagtactggggccgttgtgaaccaatcacctccaagacactacagcttctcaatgacctgtccattgggtacagtagcgtaaggaagctagtgaagcttagtgcggtacagttcatgctgaacaatcacacgagcgagcacttttcatttttgggtattaacaatcagtccaacctgacagacatgcggtgtcggactaccttctacacagcacttgggcgtctcctcatggtggatttaggagaggatgaagatcagtatgagcagttcatgctgccactcacagcagcatttgaggctgtggcccagatgtttagcaccaatagtttcaacgagcaggaggcaaagcgaactctagttggcctagtaagagacctgagagggatcgctttcgctttcaatgccaagaccagcttcatgatgctctttgaatggatatatccatcctatatgccaattctccaacgggcaattgagctctggtaccatgatccagcctgtactacacctgtactcaagttgatggctgaattggttcataataggtcccagcgactccagtttgatgtctcttcccccaatggcatcttactcttccgagaaaccagcaagatgataacaatgtatggcaatcgcatcctgacactaggagaggtcccaaaggatcaggtctatgctctgaagctcaagggcatctccatctgcttctccatgctgaaggctgctctcagtgggagttacgtcaatttcggagtctttcgtctctatggagacgatgccctggacaatgctctgcagaccttcatcaagctgctcctctctattcctcacagtgatctcttggattaccccaagctcagccagtcttattattcactactggaagtcctgacccaggaccatatgaactttattgcaagcctggaacctcacgtcatcatgtatattctctcttccatttctgaaggacttactgcacttgacaccatggtatgcacaggctgctgctcctgcctggaccacattgtgacatacctcttcaagcagctgtcacgtagcaccaagaagaggaccacacccctgaaccaggagagcgaccgctttctgcacatcatgcagcagcatccagagatgatccagcagatgctgtccacggtgctgaacatcatcatctttgaagactgtaggaaccagtggtctatgtcccgaccactacttggcttgatattgcttaatgaaaagtatttttctgacctaagaaacagtattgtgaacagccagccaccggagaagcagcaggccatgcacctgtgttttgagaacctgatggaaggcatcgagcgaaatcttcttacgaaaaacagagacaggttcacccagaacctgtcagcattccgtcgagaagtcaacgactcaatgaagaattccacttatggcgtgaatagcaatgacatgatgagctgacacctccttggactctacctgtacagagcagcgtccctttggtttggcccagaggggcgaacaattgcaagggagagggcctggctgatcctggctcttttctccaggggtgtggggaaaatggcaaaggtcaactagctgcttccccagggaataggggtgtgagtacactcactagggggcagggcgctgctggttcctgggggactgggtgggaagggtggtgggaggagataagagatacaaactgagactccagcctctcctcctggggccacccaagtggggagaacccctagtgtcctgccacaacctgccttgtataaacatgtacattttttcataacattttgaacaaggtttatattgactcaagtttaaaaacaaaaagtgtgactgaaaaatttttacagagtctagtgcaccaatgctgatgtgaggggttgtgtatgcgagtgaagaaaatgtgtattctggtggcctgaagctttactggacaaggatgtgtgagagtgcagagatatatttagtgacacagtagagaggcaaaaaaaaagctaaaattccaaatgtatattttttcgtattgccctgtcctcacccagaaatgatcaattcctgttactgtattaacccttgttattaggaactctaagccatgccagaacaccgtccctccccttggaccgtgtagattctgccctgggtccctagccccttgcagtgataaataactccagctaaaagtgtttggtgttcttatctccaccctctttcctactttgcttaccctcatcctcagacagatgcctcttgcttttaaaagttggatttaacgacgtgttgtagggttcttggtctgtgtgaaggcagagaccagagagaaggaagtgagcccactgctctcctgggagcaatgtgggtgagtccaccagaggccctgctgtgtgtggccaataaattttagtcttccccagccctcgaggcagtgtgtgtggatgtatgcgtgtggatatttatatatgtaccctgcactcatgaatgtatgaactggaggaagttactacagtggaagggttcttaataacaaggtctacctagcatgaagtatttaacattctcccatcccttaaaaaatatacatttttataaaatgaaaaccataataaatgttttgaatattaaaaaaaataataa

SEQ ID NO: 131678 - DNA, 569 bp, Homo sapiens
  Payload ID: 5698
  Gene Symbol: XPO7
  Gene Name: exportin 7
  ENST ID: ENST00000521303
  CDS Start-End: 1-569
atgaatggagcaaaatggcggatcatgtgcagagcctggcccaactagagaatctgtgcaaacagctgtatgaaaccacagacacaaccactcgactccaggcagagaaagccttggttgaatttaccaacagccctgattgcctgagcaagtgccagctactcctcgaaagaggaagttcctcttactcccagttactggcagctacatgccttaccaagcttgtatcacgcacaaacaaccccctaccattggaacagcgaatagatattcggaactatgtgctcaactaccttgccactcggccgaagttggctactttcgtgacacaagcacttattcagttatatgccagaatcacaaaactgggctggtttgactgtcagaaggatgactatgtcttcagaaatgcaatcacagacgtcacaaggtttttacaggatagtgttgaatactgcatcattggtgtcacaattttatctcagctaaccaatgaaattaatcaagtaagtgctacagccttcctcattgaagcagacaccacccatcctttaaccaagcacagaaaa

SEQ ID NO: 131679 - DNA, 883 bp, Homo sapiens
  Payload ID: 5698
  Gene Symbol: XPO7
  Gene Name: exportin 7
  ENST ID: ENST00000517551
  CDS Start-End: 172-883
attgctactaatacctgttgggataataaagggacccccttgagttcccctgggtttgctcctctttcatcccatcttcccatatatgcacagctttgaattcttggtattggggttacaccctgggatgtttcctttacaggagaggatgaagatcagtatgagcagttcatgctgccactcacagcagcatttgaggctgtggcccagatgtttagcaccaatagtttcaacgagcaggaggcaaagcgaactctagttggcctagtaagagacctgagagggatcgctttcgctttcaatgccaagaccagcttcatgatgctctttgaatggatatatccatcctatatgccaattctccaacgggcaattgagctctggtaccatgatccagcctgtactacacctgtactcaagttgatggctgaattggttcataataggtcccagcgactccagtttgatgtctcttcccccaatggcatcttactcttccgagaaaccagcaagatgataacaatgtatggcaatcgcatcctgacactaggagaggtcccaaaggatcaggtctatgctctgaagctcaagggcatctccatctgcttctccatgctgaaggctgctctcagtgggagttacgtcaatttcggagtctttcgtctctatggagacgatgccctggacaatgctctgcagaccttcatcaagctgctcctctctattcctcacagtgatctcttggattaccccaagctcagccagtcttattattcactactggaagtcctgacccaggaccatatgaactttattgcaagcctggaacctcacgtcatcatgtatattctctcttccatttctgaaggacttactgcacttg

SEQ ID NO: 131680 - DNA, 6414 bp, Homo sapiens
  Payload ID: 5699
  Gene Symbol: XPOT
  Gene Name: exportin, tRNA
  Uniprot ID: O43592
  ENST ID: ENST00000332707
  CDS Start-End: 530-3418
gagttgtaggcctccggcgtcagcccgcgggctgccgcccgcactctccaagagactgctggcgccggcgcccgcccgcgcggcaccgacgcggggagcgcgcttcgcgctgactcagcggcggcggcggctgcggcggcggcggcggcgttagccggccctcgcgctctttcccttcctggggcgccgaccccgcccgcttgcttgcttgcttgcttgcctgcctgcctgcctgcccggcgccacgcaagagaaggtgccaggggacgcagagcgactagaggcgcgcggtcccggccagcaccgtctctggcgttgtagctgcggccgtggcggaggactacggcgacaaggacgagggccgctctcccagctctctgcgtgccgcgccgctccgctccgctggctgaccatctggagtgcaggctgggaggcgggatggagtgatagggaagatgtttataaattcttctgtgggatcagagggcacgcctattacaaccagaaaactacaagtataacagcgaggatggatgaacaggctctattagggctaaatccaaatgctgattcagactttagacaaagggccctggcctattttgagcagttaaaaatttccccagatgcctggcaggtgtgtgcagaagctctagcccagaggacatacagtgatgatcatgtgaagtttttctgctttcaagtactggaacatcaagttaaatacaaatactcagaactaaccactgttcaacaacagctaattagggagacgctcatatcatggctgcaagctcagatgctgaatccccaaccagagaagacctttatacgaaataaagccgcccaagtcttcgccttgctttttgttacagagtatctcactaagtggcccaagtttttttttgacattctctcagtagtggacctaaatccaaggggagtagatctctacctgcgaatcctcatggctattgattcagagttggtggatcgtgatgtggtgcatacatcagaggaggctcgtaggaatactctcataaaagataccatgagggaacagtgcattccaaatctggtggaatcatggtaccaaatattacaaaattatcagtttactaattctgaagtgacgtgtcagtgccttgaagtagttggggcttatgtctcttggatagacttatcccttatagccaatgataggtttataaatatgctgctaggtcatatgtcaatagaagttctacgggaagaagcatgtgactgtttatttgaagttgtaaataaaggaatggaccctgttgataaaatgaaactagtggaatctttgtgtcaagtattacagtctgctgggtttttcagcattgaccaggaagaagatgttgacttcctggccagattttctaagttggtaaatggaatgggacagtcattgatagttagttggagtaaattaattaagaatggggatattaagaatgctcaagaggcactacaagctattgaaacaaaagtggcactgatgttgcagctactaattcatgaggatgatgatatttcttctaatattattggattttgttacgattatcttcatattttgaaacagcttacagtgctctcggatcagcaaaaagctaatgtagaggcaatcatgttggccgttatgaaaaaattgacttacgatgaagaatataactttgaaaatgagggtgaagatgaagccatgtttgtagaatatagaaaacaactgaagttactgttggacaggcttgctcaagtttcaccagagttactactggcctctgttcgcagagtttttagttctacactgcagaattggcagactacacggtttatggaagttgaagtagcaataagattgctgtatatgttggcagaagctcttccagtatctcatggtgctcacttctcaggtgatgtttcaaaagctagtgctttgcaggatatgatgcgaactctggtaacatcaggagtcagttcctatcagcatacatctgtgacattggagttcttcgaaactgttgttagatatgaaaagtttttcacagttgaacctcagcacattccatgtgtactaatggctttcttagatcacagaggtctgcggcattccagtgcaaaagttcggagcaggacggcttacctgttttctagatttgtcaaatctctcaataagcaaatgaatcctttcattgaggatattttgaatagaatacaagatttattagagctttctccacctgagaatggccaccagtccttactgagcagcgatgatcaactttttatttatgagacagctggagtgctgattgttaatagtgaatatccggcagaaaggaaacaagccttaatgaggaatctgttgactccactaatggagaagtttaaaattctgttagaaaagttgatgctggcacaagatgaagaaaggcaagcctctctagcagactgtcttaaccatgctgttggatttgcaagtcgaaccagtaaagctttcagcaacaaacagactgtgaaacaatgtggctgttccgaagtttatctggactgtttacagacattcttgccagccctcagttgtcccttacaaaaggatattctcagaagtggagtccgtactttccttcatcgaatgattatttgcctggaggaagaagttcttccgttcattccatctgcttcagaacatatgctcaaagattgtgaagcaaaagatctccaggagttcattcctcttatcaaccagattacggccaaattcaagatacaggtatccccgtttttacaacagatgttcatgcccctgcttcatgcaatttttgaagtgctgctccggccagcagaagaaaatgaccagtctgctgctttagagaagcagatgttgcggaggagttactttgctttcctgcaaacagtcacaggcagtgggatgagcgaagttatagcaaatcaaggtgcagagaatgtagaaagagtgttggttactgttatccaaggagcagttgaatatccagatccaattgcacagaaaacatgttttatcatcctctcaaagttggtagaactctggggaggtaaagatggaccagtgggatttgctgattttgtttataagcacattgtccccgcatgtttcctagcacctttaaaacaaacctttgacctggcagatgcacaaacagtattggctttatctgagtgtgcagtgacactgaaaacaattcatctcaaacggggcccagaatgtgttcagtatcttcaacaagaatacctgccctccttgcaagtagctccagaaataattcaggagttttgtcaagcgcttcagcagcctgatgctaaagtttttaaaaattacttaaaggtgttcttccagagagcaaagccctgaggactggatttccctgtgcctacttcatgatcatgaattccagttaatttataaagaggcgatttttgtgtgccattcacactggtctttttcacattgttttgagcttattgcagtatatgttttgggatttttctgtaaaatgggtgtaattttcctaatacaggtatgtaacaacaaaagaagttgcctgcatgccggtccaaattgttctgtataaagatgctcttaaaagacacaagagttatcctagaaccttaattcttttttatttgaaattttaagtcaagtcctttataaagaccatagcagtggaaaacagtgtactttttaaaaaattgctgaatataaaatctttgaaaattttctttatgtgtgaagacacaaagtatgggggaagacagcaatcaaaactaactttttgtagatagccatttcatttctttaaactgtttcaacgccaatatgtattctacaaaagagaatggttttaggctccagtgttatacttttttttatatatatatataaaaataaactttacgtagtgaaatcttccaagtcttttctggaattattataaatactttagttttattttctcatcttaatctctccataatttcccatttaaaggtttacaaatatgagtgtgtggatgctttaattcatttaacctcactcctcaaaggtaacatgcaacttagttctgttatatgagagtctttttctttaatgtactggaaaaagcctatgtgaatctgttgatagaatttaaaattccaggccgggcgtggtggctcacgactgtaatcccagaactttgggaggccaaggcaggtggatcacttgaggtcaggagttcgagactagcctggccaacatggtgaaaccccatctctactaaaaatacaacagccaggtgtgatggtgcacgctcgtaatcccggctactcaggaggctgaggcaggagaatcgcttgaacccggaaggcagaggttgcagtgagctgagattgtgccactgcacgccagcctgggcaagagagtaagactctctctcaaaaaaaaaaaaaaagaatttaaaatcccaatttattttctaactcttttattggatgtatttagaacacagtatacctatagtatacctatgtgtttattatgtttgtaaatggtaactgacatttaattattagaagtacttacccctgccttcctccatttttattcatggctacttgagaaagcaaaaggaaaaaataatagttatcagtagtgtcactggaaagaagagaggagggacaaaactgagcagcagaattcgtatagacatttacgtttaaattctaaaagcccaattgagatgttcagggagggtttgttttgccctttggcctcatgaatgggtttcatgaatgggcttcagtggcttataaactctgtaaaattctattctaaattttgtacatttattttgttccggttaattccagaagacatttcaaacatttttcttacaccatataataaaaatacttaactaaattgacagttataaaaataaatcagtgaaatgtaccttatactttaataaaaaatgttttcagaaatagataagtgaaagctgagtgtttctttgataggttcccctgtactataggagtgataattgcagctattgcaatagtagtaattgttaaatggatactaatgaatagcatagcatagtgggtaagagtttatatagcacaggctctagaatcagattaagtaggttcaaataccagttctgccagtaactggttttagaaccttgggcaagttaaagaatgtctcccagcctcagtttccctatttgtaaaatggaaataatggtagctacctcaaacctcattacgaattcaatgagttaaacttgaaaagacttattacagtagctggcacataaagacttgatagtagtttatatggatgctatctcatattagcatatatggaattaatagtgtatcactatactttttttttcttttttttttttgaatagagatcagtctatcacccaggctggagtgcagtggtgacatcatagctcactgtaacttctcccatactctaccaatcctcctgcctcagcatccagactagctgtgattacaggtgtgcaccaccacacccagctacatttttttttggtagagacagggtctcactatgttacccagtctggtctcaaactcccggcctcaagcaatcctcccactggcctcacaatgttgggattacaggtataagccactgcacacggccttactatgctatcaattccatatatggaaaggtgttttccctttcagagctctttaaagctctgcagaagatttacatgtgtttatagagctaagagaaatcagggcatggaaattgagtgtgtaataaaaattaaactcttcatgttatataatcatgcataacttctatcttcattctctgaagttgcctagagcaccatcacagctaggaagcttccatcatgaattaccttatttccaaaagcaagtactcaaataattgtctcaagagaggaaggacaaaactgttacaagctgaaatatttggggatttgtttgacttgactagggaaccacaagttttcatataatgcctgatttagccctgtgcctaacagtttaaatcttaatgctaatgttaattgcttcccagttggttgaccttataagaaaacactgtgtggtattttaatgtggtaaacatgtgaatgaaggcctgtggctcagttaatcactcccacaactttgagctgtgagttttactggtggaaggaactttaacaggtcttcgctcttgtcattagatatcaaagaactgaaattagttggaattgtaagcagtgaatagatgtgttgttagaatgattccatcacttatacattgtttaaaatgctaataaagtaacttgctttgtaagaatt

SEQ ID NO: 131681 - DNA, 984 bp, Homo sapiens
  Payload ID: 5699
  Gene Symbol: XPOT
  Gene Name: exportin, tRNA
  ENST ID: ENST00000400935
  CDS Start-End: 380-984
cctgggacacggagcttgcagtgagctgatacggtgccactgcactccagcctgggcaacagagtgagactccgtctcaaaaaaaaaaatcagatttttaggaattacacattagtggagtagttagcagagcccatttttctgagaattaggctctaacttttagttgtaatttagataagttccaaaataagtttttaaacatttaagcttctttgcatgattttatccatttacgttattcaggataagcatctatttgtttatcaagtaatgttttctttcaactttgttttttgtggcagatgtttataaattcttctgtgggatcagagggcacgcctattacaaccagaaaactacaagtataacagcgaggatggatgaacaggctctattagggctaaatccaaatgctgattcagactttagacaaagggccctggcctattttgagcagttaaaaatttccccagatgcctggcaggtgtgtgcagaagctctagcccagaggacatacagtgatgatcatgtgaagtttttctgctttcaagtactggaacatcaagttaaatacaaatactcagaactaaccactgttcaacaacagctaattagggagacgctcatatcatggctgcaagctcagatgctgaatccccaaccagagaagacctttatacgaaataaagccgcccaagtcttcgccttgctttttgttacagagtatctcactaagtggcccaagtttttttttgacattctctcagtagtggacctaaatccaaggggagtagatctctacctgcgaatcctcatggctattgattcagagttggtggatcgtgatgtggtgcatacatcagaggaggctcgtaggaatactctcataaaagataccatgagggaacagtgcattccaaatctggtggaatcatggtaccaaatattacaaaattatcagtttactaattctgaagtgac

SEQ ID NO: 131682 - DNA, 548 bp, Homo sapiens
  Payload ID: 5699
  Gene Symbol: XPOT
  Gene Name: exportin, tRNA
  ENST ID: ENST00000540203
  CDS Start-End: 367-548
acccgaattgccacgaggcttcctttaggggagggatcgggggagggatgggagcaaggctagcagaggagggtcggcatcgcctgtggttccgaagcccgttagtcatcgttgtagcgttatcaactgtggagacctcaaacttgattcttcccccacccctggacaaaaaggaaaagtgttatttctgtgcagtaattggccagcacggacgctccatttcttctcaaaccttcctcaccatcctgcaggactagagaagcatgaggtttccctgtaaccagaaaaacgaatgtttataaattcttctgtgggatcagagggcacgcctattacaaccagaaaactacaagtataacagcgaggatggatgaacaggctctattagggctaaatccaaatgctgattcagactttagacaaagggccctggcctattttgagcagttaaaaatttccccagatgcctggcaggtgtgtgcagaagctctagcccagaggacatacagtgatgatcatgtgaagtttttctgctttcaagtactgga

SEQ ID NO: 131683 - DNA, 787 bp, Homo sapiens
  Payload ID: 5699
  Gene Symbol: XPOT
  Gene Name: exportin, tRNA
  ENST ID: ENST00000538086
  CDS Start-End: 1-192
gtttttagttctacactgcagaattggcagactacacggtttatggaagttgaagtagcaataagattgctgtatatgttggcagaagctcttccagtatctcatggtgctcacttctcagctggtaacatcaggagtcagttcctatcagcatacatctgtgacattggagttcttcgaaactgttgttagatatgaaaagtttttcacagttgaacctcagcacattccatgtgtactaatggctttcttagatcacagaggtctgcggcattccagtgcaaaagttcggagcaggacggcttacctgttttctagatttgtcaaatctctcaataagcaaatgaatcctttcattgaggatattttgaatagaatacaagatttattagagctttctccacctgagaatggccaccagtccttactgagcagcgatgatcaactttttatttatgagacagctggagtgctgattgttaatagtgaatatccggcagaaaggaaacaagccttaatgaggaatctgttgactccactaatggagaagtttaaaattctgttagaaaagttgatgctggcacaagatgaagaaaggcaagcctctctagcagactgtcttaaccatgctgttggatttgcaagtcgaaccagtaaagctttcagcaacaaacagactgtgaaacaatgtggctgttccgaagtttatctggactgtttacagacattcttgccagccctcagttgtcccttacaaaaggatattctcagaagtggagtccgtact

SEQ ID NO: 131684 - DNA, 3577 bp, Homo sapiens
  Payload ID: 5700
  Gene Symbol: ESYT1
  Gene Name: extended synaptotagmin-like protein 1
  Uniprot ID: Q9BSJ8
  ENST ID: ENST00000267113
  CDS Start-End: 54-3398
aggcaacctccagccagtccctgggtcgggcggatcctcccagaggtggcacaatggagcgatctccaggagagggccccagccccagccccatggaccagccctctgctccctccgaccccactgaccagccccccgctgctcacgcaaagccagacccaggttctgggggccaacctgctggccctggcgcggcgggtgaggccctggcggtgctgacttcattcgggaggcggttgctggtgctgatacctgtgtatttggccggggcagtgggactcagcgtgggtttcgtgctcttcggcctcgccctctacctgggctggcgccgggtccgcgacgagaaagaacggagccttcgagcagcgaggcagctactggacgacgaggagcagctcactgcgaaaactctctatatgagtcatcgagagctacctgcctgggtcagcttcccagacgtggaaaaggctgaatggctcaataagattgtggcccaggtctggcccttcctgggccagtatatggagaagcttctggctgaaactgtggctccggctgttaggggatctaacccccatctgcaaacatttacatttacacgagtggaactgggtgaaaagccattgcgcatcattggagtcaaggttcacccaggtcagagaaaagagcagatcctgctggacttgaacatcagctatgtaggtgatgtgcagattgatgtggaagtgaagaaatatttttgcaaagcaggagtcaagggcatgcagctacatggcgttttgcgggtgatactggagccactcattggggaccttcccttcgtgggggctgtgtcaatgttcttcatccgacgcccgaccctagacatcaactggacagggatgaccaacctgctggatatcccaggacttagctcactctctgacaccatgatcatggactccattgctgccttcctcgtgttgcccaaccgattactggtgccccttgtgcctgaccttcaagatgtggctcagttgcgttcccctctgcccaggggcattattcgaattcacctgctggctgctcgagggctgagttccaaggacaaatatgtgaagggcctgattgagggcaagtcagacccatatgcacttgtgcgtttgggtacccagacattctgcagtcgtgtcattgatgaagaactcaacccacagtggggagagacttatgaggtgatggtacacgaggtcccagggcaggagattgaagtggaggtgttcgacaaggatccagataaagatgactttctgggcagaatgaagctggatgtagggaaggtgttacaggctagcgttctggatgattggttccctctacaaggtgggcaaggccaagttcacttgaggctagaatggctgtcacttttgtcagatgcagagaaactggagcaggttctacagtggaattggggagtctcctctcgaccagatcccccgtcagctgccatcttagttgtctacctggatcgggcccaggatcttcctatggtgacctctgaattgtacccaccacagctgaagaaggggaacaaggaacccaaccctatggtacaactgtcaattcaggatgtgactcaggagagcaaggctgtctacagtaccaactgcccagtgtgggaggaagcgttccggttcttcctacaagaccctcaaagccaggagctcgatgtgcaagtgaaggatgattccagggccctgactttaggagcactgacgctgcctctggcccgcctgctgactgccccagaactcatcctggaccagtggttccagctcagcagctctggtccaaactccagactctatatgaaactagtcatgaggatcctgtacttggattcatcagaaatatgcttccccacggtgcctggttgtcctggtgcttgggacgtggacagtgagaatccccagagaggcagcagtgtggatgccccacctcgaccctgtcacacgactcctgatagccagtttgggactgagcatgtgcttcggatccatgtattagaggcccaggacctgattgccaaagaccgtttcttggggggactggtgaagggcaagtcagacccctatgtcaaactaaagttggcaggacgaagcttccggagccatgttgttcgggaagatctcaatccccgctggaatgaggtttttgaggtgatcgtcacatcagttccaggccaagagctagaggttgaagtctttgacaaggacttggacaaggatgattttctgggcaggtgtaaagtgcgtctcaccacagtcttaaacagtggcttccttgatgagtggctgaccctggaggatgtcccatctggccgcctgcacttgcgcctggagcgtctcaccccccgtcccactgctgctgagttagaggaggtgctgcaggtgaatagtttgatccagactcagaagagtgcggagctggctgcggccctgctatccatctatatggagcgggcagaggacctcccgctgcgaaaaggcaccaagcacctcagcccttatgctactctcactgtgggagatagttctcataaaaccaagactatttcgcaaacttcagcccctgtctgggatgagagtgcctcctttctcatcaggaaaccacacactgagagcctagagttgcaggttcggggtgagggcactggcgtgctgggctcattatccctgcccctctcagagctcctcgtggctgaccagctctgcttggaccgctggtttacactcagcagtggtcaggggcaggtgctactgagagcacagctagggatcctggtgtcccagcactcgggagtggaagctcatagccacagctacagccacagctcctcatcgctgagtgaagaaccagagctctcggggggaccccctcacatcacctcctcagccccagagctccggcagcgcctaacacatgttgacagtccccttgaggctccagccgggcctctgggccaggtgaaactgactctgtggtactacagtgaagaacgaaagctggtcagcattgttcatggttgccggtcccttcgacagaatggacgtgatcctcctgatccctatgtgtcactgttgctactgccagacaagaaccgaggcaccaagaggaggacctcacagaagaagaggaccctgagtcctgaatttaatgaacggtttgagtgggaactccccctggatgaggcccagagacgaaagctggatgtctctgtcaagtctaattcctccttcatgtcaagagagcgtgagctgctggggaaggtgcagctggacctagctgagacagacctttcccagggtgtagcccggtggtatgacctgatggacaacaaggacaagggcagctcctaggagctggcgagtcccagcctgactgctctgtcttcctgccttcgtctcgctccatcaccgcctcaatgtgatgagcctaaagctagggtccaagggcagagcctgtgcccttcagccctttcacctaacaggcccatattcgggcctttgcctgaccaaagagaagaaccgtatgttcc

SEQ ID NO: 131685 - DNA, 4388 bp, Homo sapiens
  Payload ID: 5700
  Gene Symbol: ESYT1
  Gene Name: extended synaptotagmin-like protein 1
  Uniprot ID: Q9BSJ8
  ENST ID: ENST00000394048
  CDS Start-End: 265-3579
atcttggccttcgggcccaatcagggaggccctacctatccgaaacccggtccgttccccgcggaagaggggtggagtttcaaccttttaactccaccttggtctgtgcagcgcggaccaacccaaatcgccagaaaggaggggcgtggcttgaagtcccctcctccatcccggggatcacgttttgcctgggggagctgatcgcaagactaggcaacctccagccagtccctgggtcgggcggatcctcccagaggtggcacaatggagcgatctccaggagagggccccagccccagccccatggaccagccctctgctccctccgaccccactgaccagccccccgctgctcacgcaaagccagacccaggttctgggggccaacctgctggccctggcgcggcgggtgaggccctggcggtgctgacttcattcgggaggcggttgctggtgctgatacctgtgtatttggccggggcagtgggactcagcgtgggtttcgtgctcttcggcctcgccctctacctgggctggcgccgggtccgcgacgagaaagaacggagccttcgagcagcgaggcagctactggacgacgaggagcagctcactgcgaaaactctctatatgagtcatcgagagctacctgcctgggtcagcttcccagacgtggaaaaggctgaatggctcaataagattgtggcccaggtctggcccttcctgggccagtatatggagaagcttctggctgaaactgtggctccggctgttaggggatctaacccccatctgcaaacatttacatttacacgagtggaactgggtgaaaagccattgcgcatcattggagtcaaggttcacccaggtcagagaaaagagcagatcctgctggacttgaacatcagctatgtaggtgatgtgcagattgatgtggaagtgaagaaatatttttgcaaagcaggagtcaagggcatgcagctacatggcgttttgcgggtgatactggagccactcattggggaccttcccttcgtgggggctgtgtcaatgttcttcatccgacgcccgaccctagacatcaactggacagggatgaccaacctgctggatatcccaggacttagctcactctctgacaccatgatcatggactccattgctgccttcctcgtgttgcccaaccgattactggtgccccttgtgcctgaccttcaagatgtggctcagttgcgttcccctctgcccaggggcattattcgaattcacctgctggctgctcgagggctgagttccaaggacaaatatgtgaagggcctgattgagggcaagtcagacccatatgcacttgtgcgtttgggtacccagacattctgcagtcgtgtcattgatgaagaactcaacccacagtggggagagacttatgaggtgatggtacacgaggtcccagggcaggagattgaagtggaggtgttcgacaaggatccagataaagatgactttctgggcagaatgaagctggatgtagggaaggtgttacaggctagcgttctggatgattggttccctctacaaggtgggcaaggccaagttcacttgaggctagaatggctgtcacttttgtcagatgcagagaaactggagcaggttctacagtggaattggggagtctcctctcgaccagatcccccgtcagctgccatcttagttgtctacctggatcgggcccaggatcttcctctgaagaaggggaacaaggaacccaaccctatggtacaactgtcaattcaggatgtgactcaggagagcaaggctgtctacagtaccaactgcccagtgtgggaggaagcgttccggttcttcctacaagaccctcaaagccaggagctcgatgtgcaagtgaaggatgattccagggccctgactttaggagcactgacgctgcctctggcccgcctgctgactgccccagaactcatcctggaccagtggttccagctcagcagctctggtccaaactccagactctatatgaaactagtcatgaggatcctgtacttggattcatcagaaatatgcttccccacggtgcctggttgtcctggtgcttgggacgtggacagtgagaatccccagagaggcagcagtgtggatgccccacctcgaccctgtcacacgactcctgatagccagtttgggactgagcatgtgcttcggatccatgtattagaggcccaggacctgattgccaaagaccgtttcttggggggactggtgaagggcaagtcagacccctatgtcaaactaaagttggcaggacgaagcttccggagccatgttgttcgggaagatctcaatccccgctggaatgaggtttttgaggtgatcgtcacatcagttccaggccaagagctagaggttgaagtctttgacaaggacttggacaaggatgattttctgggcaggtgtaaagtgcgtctcaccacagtcttaaacagtggcttccttgatgagtggctgaccctggaggatgtcccatctggccgcctgcacttgcgcctggagcgtctcaccccccgtcccactgctgctgagttagaggaggtgctgcaggtgaatagtttgatccagactcagaagagtgcggagctggctgcggccctgctatccatctatatggagcgggcagaggacctcccgctgcgaaaaggcaccaagcacctcagcccttatgctactctcactgtgggagatagttctcataaaaccaagactatttcgcaaacttcagcccctgtctgggatgagagtgcctcctttctcatcaggaaaccacacactgagagcctagagttgcaggttcggggtgagggcactggcgtgctgggctcattatccctgcccctctcagagctcctcgtggctgaccagctctgcttggaccgctggtttacactcagcagtggtcaggggcaggtgctactgagagcacagctagggatcctggtgtcccagcactcgggagtggaagctcatagccacagctacagccacagctcctcatcgctgagtgaagaaccagagctctcggggggaccccctcacatcacctcctcagccccagagctccggcagcgcctaacacatgttgacagtccccttgaggctccagccgggcctctgggccaggtgaaactgactctgtggtactacagtgaagaacgaaagctggtcagcattgttcatggttgccggtcccttcgacagaatggacgtgatcctcctgatccctatgtgtcactgttgctactgccagacaagaaccgaggcaccaagaggaggacctcacagaagaagaggaccctgagtcctgaatttaatgaacggtttgagtgggaactccccctggatgaggcccagagacgaaagctggatgtctctgtcaagtctaattcctccttcatgtcaagagagcgtgagctgctggggaaggtgcagctggacctagctgagacagacctttcccagggtgtagcccggtggtatgacctgatggacaacaaggacaagggcagctcctaggagctggcgagtcccagcctgactgctctgtcttcctgccttcgtctcgctccatcaccgcctcaatgtgatgagcctaaagctagggtccaagggcagagcctgtgcccttcagccctttcacctaacaggcccatattcgggcctttgcctgaccaaagagaagaaccgtatgttccctttactgcacggcctttatccttctgggcccctggggcggggacctgagctggctgtttcctgctttgcctgcacattgttctcccttcctcccaactcctcagggccttctgtatctgtgcctggccagtggcagcactagcagtggtattagcttatgccaaatacagctttggaaggatctttttttctttaactagatggtcaccttcttccctaccacacatgggtgggaaggtggacaggctaacctctccagctgtgagcctcttagactactgcatgtagcaaatgttcagcagctcaggcccccatgtccagttctgtccccactgtcctcaaccctgtcctgaaaattctactgctttgatggctggggccagtctcttgtcactttggaaactgaggacgcgtggattctactcaagcctccaagtagtggcatatcagtcttggagctcctagctggtgatacggagagggctttggaggacttgggacagcagggccaatttttttgcccaagtgcctaggctgctaactcactgactagaacttaatctggtactttacagttttgcaccaactctgccaagccactggatcttacattaaacatcatactcaaa

SEQ ID NO: 131686 - DNA, 540 bp, Homo sapiens
  Payload ID: 5700
  Gene Symbol: ESYT1
  Gene Name: extended synaptotagmin-like protein 1
  ENST ID: ENST00000551790
  CDS Start-End: 277-540
gggtaggcggctctttgtcgaagctagaggaccggcaggcggcagcagcaactacggcggcggcggcagaacccagcagtgatgtggaggtggagacccacaggagccccggacttcacctgagctacctcagtgggactcagcgtgggtttcgtgctcttcggcctcgccctctacctgggctggcgccgggtccgcgacgagaaagaacggagccttcgagcagcgaggcagctactggacgacgaggagcagctcactgcgaaaactctctatatgagtcatcgagagctacctgcctgggtcagcttcccagacgtggaaaaggctgaatggctcaataagattgtggcccaggtctggcccttcctgggccagtatatggagaagcttctggctgaaactgtggctccggctgttaggggatctaacccccatctgcaaacatttacatttacacgagtggaactgggtgaaaagccattgcgcatcattggagtcaaggttcacccaggtcagagaaaagagcagatcctgctg

SEQ ID NO: 131687 - DNA, 5960 bp, Homo sapiens
  Payload ID: 5701
  Gene Symbol: ESYT2
  Gene Name: extended synaptotagmin-like protein 2
  Uniprot ID: A0FGR8
  ENST ID: ENST00000251527
  CDS Start-End: 67-2748
agtatccaccccgcccgctcccggtgacgtgccagccccaggcccacgccgctcccgccccgcgtgatgacgccaccgtcccgggcggaggcgggcgtgcggcggagccgcgtcccctcagaggggcgctggcgcggggctgagccgcccgggatcagcgcgagcacccagcccgcctcggccgggagggcagcgcggcactgcggggcgatgagcggcgcccggggcgagggcccggaggcgggcgccggcggggctgggggccgcgcggcgcctgagaaccccgggggcgtgctgagcgtggagctgcccgggctgctggcgcagctggcgcggagcttcgcgctgctgctgcccgtgtacgcgctgggctacctggggctcagcttcagctgggttctcctcgcgctcgcgctgctcgcctggtgtcgccgcagccgcggcctcaaggccctgcgcctgtgccgcgcgctggcgctgctggaagacgaggagcgcgtcgtgcgcctgggggtgcgcgcctgcgacctgcccgcctgggttcattttccagacactgaaagagcagaatggctaaataagactgtaaaacacatgtggcctttcatttgccaatttatagagaagttgtttcgagaaactatagaaccagccgtgcggggagcaaacacccaccttagcacctttagtttcacgaaggtcgacgtgggccagcagcccctcaggatcaatggtgttaaggtatacactgaaaatgtagacaaaaggcaaattattttggaccttcagattagttttgtaggaaattgtgagattgatttggagatcaaacgatatttttgtagagctggtgtgaaaagtatccagattcatggtaccatgcgggtgatcctggaaccgttgattggagatatgcccttagttggagctttgtctatcttcttccttaggaaaccacttttagaaattaactggacaggactgacgaatcttctggatgtccctggattgaatggtttatcagatactatcattttggatataatatcaaactatctggtgcttcccaatcgaatcaccgttccacttgtcagtgaagttcaaatagctcagttgcggtttcctgtaccaaagggtgttctaaggatacattttattgaagctcaggatcttcaggggaaagacacttaccttaagggacttgtcaagggaaagtcagacccctatggaatcattagagttggcaaccaaatcttccaaagcagagtcatcaaggagaacctcagtccaaagtggaatgaagtctatgaggctttagtgtatgaacatcctggacaagaattagagattgagctctttgatgaagacccagacaaggatgactttttaggaagtcttatgattgacctcattgaagttgaaaaggagcgccttttagatgaatggttcactctggacgaggttcccaaggggaagctacacttgagactggagtggctcacgttaatgccaaatgcgtcaaacctcgacaaggtgctaacagacatcaaagctgacaaagaccaagccaacgatggtctttcctctgcattgctgatcttgtacttggattcagcaaggaaccttccgtcagggaagaaaataagcagcaacccaaatcctgttgtccagatgtcagttgggcacaaggcccaggagagcaagattcgatacaaaaccaatgaacctgtgtgggaggaaaacttcactttcttcattcacaatcccaagcgccaggaccttgaagttgaggtcagagacgagcagcaccagtgttccctggggaacctgaaggtccccctcagccagctgctcaccagtgaggacatgactgtgagccagcgcttccagctcagtaactcgggtccaaacagcaccatcaagatgaagattgccctgcgggtgctccatctcgaaaagcgagaaaggcctccagaccaccaacactcagctcaagtcaaacgtccctctgtgtccaaagaggggaggaaaacatccatcaaatctcatatgtctgggtctccaggccctggtggcagcaacacagctccatccacaccagtcattgggggcagtgataagcctggtatggaagaaaaggcccagccccctgaggccggccctcaggggctgcacgacctgggcagaagctcctccagcctcctggcctccccaggccacatctcagtcaaggagccgacccccagcatcgcctcggacatctcgctgcccatcgccacccaggagctgcggcaaaggctgaggcagctggaaaacgggacgaccctgggacagtctccactggggcagatccagctgaccatccggcacagctcgcagagaaacaagcttatcgtggtcgtgcatgcctgcagaaacctcattgccttctctgaagacggctctgacccctatgtccgcatgtatttattaccagacaagaggcggtcaggaaggaggaaaacacacgtgtcaaagaaaacattaaatccagtgtttgatcaaagctttgatttcagtgtttcgttaccagaagtgcagaggagaacgctcgacgttgccgtgaagaacagtggcggcttcctgtccaaagacaaagggctccttggcaaagtattggttgctctggcatctgaagaacttgccaaaggctggacccagtggtatgacctcacggaagatgggacgaggcctcaggcgatgacatagccgcagcaggcaggaggcgtcctcttcagcgtagctctccacctctacccggaacacaccctctcacagacgtaccaatgttatttttataatttcatggatttagttatacataccttaatagttttataaaattgttgacatttcaggcaaatttggccaatattatcattgaattttctgtgttggatttcctctaggatttcgccagttcctacaacgtgcagtagggcggcggtagctcttgtgtctgtggactctgctcagctgtgtccgtaggagtcggatgtgtctgtgctttattatggccttgtttatatatcactgaggtatactatgccatgtaaatagactattttttataatctttacatgctggtttaaattcagaaggaaatagatcaaggaaatatatatattttcttctaaaacttattaaattcgtgtgacaaataatcattttcatcttggcagcaaaaagttctcagtgacctattttgtggtgtttctttttgaaaagaaaagctgaaatattattaaatgctagtatgtttctgcccattatgaaagatgaaataaagtattcaaaatattaacattttcataaatataaggatgtattattgagaagtaagttgaagggcttataaggaaaaatgttttataactgagtaatatattaagagaattgtcatggttcataaatcacattatgctaatctgaaatttcttacataaaaatgaagtgtcttatgtttattttaattgctgttgtaacttactcatgaaacagtatacagacaccttgtacttttcctcaactgtaagagcagactttcaatgttagcaattaagctgttgtcaaacaatcagtcatgagctttgttaattttcaatgttttcccagcctataaaaaaaggaaggtacacgttgtccttttaaaggttgtgaggtagattggagtgagtagacaggatattgcattaaaaattgaaagctcgatctcattattgtcaggaacccccagtgtgacctcacacataggatgtgggacctttgagccgatgtgcactggccaccaccagggttgggggcgccacagctgcgagcccggcccctgctgttctcagcagccacttcccaggctgcctcactttatgccatgactgaccttaatattgggatattgttatgcaatttttatcctgtttagactgttaaaagcaggtttctgtacttaagagtcccccagacctcctgtgaggtgaggctctgttgcagtgtcgtaggctgtgtgtgtctgtaaagaaagaatgcacatatgtagacgattaagtgtatattataagctatatgctgaaaatggcttccatagccatgagaacatcttaaaactatgtgtaaatatattaaggaaagtatagctttgtaatttaaattggagcttttagcttgtttcatggaactatacaacttgtgggtaactcacatgaccaaacaaaccaaagtgcctgtgacggggcgggtggcgtctacccaccctcccttctagcagattcttattttgtttgaatttataaacaaggctggtggctgtctacccaccctcccttctagcagattttgattttgtttcaatttataacttacactttgaaccatgggtttacttataatggagtctgtagcttcacagcatatttcatgtaatcataaagaccagtatattccctcctgctgaatgacatgcgactgtaaagcctctttataaaccatttccaatgttagtatataggattatttgggaagcgtatcaatacctttatagacaaatacgaacatgtatgcacacaaaacatttaactatggtatttatggaagacaggtaacaacattaaatctagttgctttcccttagtattagatttgttgagggttttttaaaaatcaggtctgttgaaagtcttctgtcataatctataaagcagcagcactcatggaaattgtagcatgccagtaatttttaccaacatcccatacatctgagttctgcagtccagtgtgtaatccgctccatgtgtattttgcttaatggaatgctttatttaagcacttaggcagagtagacacaattaaaggtacaaagcccagaggaagtggtagagcagcaccgtgcctgccctgaggcagtggagtcagtagcgctgtccccagggccttgagtgcctggaggtgcttggcctccagtagctgcctccattctcttttaaaaaaagggggtgattctgaggcactgaagtgcctcccagatgtggaggagtgaagccaccatcgaggccacactcagcactccaggatcccagcgatgtcagacactcttgagttgtcaaaacgttaattttcagttttaaataatcagtttatctaagaaaagggaattttaacttttctaccttgagccaagccaatgaagggaaaattaattaacttagtaaatttgaagtgcagctctgttagctcgtacatgtgggttcttatcctgatcctgtgccttaaagtaggaaggtgtttccaagttcagattaaaatagaagcagctggccgggtgcggtggctcacgcctgtaatcccagcactttgggaggccgaggcgggcggatgacctgaggtcaggagttcaagaccagcctggccaacatggagaaaccccatctttactaaaaatacaaaaattagccgggcgtggtggtggagcgcacgcctgtagtcccagctactcgggaggctgaggcaggagaattgcttgaacccaggaggcggaggttgcagtgagccaagatcgcaccactgcactccagcctgggcaacagagtgagactccgtctcaaaaaataaataaaatagaagcagccttgtaactgtatttaccatgataatatattctgcacggtaagaattccttttacagacattctttatcaagaggtcggcccttctttttcaggcacataagccaaatgcaggcctgtgtgtagctgtgtgttttttctgtggttgccgcatttattccacctccagctggaccccccactgcaaatagagaacagcggtgggggatgggggttaaaaagtagagaacctcctttctgttcaactaatttcacgtgacagtgcatgtatttattcaataaaacctttatgttagctcagt

SEQ ID NO: 131688 - DNA, 3251 bp, Homo sapiens
  Payload ID: 5701
  Gene Symbol: ESYT2
  Gene Name: extended synaptotagmin-like protein 2
  ENST ID: ENST00000275418
  CDS Start-End: 1-2655
agcgcgagcacccagcccgcctcggccgggagggcagcgcggcactgcggggcgatgagcggcgcccggggcgagggcccggaggcgggcgccggcggggctgggggccgcgcggcgcctgagaaccccgggggcgtgctgagcgtggagctgcccgggctgctggcgcagctggcgcggagcttcgcgctgctgctgcccgtgtacgcgctgggctacctggggctcagcttcagctgggttctcctcgcgctcgcgctgctcgcctggtgtcgccgcagccgcggcctcaaggccctgcgcctgtgccgcgcgctggcgctgctggaagacgaggagcgcgtcgtgcgcctgggggtgcgcgcctgcgacctgcccgcctgggttcattttccagacactgaaagagcagaatggctaaataagactgtaaaacacatgtggcctttcatttgccaatttatagagaagttgtttcgagaaactatagaaccagccgtgcggggagcaaacacccaccttagcacctttagtttcacgaaggtcgacgtgggccagcagcccctcaggatcaatggtgttaaggtatacactgaaaatgtagacaaaaggcaaattattttggaccttcagattagttttgtaggaaattgtgagattgatttggagatcaaacgatatttttgtagagctggtgtgaaaagtatccagattcatggtaccatgcgggtgatcctggaaccgttgattggagatatgcccttagttggagctttgtctatcttcttccttaggaaaccacttttagaaattaactggacaggactgacgaatcttctggatgtccctggattgaatggtttatcagatactatcattttggatataatatcaaactatctggtgcttcccaatcgaatcaccgttccacttgtcagtgaagttcaaatagctcagttgcggtttcctgtaccaaagggtgttctaaggatacattttattgaagctcaggatcttcaggggaaagacacttaccttaagggacttgtcaagggaaagtcagacccctatggaatcattagagttggcaaccaaatcttccaaagcagagtcatcaaggagaacctcagtccaaagtggaatgaagtctatgaggctttagtgtatgaacatcctggacaagaattagagattgagctctttgatgaagacccagacaaggatgactttttaggaagtcttatgattgacctcattgaagttgaaaaggagcgccttttagatgaatggttcactctggacgaggttcccaaggggaagctacacttgagactggagtggctcacgttaatgccaaatgcgtcaaacctcgacaaggtgctaacagacatcaaagctgacaaagaccaagccaacgatggtctttcctctgcattgctgatcttgtacttggattcagcaaggaaccttccgagtaacccattagaatttaaccccgatgtcttgaagaagactgcagttcagagagctttaaagtcagggaagaaaataagcagcaacccaaatcctgttgtccagatgtcagttgggcacaaggcccaggagagcaagattcgatacaaaaccaatgaacctgtgtgggaggaaaacttcactttcttcattcacaatcccaagcgccaggaccttgaagttgaggtcagagacgagcagcaccagtgttccctggggaacctgaaggtccccctcagccagctgctcaccagtgaggacatgactgtgagccagcgcttccagctcagtaactcgggtccaaacagcaccatcaagatgaagattgccctgcgggtgctccatctcgaaaagcgagaaaggcctccagaccaccaacactcagctcaagtcaaacgtccctctgtgtccaaagaggggaggaaaacatccatcaaatctcatatgtctgggtctccaggccctggtggcagcaacacagctccatccacaccagtcattgggggcagtgataagcctggtatggaagaaaaggcccagccccctgaggccggccctcaggggctgcacgacctgggcagaagctcctccagcctcctggcctccccaggccacatctcagtcaaggagccgacccccagcatcgcctcggacatctcgctgcccatcgccacccaggagctgcggcaaaggctgaggcagctggaaaacgggacgaccctgggacagtctccactggggcagatccagctgaccatccggcacagctcgcagagaaacaagcttatcgtggtcgtgcatgcctgcagaaacctcattgccttctctgaagacggctctgacccctatgtccgcatgtatttattaccagacaagaggcggtcaggaaggaggaaaacacacgtgtcaaagaaaacattaaatccagtgtttgatcaaagctttgatttcagtgtttcgttaccagaagtgcagaggagaacgctcgacgttgccgtgaagaacagtggcggcttcctgtccaaagacaaagggctccttggcaaagtattggttgctctggcatctgaagaacttgccaaaggctggacccagtggtatgacctcacggaagatgggacgaggcctcaggcgatgacatagccgcagcaggcaggaggcgtcctcttcagcgtagctctccacctctacccggaacacaccctctcacagacgtaccaatgttatttttataatttcatggatttagttatacataccttaatagttttataaaattgttgacatttcaggcaaatttggccaatattatcattgaattttctgtgttggatttcctctaggatttcgccagttcctacaacgtgcagtagggcggcggtagctcttgtgtctgtggactctgctcagctgtgtccgtaggagtcggatgtgtctgtgctttattatggccttgtttatatatcactgaggtatactatgccatgtaaatagactattttttataatctttacatgctggtttaaattcagaaggaaatagatcaaggaaatatatatattttcttctaaaacttattaaattcgtgtgacaaataatcattttcatcttggcagcaaaaagttctcagtgacctattttgtggtgtttctttttgaaaagaaaagctgaaatattattaaatgctagtatgtttctgcccattatgaaagatgaaataaagtattcaaaatattaa

SEQ ID NO: 131689 - DNA, 2766 bp, Homo sapiens
  Payload ID: 5701
  Gene Symbol: ESYT2
  Gene Name: extended synaptotagmin-like protein 2
  ENST ID: ENST00000613624
  CDS Start-End: 1-2766
atgaccgcaaacagggacgccgccctctcatcccaccgccaccccggctgcgctcagcggccgcgcacccccacgtttgccagcagctcccagaggcggtcagcctttgggtttgacgacggcaacttcccgggcctcggcgagcgcagccacgcacccggaagccgcctcggggcgcgacgccgagccaaaaccgcccgcgggctccgaggccacaggcaaaggggcgctggcgcggggctgagccgcccgggatcagcgcgagcacccagcccgcctcggccgggagcgcctgagaaccccgggggcgtgctgagcgtggagctgcccgggctgctggcgcagctggcgcggagcttcgcgctgctgctgcccgtgtacgcgctgggctacctggggctcagcttcagctgggttctcctcgcgctcgcgctgctcgcctggtgtcgccgcagccgcggcctcaaggccctgcgcctgtgccgcgcgctggcgctgctggaagacgaggagcgcgtcgtgcgcctgggggtgcgcgcctgcgacctgcccgcctgggttcattttccagacactgaaagagcagaatggctaaataagactgtaaaacacatgtggcctttcatttgccaatttatagagaagttgtttcgagaaactatagaaccagccgtgcggggagcaaacacccaccttagcacctttagtttcacgaaggtcgacgtgggccagcagcccctcaggatcaatggtgttaaggtatacactgaaaatgtagacaaaaggcaaattattttggaccttcagattagttttgtaggaaattgtgagattgatttggagatcaaacgatatttttgtagagctggtgtgaaaagtatccagattcatggtaccatgcgggtgatcctggaaccgttgattggagatatgcccttagttggagctttgtctatcttcttccttaggaaaccacttttagaaattaactggacaggactgacgaatcttctggatgtccctggattgaatggtttatcagatactatcattttggatataatatcaaactatctggtgcttcccaatcgaatcaccgttccacttgtcagtgaagttcaaatagctcagttgcggtttcctgtaccaaagggtgttctaaggatacattttattgaagctcaggatcttcaggggaaagacacttaccttaagggacttgtcaagggaaagtcagacccctatggaatcattagagttggcaaccaaatcttccaaagcagagtcatcaaggagaacctcagtccaaagtggaatgaagtctatgaggctttagtgtatgaacatcctggacaagaattagagattgagctctttgatgaagacccagacaaggatgactttttaggaagtcttatgattgacctcattgaagttgaaaaggagcgccttttagatgaatggttcactctggacgaggttcccaaggggaagctacacttgagactggagtggctcacgttaatgccaaatgcgtcaaacctcgacaaggtgctaacagacatcaaagctgacaaagaccaagccaacgatggtctttcctctgcattgctgatcttgtacttggattcagcaaggaaccttccgtcagggaagaaaataagcagcaacccaaatcctgttgtccagatgtcagttgggcacaaggcccaggagagcaagattcgatacaaaaccaatgaacctgtgtgggaggaaaacttcactttcttcattcacaatcccaagcgccaggaccttgaagttgaggtcagagacgagcagcaccagtgttccctggggaacctgaaggtccccctcagccagctgctcaccagtgaggacatgactgtgagccagcgcttccagctcagtaactcgggtccaaacagcaccatcaagatgaagattgccctgcgggtgctccatctcgaaaagcgagaaaggcctccagaccaccaacactcagctcaagtcaaacgtccctctgtgtccaaagaggggaggaaaacatccatcaaatctcatatgtctgggtctccaggccctggtggcagcaacacagctccatccacaccagtcattgggggcagtgataagcctggtatggaagaaaaggcccagccccctgaggccggccctcaggggctgcacgacctgggcagaagctcctccagcctcctggcctccccaggccacatctcagtcaaggagccgacccccagcatcgcctcggacatctcgctgcccatcgccacccaggagctgcggcaaaggctgaggcagctggaaaacgggacgaccctgggacagtctccactggggcagatccagctgaccatccggcacagctcgcagagaaacaagcttatcgtggtcgtgcatgcctgcagaaacctcattgccttctctgaagacggctctgacccctatgtccgcatgtatttattaccagacaagaggcggtcaggaaggaggaaaacacacgtgtcaaagaaaacattaaatccagtgtttgatcaaagctttgatttcagtgtttcgttaccagaagtgcagaggagaacgctcgacgttgccgtgaagaacagtggcggcttcctgtccaaagacaaagggctccttggcaaagtattggttgctctggcatctgaagaacttgccaaaggctggacccagtggtatgacctcacggaagatgggacgaggcctcaggcgatgacatag

SEQ ID NO: 131690 - DNA, 1356 bp, Homo sapiens
  Payload ID: 5702
  Gene Symbol: ESYT3
  Gene Name: extended synaptotagmin-like protein 3
  ENST ID: ENST00000289135
  CDS Start-End: 175-1107
ggcgctgctctccgtcgcagagaaccctgagctcggcgcgccgagagtcccagcagggcaagggggcgcggcgtcctggtcctcgagcttgggagacagatgcgcatgggcgtgggggcatgcggacctaagctcgggtgaagctctcgggaagggcaagactgcggcgacgagatgcgagcagaggagccctgcgcccccggggcccccagcgccctgggagcccagcgcacgccgggccccgagctgcgcctgtccagccagctgctgcccgagctctgtaccttcgtggtgcgcgtgctgttctacctggggcctgtctacctagctggctacctggggctcagcataacctggttgctgctcggcgccctgctgtggatgtggtggcgcaggaaccgccgcgggaagcttgggcgcctggccgccgccttcgaattccttgacaatgaacgcgagttcatcagccgcgagctgcggggccagcacctgccagcctggatccacttcccggacgtggagcgggtcgagtgggccaacaagatcatctctcagacctggccctacctaagcatgatcatggaaagcaagttccgggagaaacttgagcccaagatccgagagaagagcatccacctgaggacctttacctttaccaagctctactttggacagaagtgtcccagggtcaacggtgtcaaggcacacactaatacgtgcaaccgaagacgtgtgactgtggacctgcagatctgctacatcggggactgtgagatcagtgtggagctgcagaagattcaggctggtgtgaacgggatccagttgcagggcaccctgcgggtcatcctggagcccctcctagtggacaagccctttgtgggagccgtgactgtgttcttccttcagaagccgcacctacagatcaactggactggcctgaccaacctgctggatgcgccgggaatcaatgatgtgtcagacagcttactggaggacctcattgccacccacctggtgctgcccaaccgtgtgactgtgcctgtgaagaaggggctggatctgaccaacctgcgcttccctctgccctgtgtgagtacccagtactagccacagaccagcctgctgggaggcagcgcaaatatcctctcagccttcacatgtggtgcattggctttatttcacactaatgcttgacagtcccagaaaaatggtacaaacaccatcgcccacgtcataattactaaagacattttgtccttggggtgtatcccacttgggaggtagtgtcaaatttactgcattctaaacttacttggaatatttcctctgtttgtgacaactgaccatgaatattta

SEQ ID NO: 131691 - DNA, 4407 bp, Homo sapiens
  Payload ID: 5702
  Gene Symbol: ESYT3
  Gene Name: extended synaptotagmin-like protein 3
  Uniprot ID: A0FGR9
  ENST ID: ENST00000389567
  CDS Start-End: 187-2847
ggtgcatttccaggcgctgctctccgtcgcagagaaccctgagctcggcgcgccgagagtcccagcagggcaagggggcgcggcgtcctggtcctcgagcttgggagacagatgcgcatgggcgtgggggcatgcggacctaagctcgggtgaagctctcgggaagggcaagactgcggcgacgagatgcgagcagaggagccctgcgcccccggggcccccagcgccctgggagcccagcgcacgccgggccccgagctgcgcctgtccagccagctgctgcccgagctctgtaccttcgtggtgcgcgtgctgttctacctggggcctgtctacctagctggctacctggggctcagcataacctggttgctgctcggcgccctgctgtggatgtggtggcgcaggaaccgccgcgggaagcttgggcgcctggccgccgccttcgaattccttgacaatgaacgcgagttcatcagccgcgagctgcggggccagcacctgccagcctggatccacttcccggacgtggagcgggtcgagtgggccaacaagatcatctctcagacctggccctacctaagcatgatcatggaaagcaagttccgggagaaacttgagcccaagatccgagagaagagcatccacctgaggacctttacctttaccaagctctactttggacagaagtgtcccagggtcaacggtgtcaaggcacacactaatacgtgcaaccgaagacgtgtgactgtggacctgcagatctgctacatcggggactgtgagatcagtgtggagctgcagaagattcaggctggtgtgaacgggatccagttgcagggcaccctgcgggtcatcctggagcccctcctagtggacaagccctttgtgggagccgtgactgtgttcttccttcagaagccgcacctacagatcaactggactggcctgaccaacctgctggatgcgccgggaatcaatgatgtgtcagacagcttactggaggacctcattgccacccacctggtgctgcccaaccgtgtgactgtgcctgtgaagaaggggctggatctgaccaacctgcgcttccctctgccctgtggggtgatcagagtgcacttgctggaggcagagcagctggcccagaaggacaactttctggggctccgaggcaagtcagatccctacgccaaggtgagcatcggcctacagcatttccggagtaggaccatctacaggaacctgaaccccacctggaacgaagtgtttgagttcatggtgtacgaagtccctggacaggacctggaggtagacctgtatgatgaggataccgacagggatgacttcctgggcagcctgcagatctgccttggagatgtcatgaccaacagagtggtggatgagtggtttgtcctgaatgacacaaccagcgggcggctgcacctgcggctggagtggctttcattgcttactgaccaagaagttctgactgaggaccatggtggcctttccactgccattctcgtggtcttcttggagagtgcctgcaacttgccgagaaacccttttgactacctgaatggtgaatatcgagccaaaaaactctccaggtttgccagaaacaaggtcagcaaagacccttcttcctatgtcaaactatctgtaggcaagaagacacatacaagtaagacctgtccccacaacaaggaccctgtgtggagccaggtgttctccttctttgtgcacaatgtggccactgagcggctccatctgaaggtgcttgatgatgaccaggagtgtgctctgggaatgctggaggtccccctgtgccagatcctcccctatgctgacctcactcttgagcagcgctttcagctggaccactcaggcctggacagcctcatctccatgaggctggtgcttcggttcctgcaagtggaggaacgagagctggggagcccatacacaggacctgaagccctaaagaaaggccctctgctcatcaagaaagtggctaccaaccagggtcccaaagcccaacctcaggaagaaggccctacagatttgccatgtcccccagaccctgcttctgatactaaggacgtatccaggagtaccacaaccaccaccagtgctaccaccgttgccactgagcccacatcccaagagacaggcccagagcctaaaggcaaggacagtgccaaaaggttctgtgagcccatcggggagaagaagagtccagccaccatcttcctgactgtcccaggtccccactctccagggcccatcaagtcacccagacccatgaaatgccctgcctccccattcgcatggccgcccaagaggctggctcccagcatgtcctcgctcaactccttggcctcttcttgctttgacctggcagatatcagcctcaacattgaaggtggggacctcaggcgacggcagctgggtgagattcagctcacagtgcgctatgtgtgtctgcggcgctgcctcagcgtgctaatcaatggctgcagaaacctaacaccatgtaccagcagtggagctgatccctacgtccgtgtctacttgttgccagaaaggaagtgggcatgtcgtaagaagacttcagtgaagcggaagaccttggaacccctgtttgatgagacatttgaattttttgttcccatggaagaagtaaagaagaggtcactagatgttgcagtgaaaaatagtaggccacttggctcacacagaagaaaggagttaggaaaagtactgattgacttatcaaaagaagatctgattaagggcttttcacaatggtatgagctgactccaaatggacagcccagaagctgatgatgagaattcttatcactcacctttatattaaaatgtatatatatgtatatattttttcctttggatcacttacatccaatatatgtatattttgtcatttaaatcagaacaaccacttgaaattatatacatacaattcttgtgtggaatttaactccatgactgaatagcataaggaagaggttatttaaaagcaagaactactttttttggttggatttttttgttcaagtccagaaagaaatgttatatttgtgcctactaaattatccaaacctcagtgtttatatacttaaacaagtgccactttttagtaggtaattatataccatctgatttaggacttacctgaatgtatgtaccagaaagtgtcctgcctctggcataggggctgggggaggtctgtttctggagccactaccagcattcctgggcagtgactggccaaagggaagtcacttttttatggaaatagaaagtgacccaactcaaaactgccaagagctaacactgccaaagcccttctggctgccacctgtggtacttgtatgcctggatatttgttcttttatttgacctggagctaaaaatgtatttccctactggcaaaaatgttatactgatatacttaaataccttgagttaaatactcttgtgtagtctaagggccaaactccagcgtgtagcattatttccataggaaaatgcaaaccaagttccaagcccaggtctatgtctgactctcatagcaaagcactggagactgctgaagagtgtcaccatcagagaaaaggaagctttcagataagtttaggctattcaacttttctaaagagatggttggttcacctaaataacatgttaaaagcaaagtattaaattatatgcttaaacaagcgcctcttttacatttcagactttacaagaccaaatatacttctcatcccctccaacattcctggacctcctcttctctcttaccaacaccaacactacctgccgtcagttttctgtctctgcctctgccttcactgccacttttctgaagcagggcaacattcgagaacaaagttttgtcatgttactcttattccagtttcctgccatctgattcacatgcagatgttctattccagagtagtccaaatactatgctctgctgactcaagtcatgtctcaaacctatttcctctattaagtaagtcagtcaatccatagtgaaatggactcttcctaccgcctgtagcatttactgttgatactgagtattttccattttaatagttcccagcctttataacactaagttttaagaaatgttgattaggcatctgctaaggttacatgctaagcagctacttatattgtatttggtatttaattttgtttattctccagttgaacagtagggaacaattcaagctacttgaattgtttttcaccctcaccatccaagaccgtgttaagtacatagaagatgcatggtgaaattcgtttctgctgaggtttctattttaaatggcaaattctcataataaaatggagcattgatgccta

SEQ ID NO: 131692 - DNA, 2398 bp, Homo sapiens
  Payload ID: 5702
  Gene Symbol: ESYT3
  Gene Name: extended synaptotagmin-like protein 3
  Uniprot ID: A0FGR9
  ENST ID: ENST00000490835
  CDS Start-End: 184-1689
gcatttccaggcgctgctctccgtcgcagagaaccctgagctcggcgcgccgagagtcccagcagggcaagggggcgcggcgtcctggtcctcgagcttgggagacagatgcgcatgggcgtgggggcatgcggacctaagctcgggtgaagctctcgggaagggcaagactgcggcgacgagatgcgagcagaggagccctgcgcccccggggcccccagcgccctgggagcccagcgcacgccgggccccgagctgcgcctgtccagccagctgctgcccgagctctgtaccttcgtggtgcgcgtgctgttctacctggggcctgtctacctagctggctacctggggctcagcataacctggttgctgctcggcgccctgctgtggatgtggtggcgcaggaaccgccgcgggaagcttgggcgcctggccgccgccttcgaattccttgacaatgaacgcgagttcatcagccgcgagctgcggggccagcacctgccagcctggatccacttcccggacgtggagcgggtcgagtgggccaacaagatcatctctcagacctggccctacctaagcatgatcatggaaagcaagttccgggagaaacttgagcccaagatccgagagaagagcatccacctgaggacctttacctttaccaagctctactttggacagaagtgtcccagggtcaacggtgtcaaggcacacactaatacgtgcaaccgaagacgtgtgactgtggacctgcagatctgctacatcggggactgtgagatcagtgtggagctgcagaagattcaggctggtgtgaacgggatccagttgcagggcaccctgcgggtcatcctggagcccctcctagtggacaagccctttgtgggagccgtgactgtgttcttccttcagaagccgcacctacagatcaactggactggcctgaccaacctgctggatgcgccgggaatcaatgatgtgtcagacagcttactggaggacctcattgccacccacctggtgctgcccaaccgtgtgactgtgcctgtgaagaaggggctggatctgaccaacctgcgcttccctctgccctgtggggtgatcagagtgcacttgctggaggcagagcagctggcccagaaggacaactttctggggctccgaggcaagtcagatccctacgccaaggtgagcatcggcctacagcatttccggagtaggaccatctacaggaacctgaaccccacctggaacgaagtgtttgagttcatggtgtacgaagtccctggacaggacctggaggtagacctgtatgatgaggataccgacagggatgacttcctgggcagcctgcagatctgccttggagatgtcatgaccaacagagtggtggatgagtggtttgtcctgaatgacacaaccagcgggcggctgcacctgcggctggagtggctttcattgcttactgaccaagaagttctgactgaggaccatggtggcctttccactgccattctcgtggtcttcttggagagtgcctgcaacttgccgagaaacccttttgactacctgaatggtgaatatcgagccaaaaaactctccaggtttgccagagtgaaacaaggtcagcaaagacccttcttcctatgtcaaactatctgtaggcaagaagacacatacaagtaagacctgtccccacaacaaggaccctgtgtggagccaggtgttctccttctttgtgcacaatgtggccactgagcggctccatctgaaggtgcttgatgatgaccaggagtgtgctctgggaatgctggaggtccccctgtgccagatcctcccctatgctgacctcactcttgagcagcgctttcagctggaccactcaggcctggacagcctcatctccatgaggctggtgcttcggttcctgcaagtggaggaacgagagctggggagcccatacacaggacctgaagccctaaagaaaggccctctgctcatcaagaaagtggctaccaaccagggtcccaaagcccaacctcaggaagaaggccctacagatttgccatgtcccccagaccctgcttctgatactaaggacgtatccaggagtaccacaaccaccaccagtgctaccaccgttgccactgagcccacatcccaagagacaggcccagagcctaaaggcaaggacagtgccaaaaggttctgtgagcccatcggggagaagaagagtccagccaccatcttcctgactgtcccaggtccccactctccagggcccatcaagtcacccagacccatgaaatgccctgcctccccattcgcatggccgcccaagaggctggctcccagcatgtcctcgctcaactccttggcctcttcttgctttgac

SEQ ID NO: 131693 - DNA, 6623 bp, Homo sapiens
  Payload ID: 5703
  Gene Symbol: ESPL1
  Gene Name: extra spindle pole bodies like 1, separase
  Uniprot ID: Q14674
  ENST ID: ENST00000257934
  CDS Start-End: 92-6454
ggttacattttggatcctcgcggagtactggtcaggcggttaagtcctgtacctaggaaagagggcgagctctggggcgctctccggtgtcatgaggagcttcaaaagagtcaactttgggactctgctaagcagccagaaggaggctgaagagttgctgcccgccttgaaggagttcctgtccaaccctccagctggttttcccagcagccgatctgatgctgagaggagacaagcttgtgatgccatcctgagggcttgcaaccagcagctgactgctaagctagcttgccctaggcatctggggagcctgctggagctggcagagctggcctgtgatggctacttagtgtctaccccacagcgtcctcccctctacctggaacgaattctctttgtcttactgcggaatgctgctgcacaaggaagcccagaggccacactccgccttgctcagcccctccatgcctgcttggtgcagtgctctcgcgaggctgctccccaggactatgaggccgtggctcggggcagcttttctctgctttggaagggggcagaagccctgttggaacggcgagctgcatttgcagctcggctgaaggccttgagcttcctagtactcttggaggatgaaagtaccccttgtgaggttcctcactttgcttctccaacagcctgtcgagcggtagctgcccatcagctatttgatgccagtggccatggtctaaatgaagcagatgctgatttcctagatgacctgctctccaggcacgtgatcagagccttggtgggtgagagagggagctcttctgggcttctttctccccagagggccctctgcctcttggagctcaccttggaacactgccgtcgcttttgctggagccgccaccatgacaaagccatcagcgcagtggagaaggctcacagttacctaaggaacaccaatctagcccctagccttcagctatgtcagctgggggttaagctgctgcaggttggggaggaaggacctcaggcagtggccaagcttctgatcaaggcatcagctgtcctgagcaagagtatggaggcaccatcacccccacttcgggcattgtatgagagctgccagttcttcctttcaggcctggaacgaggcaccaagaggcgctatagacttgatgccattctgagcctctttgcttttcttggagggtactgctctcttctgcagcagctgcgggatgatggtgtgtatgggggctcctccaagcaacagcagtcttttcttcagatgtactttcagggacttcacctctacactgtggtggtttatgactttgcccaaggctgtcagatagttgatttggctgacctgacccaactagtggacagttgtaaatctaccgttgtctggatgctggaggccttagagggcctgtcgggccaagagctgacggaccacatggggatgaccgcttcttacaccagtaatttggcctacagcttctatagtcacaagctctatgccgaggcctgtgccatctctgagccgctctgtcagcacctgggtttggtgaagccaggcacttatcccgaggtgcctcctgagaagttgcacaggtgcttccggctacaagtagagagtttgaagaaactgggtaaacaggcccagggctgcaagatggtgattttgtggctggcagccctgcaaccctgtagccctgaacacatggctgagccagtcactttctgggttcgggtcaagatggatgcggccagggctggagacaaggagctacagctaaagactctgcgagacagcctcagtggctgggacccggagaccctggccctcctgctgagggaggagctgcaggcctacaaggcggtgcgggccgacactggacaggaacgcttcaacatcatctgtgacctcctggagctgagccccgaggagacaccagccggggcctgggcacgagccacccacctggtagaactggctcaggtgctctgctaccacgactttacgcagcagaccaactgctctgctctggatgctatccgggaagccctgcagcttctggactctgtgaggcctgaggcccaggccagagatcagcttctggacgataaagcacaggccttgctgtggctttacatctgtactctggaagccaaaatgcaggaaggtatcgagcgggatcggagagcccaggcccctggtaacttggaggaatttgaagtcaatgacctgaactatgaagataaactccaggaagatcgtttcctatacagtaacattgccttcaacctggctgcagatgctgctcagtccaaatgcctggaccaagccctggccctgtggaaggagctgcttacaaaggggcaggccccagctgtacggtgtctccagcagacagcagcctcactgcagatcctagcagccctctaccagctggtggcaaagcccatgcaggctctggaggtcctcctgctgctacggattgtctctgagagactgaaggaccactcgaaggcagctggctcctcctgccacatcacccagctcctcctgaccctcggctgtcccagctatgcccagttacacctggaagaggcagcatcgagcctgaagcatctcgatcagactactgacacatacctgctcctttccctgacctgtgatctgcttcgaagtcaactctactggactcaccagaaggtgaccaagggtgtctctctgctgctgtctgtgcttcgggatcctgccctccagaagtcctccaaggcttggtacttgctgcgtgtccaggtcctgcagctggtggcagcttaccttagcctcccgtcaaacaacctctcacactccctgtgggagcagctctgtgcccaaggctggcagacacctgagatagctctcatagactcccataagctcctccgaagcatcatcctcctgctgatgggcagtgacattctctcaactcagaaagcagctgtggagacatcgtttttggactatggtgaaaatctggtacaaaaatggcaggttctttcagaggtgctgagctgctcagagaagctggtctgccacctgggccgcctgggtagtgtgagtgaagccaaggccttttgcttggaggccctaaaacttacaacaaagctgcagataccacgccagtgtgccctgttcctggtgctgaagggcgagctggagctggcccgcaatgacattgatctctgtcagtcggacctgcagcaggttctgttcttgcttgagtcttgcacagagtttggtggggtgactcagcacctggactctgtgaagaaggtccacctgcagaaggggaagcagcaggcccaggtcccctgtcctccacagctcccagaggaggagctcttcctaagaggccctgctctagagctggtggccactgtggccaaggagcctggccccatagcaccttctacaaactcctccccagtcttgaaaaccaagccccagcccatacccaacttcctgtcccattcacccacctgtgactgctcgctctgcgccagccctgtcctcacagcagtctgtctgcgctgggtattggtcacggcaggggtgaggctggccatgggccaccaagcccagggtctggatctgctgcaggtcgtgctgaagggctgtcctgaagccgctgagcgcctcacccaagctctccaagcttccctgaatcataaaacacccccctccttggttccaagcctcttggatgagatcttggctcaagcatacacactgttggcactggagggcctgaaccagccatcaaacgagagcctgcagaaggttctacagtcagggctgaagtttgtagcagcacggataccccacctagagccctggcgagccagcctgctcttgatttgggccctcacaaaactaggtggcctcagctgctgtactacccaactttttgcaagctcctggggctggcagccaccattaataaaaagtgtccctggctcagagccctctaagactcagggccaaaaacgttctggacgagggcgccaaaagttagcctctgctcccctgcgcctcaataatacctctcagaaaggtctggaaggtagaggactgccctgcacacctaaacccccagaccggatcaggcaagctggccctcatgtccccttcacggtgtttgaggaagtctgccctacagagagcaagcctgaagtaccccaggcccccagggtacaacagagagtccagacgcgcctcaaggtgaacttcagtgatgacagtgacttggaagaccctgtctcagctgaggcctggctggcagaggagcctaagagacggggcactgcttcccggggccgggggcgagcaaggaagggcctgagcctaaagacggatgccgtggttgccccaggtagtgcccctgggaaccctggcctgaatggcaggagccggagggccaagaaggtggcatcaagacattgtgaggagcggcgtccccagagggccagtgaccaggccaggcctggccctgagatcatgaggaccatccctgaggaagaactgactgacaactggagaaaaatgagctttgagatcctcaggggctctgacggggaagactcagcctcaggtgggaagactccagctccgggccctgaggcagcttctggagaatgggagctgctgaggctggattccagcaagaagaagctgcccagcccatgcccagacaaggagagtgacaaggaccttggtcctcggctccggctcccctcagcccccgtagccactggtctttctaccctggactccatctgtgactccctgagtgttgctttccggggcattagtcactgtcctcctagtgggctctatgcccacctctgccgcttcctggccttgtgcctgggccaccgggatccttatgccactgctttccttgtcaccgagtctgtctccatcacctgtcgccaccagctgctcacccacctccacagacagctcagcaaggcccagaagcaccgaggatcacttgaaatagcagaccagctgcaggggctgagccttcaggagatgcctggagatgtccccctggcccgcatccagcgcctcttttccttcagggctttggaatctggccacttcccccagcctgaaaaggagagtttccaggagcgcctggctctgatccccagtggggtgactgtgtgtgtgttggccctggccaccctccagcccggaaccgtgggcaacaccctcctgctgacccggctggaaaaggacagtcccccagtcagtgtgcagattcccactggccagaacaagcttcatctgcgttcagtcctgaatgagtttgatgccatccagaaggcacagaaagagaacagcagctgtactgacaagcgagaatggtggacagggcggctggcactggaccacaggatggaggttctcatcgcttccctagagaagtctgtgctgggctgctggaaggggctgctgctgccgtccagtgaggagcccggccctgcccaggaggcctcccgcctacaggagctgctacaggactgtggctggaaatatcctgaccgcactctgctgaaaatcatgctcagtggtgccggtgccctcacccctcaggacattcaggccctggcctacgggctgtgcccaacccagccagagcgagcccaggagctcctgaatgaggcagtaggacgtctacagggcctgacagtaccaagcaatagccaccttgtcttggtcctagacaaggacttgcagaagctgccgtgggaaagcatgcccagcctccaagcactgcctgtcacccggctgccctccttccgcttcctactcagctactccatcatcaaagagtatggggcctcgccagtgctgagtcaaggggtggatccacgaagtaccttctatgtcctgaaccctcacaataacctgtcaagcacagaggagcaatttcgagccaatttcagcagtgaagctggctggagaggagtggttggggaggtgccaagacctgaacaggtgcaggaagccctgacaaagcatgatttgtatatctatgcagggcatggggctggtgcccgcttccttgatgggcaggctgtcctgcggctgagctgtcgggcagtggccctgctgtttggctgtagcagtgcggccctggctgtgcgtggaaacctggagggggctggcatcgtgctcaagtacatcatggctggttgccccttgtttctgggtaatctctgggatgtgactgaccgcgacattgaccgctacacggaagctctgctgcaaggctggcttggagcaggcccaggggccccccttctctactatgtaaaccaggcccgccaagctccccgactcaagtatcttattggggctgcacctatagcctatggcttgcctgtctctctgcggtaaccccatggagctgtcttattgatgctagaagcctcataactgttctacctccaaggttagatttaatccttaggataactcttttaaagtgattttccccagtgttttatatgaaacatttccttttgatttaacctcagtataataaagatacatcatttaaaccctg

SEQ ID NO: 131694 - DNA, 6665 bp, Homo sapiens
  Payload ID: 5703
  Gene Symbol: ESPL1
  Gene Name: extra spindle pole bodies like 1, separase
  ENST ID: ENST00000552671
  CDS Start-End: 58-207
ggcggttaagtcctgtacctaggaaagagggcgagctctggggcgctctccggtgtcatgaggagcttcaaaagagtcaactttgggactctgctaagcagccagaaggaggctgaagagttgctgcccgccttgaaggtgggggtgctgcctggctcgggatacacctggctttccaaactgagctgttttgtgtttgccttttgaagagatggataagagttcctgtccaaccctccagctggttttcccagcagccgatctgatgctgagaggagacaagcttgtgatgccatcctgagggcttgcaaccagcagctgactgctaagctagcttgccctaggcatctggggagcctgctggagctggcagagctggcctgtgatggctacttagtgtctaccccacagcgtcctcccctctacctggaacgaattctctttgtcttactgcggaatgctgctgcacaaggaagcccagaggccacactccgccttgctcagcccctccatgcctgcttggtgcagtgctctcgcgaggctgctccccaggactatgaggccgtggctcggggcagcttttctctgctttggaagggggcagaagccctgttggaacggcgagctgcatttgcagctcggctgaaggccttgagcttcctagtactcttggaggatgaaagtaccccttgtgaggttcctcactttgcttctccaacagcctgtcgagcggtagctgcccatcagctatttgatgccagtggccatggtctaaatgaagcagatgctgatttcctagatgacctgctctccaggcacgtgatcagagccttggtgggtgagagagggagctcttctgggcttctttctccccagagggccctctgcctcttggagctcaccttggaacactgccgtcgcttttgctggagccgccaccatgacaaagccatcagcgcagtggagaaggctcacagttacctaaggaacaccaatctagcccctagccttcagctatgtcagctgggggttaagctgctgcaggttggggaggaaggacctcaggcagtggccaagcttctgatcaaggcatcagctgtcctgagcaagagtatggaggcaccatcacccccacttcgggcattgtatgagagctgccagttcttcctttcaggcctggaacgaggcaccaagaggcgctatagacttgatgccattctgagcctctttgcttttcttggagggtactgctctcttctgcagcagctgcgggatgatggtgtgtatgggggctcctccaagcaacagcagtcttttcttcagatgtactttcagggacttcacctctacactgtggtggtttatgactttgcccaaggctgtcagatagttgatttggctgacctgacccaactagtggacagttgtaaatctaccgttgtctggatgctggaggccttagagggcctgtcgggccaagagctgacggaccacatggggatgaccgcttcttacaccagtaatttggcctacagcttctatagtcacaagctctatgccgaggcctgtgccatctctgagccgctctgtcagcacctgggtttggtgaagccaggcacttatcccgaggtgcctcctgagaagttgcacaggtgcttccggctacaagtagagagtttgaagaaactgggtaaacaggcccagggctgcaagatggtgattttgtggctggcagccctgcaaccctgtagccctgaacacatggctgagccagtcactttctgggttcgggtcaagatggatgcggccagggctggagacaaggagctacagctaaagactctgcgagacagcctcagtggctgggacccggagaccctggccctcctgctgagggaggagctgcaggcctacaaggcggtgcgggccgacactggacaggaacgcttcaacatcatctgtgacctcctggagctgagccccgaggagacaccagccggggcctgggcacgagccacccacctggtagaactggctcaggtgctctgctaccacgactttacgcagcagaccaactgctctgctctggatgctatccgggaagccctgcagcttctggactctgtgaggcctgaggcccaggccagagatcagcttctggacgataaagcacaggccttgctgtggctttacatctgtactctggaagccaaaatgcaggaaggtatcgagcgggatcggagagcccaggcccctggtaacttggaggaatttgaagtcaatgacctgaactatgaagataaactccaggaagatcgtttcctatacagtaacattgccttcaacctggctgcagatgctgctcagtccaaatgcctggaccaagccctggccctgtggaaggagctgcttacaaaggggcaggccccagctgtacggtgtctccagcagacagcagcctcactgcagatcctagcagccctctaccagctggtggcaaagcccatgcaggctctggaggtcctcctgctgctacggattgtctctgagagactgaaggaccactcgaaggcagctggctcctcctgccacatcacccagctcctcctgaccctcggctgtcccagctatgcccagttacacctggaagaggcagcatcgagcctgaagcatctcgatcagactactgacacatacctgctcctttccctgacctgtgatctgcttcgaagtcaactctactggactcaccagaaggtgaccaagggtgtctctctgctgctgtctgtgcttcgggatcctgccctccagaagtcctccaaggcttggtacttgctgcgtgtccaggtcctgcagctggtggcagcttaccttagcctcccgtcaaacaacctctcacactccctgtgggagcagctctgtgcccaaggctggcagacacctgagatagctctcatagactcccataagctcctccgaagcatcatcctcctgctgatgggcagtgacattctctcaactcagaaagcagctgtggagacatcgtttttggactatggtgaaaatctggtacaaaaatggcaggttctttcagaggtgctgagctgctcagagaagctggtctgccacctgggccgcctgggtagtgtgagtgaagccaaggccttttgcttggaggccctaaaacttacaacaaagctgcagataccacgccagtgtgccctgttcctggtgctgaagggcgagctggagctggcccgcaatgacattgatctctgtcagtcggacctgcagcaggttctgttcttgcttgagtcttgcacagagtttggtggggtgactcagcacctggactctgtgaagaaggtccacctgcagaaggggaagcagcaggcccaggtcccctgtcctccacagctcccagaggaggagctcttcctaagaggccctgctctagagctggtggccactgtggccaaggagcctggccccatagcaccttctacaaactcctccccagtcttgaaaaccaagccccagcccatacccaacttcctgtcccattcacccacctgtgactgctcgctctgcgccagccctgtcctcacagcagtctgtctgcgctgggtattggtcacggcaggggtgaggctggccatgggccaccaagcccagggtctggatctgctgcaggtcgtgctgaagggctgtcctgaagccgctgagcgcctcacccaagctctccaagcttccctgaatcataaaacacccccctccttggttccaagcctcttggatgagatcttggctcaagcatacacactgttggcactggagggcctgaaccagccatcaaacgagagcctgcagaaggttctacagtcagggctgaagtttgtagcagcacggataccccacctagagccctggcgagccagcctgctcttgatttgggccctcacaaaactaggtggcctcagctgctgtactacccaactttttgcaagctcctggggctggcagccaccattaataaaaagtgtccctggctcagagccctctaagactcagggccaaaaacgttctggacgagggcgccaaaagttagcctctgctcccctgcgcctcaataatacctctcagaaaggtctggaaggtagaggactgccctgcacacctaaacccccagaccggatcaggcaagctggccctcatgtccccttcacggtgtttgaggaagtctgccctacagagagcaagcctgaagtaccccaggcccccagggtacaacagagagtccagacgcgcctcaaggtgaacttcagtgatgacagtgacttggaagaccctgtctcagctgaggcctggctggcagaggagcctaagagacggggcactgcttcccggggccgggggcgagcaaggaagggcctgagcctaaagacggatgccgtggttgccccaggtagtgcccctgggaaccctggcctgaatggcaggagccggagggccaagaaggtggcatcaagacattgtgaggagcggcgtccccagagggccagtgaccaggccaggcctggccctgagatcatgaggaccatccctgaggaagaactgactgacaactggagaaaaatgagctttgagatcctcaggggctctgacggggaagactcagcctcaggtgggaagactccagctccgggccctgaggcagcttctggagaatgggagctgctgaggctggattccagcaagaagaagctgcccagcccatgcccagacaaggagagtgacaaggaccttggtcctcggctccggctcccctcagcccccgtagccactggtctttctaccctggactccatctgtgactccctgagtgttgctttccggggcattagtcactgtcctcctagtgggctctatgcccacctctgccgcttcctggccttgtgcctgggccaccgggatccttatgccactgctttccttgtcaccgagtctgtctccatcacctgtcgccaccagctgctcacccacctccacagacagctcagcaaggcccagaagcaccgaggatcacttgaaatagcagaccagctgcaggggctgagccttcaggagatgcctggagatgtccccctggcccgcatccagcgcctcttttccttcagggctttggaatctggccacttcccccagcctgaaaaggagagtttccaggagcgcctggctctgatccccagtggggtgactgtgtgtgtgttggccctggccaccctccagcccggaaccgtgggcaacaccctcctgctgacccggctggaaaaggacagtcccccagtcagtgtgcagattcccactggccagaacaagcttcatctgcgttcagtcctgaatgagtttgatgccatccagaaggcacagaaagagaacagcagctgtactgacaagcgagaatggtggacagggcggctggcactggaccacaggatggaggttctcatcgcttccctagagaagtctgtgctgggctgctggaaggggctgctgctgccgtccagtgaggagcccggccctgcccaggaggcctcccgcctacaggagctgctacaggactgtggctggaaatatcctgaccgcactctgctgaaaatcatgctcagtggtgccggtgccctcacccctcaggacattcaggccctggcctacgggctgtgcccaacccagccagagcgagcccaggagctcctgaatgaggcagtaggacgtctacagggcctgacagtaccaagcaatagccaccttgtcttggtcctagacaaggacttgcagaagctgccgtgggaaagcatgcccagcctccaagcactgcctgtcacccggctgccctccttccgcttcctactcagctactccatcatcaaagagtatggggcctcgccagtgctgagtcaaggggtggatccacgaagtaccttctatgtcctgaaccctcacaataacctgtcaagcacagaggagcaatttcgagccaatttcagcagtgaagctggctggagaggagtggttggggaggtgccaagacctgaacaggtgcaggaagccctgacaaagcatgatttgtatatctatgcagggcatggggctggtgcccgcttccttgatgggcaggctgtcctgcggctgagctgtcgggcagtggccctgctgtttggctgtagcagtgcggccctggctgtgcgtggaaacctggagggggctggcatcgtgctcaagtacatcatggctggttgccccttgtttctgggtaatctctgggatgtgactgaccgcgacattgaccgctacacggaagctctgctgcaaggctggcttggagcaggcccaggggccccccttctctactatgtaaaccaggcccgccaagctccccgactcaagtatcttattggggctgcacctatagcctatggcttgcctgtctctctgcggtaaccccatggagctgtcttattgatgctagaagcctcataactgttctacctccaaggttagatttaatccttaggataactcttttaaagtgattttccccagtgttttatatgaaacatttccttttgatttaacctcagtataataaagatacatcatttaaa

SEQ ID NO: 131695 - DNA, 6447 bp, Homo sapiens
  Payload ID: 5703
  Gene Symbol: ESPL1
  Gene Name: extra spindle pole bodies like 1, separase
  Uniprot ID: Q14674
  ENST ID: ENST00000552462
  CDS Start-End: 85-6447
cggttaagtcctgtacctaggaaagagggcgagctctggggcggtaaggccggaagggactcgtgagcgtggctctccggtgtcatgaggagcttcaaaagagtcaactttgggactctgctaagcagccagaaggaggctgaagagttgctgcccgccttgaaggagttcctgtccaaccctccagctggttttcccagcagccgatctgatgctgagaggagacaagcttgtgatgccatcctgagggcttgcaaccagcagctgactgctaagctagcttgccctaggcatctggggagcctgctggagctggcagagctggcctgtgatggctacttagtgtctaccccacagcgtcctcccctctacctggaacgaattctctttgtcttactgcggaatgctgctgcacaaggaagcccagaggccacactccgccttgctcagcccctccatgcctgcttggtgcagtgctctcgcgaggctgctccccaggactatgaggccgtggctcggggcagcttttctctgctttggaagggggcagaagccctgttggaacggcgagctgcatttgcagctcggctgaaggccttgagcttcctagtactcttggaggatgaaagtaccccttgtgaggttcctcactttgcttctccaacagcctgtcgagcggtagctgcccatcagctatttgatgccagtggccatggtctaaatgaagcagatgctgatttcctagatgacctgctctccaggcacgtgatcagagccttggtgggtgagagagggagctcttctgggcttctttctccccagagggccctctgcctcttggagctcaccttggaacactgccgtcgcttttgctggagccgccaccatgacaaagccatcagcgcagtggagaaggctcacagttacctaaggaacaccaatctagcccctagccttcagctatgtcagctgggggttaagctgctgcaggttggggaggaaggacctcaggcagtggccaagcttctgatcaaggcatcagctgtcctgagcaagagtatggaggcaccatcacccccacttcgggcattgtatgagagctgccagttcttcctttcaggcctggaacgaggcaccaagaggcgctatagacttgatgccattctgagcctctttgcttttcttggagggtactgctctcttctgcagcagctgcgggatgatggtgtgtatgggggctcctccaagcaacagcagtcttttcttcagatgtactttcagggacttcacctctacactgtggtggtttatgactttgcccaaggctgtcagatagttgatttggctgacctgacccaactagtggacagttgtaaatctaccgttgtctggatgctggaggccttagagggcctgtcgggccaagagctgacggaccacatggggatgaccgcttcttacaccagtaatttggcctacagcttctatagtcacaagctctatgccgaggcctgtgccatctctgagccgctctgtcagcacctgggtttggtgaagccaggcacttatcccgaggtgcctcctgagaagttgcacaggtgcttccggctacaagtagagagtttgaagaaactgggtaaacaggcccagggctgcaagatggtgattttgtggctggcagccctgcaaccctgtagccctgaacacatggctgagccagtcactttctgggttcgggtcaagatggatgcggccagggctggagacaaggagctacagctaaagactctgcgagacagcctcagtggctgggacccggagaccctggccctcctgctgagggaggagctgcaggcctacaaggcggtgcgggccgacactggacaggaacgcttcaacatcatctgtgacctcctggagctgagccccgaggagacaccagccggggcctgggcacgagccacccacctggtagaactggctcaggtgctctgctaccacgactttacgcagcagaccaactgctctgctctggatgctatccgggaagccctgcagcttctggactctgtgaggcctgaggcccaggccagagatcagcttctggacgataaagcacaggccttgctgtggctttacatctgtactctggaagccaaaatgcaggaaggtatcgagcgggatcggagagcccaggcccctggtaacttggaggaatttgaagtcaatgacctgaactatgaagataaactccaggaagatcgtttcctatacagtaacattgccttcaacctggctgcagatgctgctcagtccaaatgcctggaccaagccctggccctgtggaaggagctgcttacaaaggggcaggccccagctgtacggtgtctccagcagacagcagcctcactgcagatcctagcagccctctaccagctggtggcaaagcccatgcaggctctggaggtcctcctgctgctacggattgtctctgagagactgaaggaccactcgaaggcagctggctcctcctgccacatcacccagctcctcctgaccctcggctgtcccagctatgcccagttacacctggaagaggcagcatcgagcctgaagcatctcgatcagactactgacacatacctgctcctttccctgacctgtgatctgcttcgaagtcaactctactggactcaccagaaggtgaccaagggtgtctctctgctgctgtctgtgcttcgggatcctgccctccagaagtcctccaaggcttggtacttgctgcgtgtccaggtcctgcagctggtggcagcttaccttagcctcccgtcaaacaacctctcacactccctgtgggagcagctctgtgcccaaggctggcagacacctgagatagctctcatagactcccataagctcctccgaagcatcatcctcctgctgatgggcagtgacattctctcaactcagaaagcagctgtggagacatcgtttttggactatggtgaaaatctggtacaaaaatggcaggttctttcagaggtgctgagctgctcagagaagctggtctgccacctgggccgcctgggtagtgtgagtgaagccaaggccttttgcttggaggccctaaaacttacaacaaagctgcagataccacgccagtgtgccctgttcctggtgctgaagggcgagctggagctggcccgcaatgacattgatctctgtcagtcggacctgcagcaggttctgttcttgcttgagtcttgcacagagtttggtggggtgactcagcacctggactctgtgaagaaggtccacctgcagaaggggaagcagcaggcccaggtcccctgtcctccacagctcccagaggaggagctcttcctaagaggccctgctctagagctggtggccactgtggccaaggagcctggccccatagcaccttctacaaactcctccccagtcttgaaaaccaagccccagcccatacccaacttcctgtcccattcacccacctgtgactgctcgctctgcgccagccctgtcctcacagcagtctgtctgcgctgggtattggtcacggcaggggtgaggctggccatgggccaccaagcccagggtctggatctgctgcaggtcgtgctgaagggctgtcctgaagccgctgagcgcctcacccaagctctccaagcttccctgaatcataaaacacccccctccttggttccaagcctcttggatgagatcttggctcaagcatacacactgttggcactggagggcctgaaccagccatcaaacgagagcctgcagaaggttctacagtcagggctgaagtttgtagcagcacggataccccacctagagccctggcgagccagcctgctcttgatttgggccctcacaaaactaggtggcctcagctgctgtactacccaactttttgcaagctcctggggctggcagccaccattaataaaaagtgtccctggctcagagccctctaagactcagggccaaaaacgttctggacgagggcgccaaaagttagcctctgctcccctgcgcctcaataatacctctcagaaaggtctggaaggtagaggactgccctgcacacctaaacccccagaccggatcaggcaagctggccctcatgtccccttcacggtgtttgaggaagtctgccctacagagagcaagcctgaagtaccccaggcccccagggtacaacagagagtccagacgcgcctcaaggtgaacttcagtgatgacagtgacttggaagaccctgtctcagctgaggcctggctggcagaggagcctaagagacggggcactgcttcccggggccgggggcgagcaaggaagggcctgagcctaaagacggatgccgtggttgccccaggtagtgcccctgggaaccctggcctgaatggcaggagccggagggccaagaaggtggcatcaagacattgtgaggagcggcgtccccagagggccagtgaccaggccaggcctggccctgagatcatgaggaccatccctgaggaagaactgactgacaactggagaaaaatgagctttgagatcctcaggggctctgacggggaagactcagcctcaggtgggaagactccagctccgggccctgaggcagcttctggagaatgggagctgctgaggctggattccagcaagaagaagctgcccagcccatgcccagacaaggagagtgacaaggaccttggtcctcggctccggctcccctcagcccccgtagccactggtctttctaccctggactccatctgtgactccctgagtgttgctttccggggcattagtcactgtcctcctagtgggctctatgcccacctctgccgcttcctggccttgtgcctgggccaccgggatccttatgccactgctttccttgtcaccgagtctgtctccatcacctgtcgccaccagctgctcacccacctccacagacagctcagcaaggcccagaagcaccgaggatcacttgaaatagcagaccagctgcaggggctgagccttcaggagatgcctggagatgtccccctggcccgcatccagcgcctcttttccttcagggctttggaatctggccacttcccccagcctgaaaaggagagtttccaggagcgcctggctctgatccccagtggggtgactgtgtgtgtgttggccctggccaccctccagcccggaaccgtgggcaacaccctcctgctgacccggctggaaaaggacagtcccccagtcagtgtgcagattcccactggccagaacaagcttcatctgcgttcagtcctgaatgagtttgatgccatccagaaggcacagaaagagaacagcagctgtactgacaagcgagaatggtggacagggcggctggcactggaccacaggatggaggttctcatcgcttccctagagaagtctgtgctgggctgctggaaggggctgctgctgccgtccagtgaggagcccggccctgcccaggaggcctcccgcctacaggagctgctacaggactgtggctggaaatatcctgaccgcactctgctgaaaatcatgctcagtggtgccggtgccctcacccctcaggacattcaggccctggcctacgggctgtgcccaacccagccagagcgagcccaggagctcctgaatgaggcagtaggacgtctacagggcctgacagtaccaagcaatagccaccttgtcttggtcctagacaaggacttgcagaagctgccgtgggaaagcatgcccagcctccaagcactgcctgtcacccggctgccctccttccgcttcctactcagctactccatcatcaaagagtatggggcctcgccagtgctgagtcaaggggtggatccacgaagtaccttctatgtcctgaaccctcacaataacctgtcaagcacagaggagcaatttcgagccaatttcagcagtgaagctggctggagaggagtggttggggaggtgccaagacctgaacaggtgcaggaagccctgacaaagcatgatttgtatatctatgcagggcatggggctggtgcccgcttccttgatgggcaggctgtcctgcggctgagctgtcgggcagtggccctgctgtttggctgtagcagtgcggccctggctgtgcgtggaaacctggagggggctggcatcgtgctcaagtacatcatggctggttgccccttgtttctgggtaatctctgggatgtgactgaccgcgacattgaccgctacacggaagctctgctgcaaggctggcttggagcaggcccaggggccccccttctctactatgtaaaccaggcccgccaagctccccgactcaagtatcttattggggctgcacctatagcctatggcttgcctgtctctctgcggtaa

SEQ ID NO: 131696 - DNA, 714 bp, Homo sapiens
  Payload ID: 5703
  Gene Symbol: ESPL1
  Gene Name: extra spindle pole bodies like 1, separase
  ENST ID: ENST00000553219
  CDS Start-End: 92-714
ggttacattttggatcctcgcggagtactggtcaggcggttaagtcctgtacctaggaaagagggcgagctctggggcgctctccggtgtcatgaggagcttcaaaagagtcaactttgggactctgctaagcagccagaaggaggctgaagagttgctgcccgccttgaaggagttcctgtccaaccctccagctggttttcccagcagccgatctgatgctgagaggagacaagcttgtgatgccatcctgagggcttgcaaccagcagctgactgctaagctagcttgccctaggcatctggggagcctgctggagctggcagagctggcctgtgatggctacttagtgtctaccccacagcgtcctcccctctacctggaacgaattctctttgtcttactgcggaatgctgctgcacaaggaagcccagaggccacactccgccttgctcagcccctccatgcctgcttggtgcagtgctctcgcgaggctgctccccaggactatgaggccgtggctcggggcagcttttctctgctttggaagggggcagaagccctgttggaacggcgagctgcatttgcagctcggctgaaggccttgagcttcctagtactcttggaggatgaaagtaccccttgtgaggttcctcactttgcttctccaacagcctgtcgagcggtagctgcccatcagctatttgatgccag

SEQ ID NO: 131697 - DNA, 3845 bp, Homo sapiens
  Payload ID: 5704
  Gene Symbol: ELFN1
  Gene Name: extracellular leucine-rich repeat and fibronectin type III domain containing 1
  Uniprot ID: P0C7U0
  ENST ID: ENST00000424383
  CDS Start-End: 488-2974
tacgttggtctcccaaagtgctgggattacaggtgcagctgccttggcgaccatttgtcctacagtttgtccggacccaggctgtccttctgtgtgctggaatgaggcgaacatgtctttgagcccagcagggaggaatcctccagcctattcctcgctggtgcatcaggtcgttggcgggccctgacacacaacaggaacgtcggagcaggaggagtcagtggagccatcaggacacccaggcccatggggcaggaggcctcggtcaccacaggactggggcggaagacgagaggcggccggccgtgagggaggcgccctccctccccgcgcttacgtcgcgcggccatgcggtttgggacaggacacccctgagagtgcaggcacctccccctcccgcccctccatccctctgggggctggcgcctggccccccacctggtccccctgggcaggctgaattggggctccctgcagggcggtcccgatggccgggcgtgggtggggcgcgctgtgggtgtgcgtggcggccgccaccctgctgcacgctggcggcctggcccgcgcagactgctggctgatcgagggcgacaagggcttcgtgtggctggccatctgcagccagaaccaacccccctacgaggccatcccacagcagatcaacagcaccatcgtggacctgcggctcaacgagaaccgtatccgcagcgtgcagtacgcctcgctcagccgctttggcaacctcacgtacctcaacctcaccaagaacgagatcggctacatcgaggacggcgccttctcgggccagttcaacctgcaggtgctgcagctgggctacaaccggctgcgcaacctcacggagggcatgctgcgcggcctgggcaagctggagtacctgtacctgcaggccaacctcatcgaggtggtcatggccagcagcttctgggagtgtcccaacatcgtcaacatcgacctgtccatgaaccgcatccagcagctcaacagcggcaccttcgccggcctggccaagctgtcggtgtgcgagctctacagcaaccccttctactgctcctgcgagctgctgggcttcctgcgctggctggccgccttcaccaacgccacacagacgtacgaccgcatgcagtgcgagtcgccgcccgtctactccggctactacctcctgggccagggccgccgcggccaccgcagcatcctcagcaaactgcagtcagtctgcaccgaggactcgtacgcggctgaggtggtcgggcccccacgtccagcatccgggcgctcacagccgggccgctccccgccgcccccgcctccgccggagcccagtgacatgccctgtgccgatgatgagtgcttctccggggacggcaccacgccactggtggccctgcccacgctggccacgcaggccgaggcccgccccctcatcaaggtcaagcagctcactcagaactcggccaccatcaccgtccagctgcccagcccgttccaccggatgtacaccctggagcatttcaacaacagcaaggcctccaccgtgtccaggctgaccaaggcccaggaggagatccgtctgaccaacctgttcacgctcaccaactacacctactgcgtggtgtccaccagcgccgggctgcgccacaaccacacctgcctcaccatctgcttgccccggctgcccagcccgcctggtccggtgcccagcccctccacggccacccactacatcatgaccatcctgggctgcctcttcggcatggtgctggtgctgggcgccgtctactactgcctgcgcaggcggcggcgccaggaggagaagcacaagaaggccgcctcggcagccgcagctggcagcctcaagaagaccatcatcgagctcaagtacgggccagagctggaggcgcccggcctggccccgctgtcccagggcccgctgctgggccccgaggccgtgacgcgcatcccttacctgcctgcggccggcgaggtggagcagtacaagctggtggagagcgcggacacccccaaggccagcaagggcagctacatggaggttcgaaccggggaccctccggaacgcagggactgtgagctgggccggccgggccccgacagccagagttcggtggccgagatctccaccatcgccaaggaggtggacaaggtcaaccagatcatcaacaactgcatcgacgcgctcaagtccgagtccacctccttccagggcgtcaagtcggggcccgtgtccgtcgcggagccgccgctggtgctgctgtccgagccgctggccgccaagcacggcttcctggcgcccgggtacaaggacgccttcggccacagcctgcagcggcaccacagcgtggaggccgccgggccccctcgtgccagcacctcgtccagcggctccgtgcgcagcccccgcgccttccgagccgaggccgtcggggtgcacaaggccgcggccgccgaggccaagtacatcgagaagggctcccccgcggccgacgccatcctcactgtgacacccgcggccgccgtgctgcgggccgaggccgagaagggtcgccagtacggcgagcaccggcactcgtaccccggctcccacccggccgagccacctgcgccccccgggccaccgccgccgcctccgcacgagggcctggggcgcaaggcgtccatcctggagccactcacccggccgcggccccgcgacctcgcctactcgcagctgtccccgcagtaccacagcctgagctactcctccagccccgagtacacctgccgggcctcccagagcatctgggagcgcttcagactgagccgccggcggcacaaggaggaagaggagttcatggccgcgggccatgccctgcgcaagaaggttcagttcgccaaagacgaggatctgcacgacatcctggactactggaagggcgtgtcggcccagcacaagtcctgagccccccaagaccggcgatgcccactggaccaaaaaggatgcaggatccacccagagactcagcaccaaacccaacacacgcacgccaccacagcaactgtgacagcggggggccctgcagaggcgaggggggagcgagtggggacagacaagggggacacgtcccgagctcctgtggccggtcctgggatgcgcttgtcgccccgggtggcacgtgtccacacacacacacacacacacacacacacacacgagggacttcggaaaactgtgtcttagggatggggggtgggggtggggatttttttttcattatctttcctcttttgagtcttctctgccttttcttttcctctctatctctttactttcttccttttttaaaaaaatataataaaagacaagttattttaaaaagacataaaatgccatccgtggggggtgtggccggcgtggccacctcggggcccctcacgtgatctcctcggtccgtggttttctgtggattctctgtccagtccgtctcttcattgccgcctccggagtccactgcagaggggcagagtgaatgccggcggccaagtggcctccgggacaggtcctggagccctgctggactcagggtgggtggaggctgtgcctgtggacggccggggtggccaggacggccaagggctgggaggcacgtcccccagcccagcccccatgtacactgtagtcgttctattgtacagaaaaaaatatttctatatttgcaatgtttgctgtaaaatgagaaagaaaaaaagactatgtctactaaaaaaaaaaaaaaaaagactatgtctacttaaaaaaaaatctgcaaaggaaaacaaatcaaatgcttgtt

SEQ ID NO: 131698 - DNA, 3742 bp, Homo sapiens
  Payload ID: 5704
  Gene Symbol: ELFN1
  Gene Name: extracellular leucine-rich repeat and fibronectin type III domain containing 1
  Uniprot ID: P0C7U0
  ENST ID: ENST00000561626
  CDS Start-End: 385-2871
gaggcgaacatgtctttgagcccagcagggaggaatcctccagcctattcctcgctggtgcatcaggtcgttggcgggccctgacacacaacaggaacgtcggagcaggaggagtcagtggagccatcaggacacccaggcccatggggcaggaggcctcggtcaccacaggactggggcggaagacgagaggcggccggccgtgagggaggcgccctccctccccgcgcttacgtcgcgcggccatgcggtttgggacaggacacccctgagagtgcaggcacctccccctcccgcccctccatccctctgggggctggcgcctggccccccacctggtccccctgggcaggctgaattggggctccctgcagggcggtcccgatggccgggcgtgggtggggcgcgctgtgggtgtgcgtggcggccgccaccctgctgcacgctggcggcctggcccgcgcagactgctggctgatcgagggcgacaagggcttcgtgtggctggccatctgcagccagaaccaacccccctacgaggccatcccacagcagatcaacagcaccatcgtggacctgcggctcaacgagaaccgtatccgcagcgtgcagtacgcctcgctcagccgctttggcaacctcacgtacctcaacctcaccaagaacgagatcggctacatcgaggacggcgccttctcgggccagttcaacctgcaggtgctgcagctgggctacaaccggctgcgcaacctcacggagggcatgctgcgcggcctgggcaagctggagtacctgtacctgcaggccaacctcatcgaggtggtcatggccagcagcttctgggagtgtcccaacatcgtcaacatcgacctgtccatgaaccgcatccagcagctcaacagcggcaccttcgccggcctggccaagctgtcggtgtgcgagctctacagcaaccccttctactgctcctgcgagctgctgggcttcctgcgctggctggccgccttcaccaacgccacacagacgtacgaccgcatgcagtgcgagtcgccgcccgtctactccggctactacctcctgggccagggccgccgcggccaccgcagcatcctcagcaaactgcagtcagtctgcaccgaggactcgtacgcggctgaggtggtcgggcccccacgtccagcatccgggcgctcacagccgggccgctccccgccgcccccgcctccgccggagcccagtgacatgccctgtgccgatgatgagtgcttctccggggacggcaccacgccactggtggccctgcccacgctggccacgcaggccgaggcccgccccctcatcaaggtcaagcagctcactcagaactcggccaccatcaccgtccagctgcccagcccgttccaccggatgtacaccctggagcatttcaacaacagcaaggcctccaccgtgtccaggctgaccaaggcccaggaggagatccgtctgaccaacctgttcacgctcaccaactacacctactgcgtggtgtccaccagcgccgggctgcgccacaaccacacctgcctcaccatctgcttgccccggctgcccagcccgcctggtccggtgcccagcccctccacggccacccactacatcatgaccatcctgggctgcctcttcggcatggtgctggtgctgggcgccgtctactactgcctgcgcaggcggcggcgccaggaggagaagcacaagaaggccgcctcggcagccgcagctggcagcctcaagaagaccatcatcgagctcaagtacgggccagagctggaggcgcccggcctggccccgctgtcccagggcccgctgctgggccccgaggccgtgacgcgcatcccttacctgcctgcggccggcgaggtggagcagtacaagctggtggagagcgcggacacccccaaggccagcaagggcagctacatggaggttcgaaccggggaccctccggaacgcagggactgtgagctgggccggccgggccccgacagccagagttcggtggccgagatctccaccatcgccaaggaggtggacaaggtcaaccagatcatcaacaactgcatcgacgcgctcaagtccgagtccacctccttccagggcgtcaagtcggggcccgtgtccgtcgcggagccgccgctggtgctgctgtccgagccgctggccgccaagcacggcttcctggcgcccgggtacaaggacgccttcggccacagcctgcagcggcaccacagcgtggaggccgccgggccccctcgtgccagcacctcgtccagcggctccgtgcgcagcccccgcgccttccgagccgaggccgtcggggtgcacaaggccgcggccgccgaggccaagtacatcgagaagggctcccccgcggccgacgccatcctcactgtgacacccgcggccgccgtgctgcgggccgaggccgagaagggtcgccagtacggcgagcaccggcactcgtaccccggctcccacccggccgagccacctgcgccccccgggccaccgccgccgcctccgcacgagggcctggggcgcaaggcgtccatcctggagccactcacccggccgcggccccgcgacctcgcctactcgcagctgtccccgcagtaccacagcctgagctactcctccagccccgagtacacctgccgggcctcccagagcatctgggagcgcttcagactgagccgccggcggcacaaggaggaagaggagttcatggccgcgggccatgccctgcgcaagaaggttcagttcgccaaagacgaggatctgcacgacatcctggactactggaagggcgtgtcggcccagcacaagtcctgagccccccaagaccggcgatgcccactggaccaaaaaggatgcaggatccacccagagactcagcaccaaacccaacacacgcacgccaccacagcaactgtgacagcggggggccctgcagaggcgaggggggagcgagtggggacagacaagggggacacgtcccgagctcctgtggccggtcctgggatgcgcttgtcgccccgggtggcacgtgtccacacacacacacacacacacacacacacacacgagggacttcggaaaactgtgtcttagggatggggggtgggggtggggatttttttttcattatctttcctcttttgagtcttctctgccttttcttttcctctctatctctttactttcttccttttttaaaaaaatataataaaagacaagttattttaaaaagacataaaatgccatccgtggggggtgtggccggcgtggccacctcggggcccctcacgtgatctcctcggtccgtggttttctgtggattctctgtccagtccgtctcttcattgccgcctccggagtccactgcagaggggcagagtgaatgccggcggccaagtggcctccgggacaggtcctggagccctgctggactcagggtgggtggaggctgtgcctgtggacggccggggtggccaggacggccaagggctgggaggcacgtcccccagcccagcccccatgtacactgtagtcgttctattgtacagaaaaaaatatttctatatttgcaatgtttgctgtaaaatgagaaagaaaaaaagactatgtctactaaaaaaaaaaaaaaaaagactatgtctacttaaaaaaaaatctgcaaaggaaaacaaatcaaatgcttgtt

SEQ ID NO: 131699 - DNA, 8361 bp, Homo sapiens
  Payload ID: 5705
  Gene Symbol: ELFN2
  Gene Name: extracellular leucine-rich repeat and fibronectin type III domain containing 2
  Uniprot ID: Q5R3F8
  ENST ID: ENST00000402918
  CDS Start-End: 787-3249
cacacgcgcgctcccagacacacacacagacacacgcgggccaccccacggccacgcaccccgcacccacacccgcgctcacactcacattcacactcacactcacacgcgcaggccccgcggccgccgcttcccggaggcggtgcttggcccggatcccggctggggctgggaaggagaggacttgggtgaggagctgctgccacccgggctgggccaggacctgagatctcattgctactgctgccgctgctgcctggggaacctttctgagacccaggttggggacagtgccggaggggcctcctctgctgcagacatctggaaccaggtgcagatgggtctcttccttcctgcccccatctctctcactcctggctcagtgcggcactctccagcctcctgtgggaatcatctgaagttctgagcccggaagccaaggaggaagacgaggaggaggaggaggaggaggaggaggaggagggagaggaagtcaagccctgagaacccttgcaccttcctagcaggagacaaggagcaacgctgcggtggggagcaggctgtggggcccccacccccagccctagccaggcctagtgcctgctgtagcaccctagaagatccccagcagttggcactagctgtacccaccttgcctggggcccccgtgctgggggtcgcccccaagatggtggcggccccagggaggactgtactgccagccccagcctctggccgctaggcaccccctgccttgccctggcccctcactccgaggccagcgccatgctgcgcctggggctgtgcgcggcggcgctgctgtgcgtgtgccggccgggtgccgtgcgtgccgactgctggctcattgagggcgacaagggctacgtgtggctggccatctgcagccagaaccagccgccctacgagaccatcccgcagcacatcaatagcaccgtgcacgacctgcggctcaacgagaacaagctcaaagccgtgctctactcctcgctcaaccgctttgggaacctcaccgacctcaacctcaccaagaacgagatctcctacatcgaggacggtgccttcctgggccagtcgagcctgcaggtcctgcagctgggctacaacaagctcagcaacctgacggagggcatgctgcgaggcatgagccgcctgcagttcctctttgtccagcacaacctcatcgaggtggtgacgcccaccgccttctccgagtgcccgagcctcatcagcatcgacctgtcctccaaccgcctcagccgcctggacggtgccacctttgccagcctcgccagcctgatggtgtgtgagctggccggcaaccccttcaactgtgagtgcgacctcttcggcttcctggcctggctggtggtcttcaacaacgtcaccaagaactacgaccgcctgcagtgtgagtcgccgcgggagtttgccggctacccgctgctggtgccccggccctaccacagcctcaacgccatcaccgtactccaggccaagtgtcggaatggctcgctgcccgcccggcccgtgagccaccccacgccctactccaccgacgcccagagggagccagacgagaactcgggcttcaaccccgacgagatcctttcggtggagccgccggcctcgtccaccacggatgcgtcggcagggccagccatcaagctgcaccacgtcacgttcacctcggccaccctggtggtcatcatcccacacccctacagcaagatgtacatcctcgtgcagtacaacaacagctacttctccgacgtcatgaccctcaagaacaagaaggagatcgtgacgctggacaaactgcgggcgcacactgagtacaccttctgcgtgacctcgctgcgcaacagccgccgcttcaaccacacctgcctgaccttcaccacgcgggaccccgtccccggagacttggcgcccagcacctccaccaccacccactacatcatgaccatcctgggctgcctctttggcatggttatcgtgctgggagccgtgtactactgcctgcgcaagcggcgcatgcaggaggagaagcagaagtctgtcaacgtcaagaagaccatcctggagatgcgctacggggctgatgtggatgccggctccattgtgcacgccgcccagaagctgggcgagcctcccgtgctgcccgtatctcgcatggcctccatcccctccatgatcggggagaagctgcccaccgccaaggggttggaggccgggctggacacacccaaggtagccaccaaaggcaactatatcgaggtgcgcacaggcgccggcggggacggtctggctcggcccgaggatgacctcccggacctcgagaacggccagggctcggctgcagagatctccaccattgccaaggaggtggacaaggtcaaccagatcattaacaactgcatcgatgctctcaagctggactcggcctcttttctgggaggcggcagcagcagtggggaccccgagctggccttcgagtgccagtccctccctgcagctgctgccgcctcctcagccactggccccggggccctggagcggcccagcttcctttcgcctccctacaaggagagctcccaccacccactacagcgccagctgagcgccgacgcggccgtgacccgcaagacctgcagcgtgtcgtccagtggttccatcaagagcgccaaggtctttagcctggacgtgcccgaccatccggccgccacagggctggctaagggcgactccaagtacatcgagaagggcagccccctcaacagcccgctggaccggctcccgctggtgccggcgggcagcggcgggggcagcggcgggggcgggggcatccaccacctggaggtgaagccggcctaccactgcagcgagcaccggcacagctttcccgccctgtactacgaggagggtgccgacagcctgagccagcgcgtgtccttcctcaagccgctgacccgctccaagcgtgactccacctactcgcagctctcccccagacactactactcagggtactcctccagccccgagtactcatccgagagcacgcacaagatctgggagcgcttccggccctacaagaagcaccaccgggaggaggtgtacatggccgccggtcacgccctgcgcaagaaggtccagttcgccaaggacgaggatctgcatgacatccttgattactggaagggggtctccgcccagcagaagctgtgaccccccccttcctccctggtgaggtcggagccagagggctgggggccttttgggggaagggtccaggcggccagggcggggagcagactcgggggccaaggcccaggagaggacgcacatgcagacccgcacgcacgcacgcacacacacacctgaccaccacccgactgtgaacaaaccaacatccgacaataacggacaggaaaacagagacacattttccttaaagtttacaaactgataccgaaaccagtcgtctttactgtgctgcccagggactctgctggggtgtgcagggccggggggctggcggggggaggaaggaagccaagagagggtgtggggtctggggggtctggggctagaaacaggtgtgggggtcaagaaagctggagtagagagggactgaagcccctctagggcagggagagggtcccttcccaagctgggagtcaagtcacctgcagatttagcattagacatcgggcaatgtctccttccactttagagagggggggaaactgaggcccagagaagggagttgacaaccccagggtcacacagcagcttagcctcaagtcccccaacttcccagcccagtgctgtcccggaaccccctgcagctctcttgtggacccctgcccgccctgtgcccaccccacatccctttccgaagctgtggtcccttggggctgagggacttgggaatcaggcaggtgctttttcttcctagaaagccacatggcagtgcccccagagtgtgcagctgtgattcagaatcctggggggcttttgacccctatgccggcacccgggagaagggagagggtcctgttgacgggaaaggagccgaggcagggcgacattccaccagcccacttcaagtgtcttccacgtggcctgggaagagtggggcgtgtggcgggcaggccagctcccaggacgtctcaggtgcaggctcccggccccagcttctctggtcctccgagacccctgcccaccgcagaagggcagcggtgcactgtgatgcctggagggctgcagggaggagctgtcatgggggacttcctgcctgtccccatggcctgtgtccccacctgcccgaccccatcgtgggatctcggctcctatctcagccgcccacccggggaaggagggctttctcacccatcccctctgggctgctcatccaggcctggccccctggccagaggggctcccatgtttccgtggcaatggccacttccctctttctgacccccccacccaacatcaaacaaagcacaaacagtgaggcccccacccgagagagggttgaggagcaggctgggttcgtggcgccccagcccctcccagccagcctctgtcaccatggtaaccctgtgcctggcagttggtgcccagagtgaccgttgggctctggggttctctgtccatgtaggcggtggcagagggtggtgagggagggccagcctggcagcagctcctggggccagctcttttgggaggcaaatctgcggtcctgagactggggtcttgaccagtcaggatgctgatgggccggagtccatcatccttcacctctgggtgggagctggcccagcggggtgtggggacgcctctactagcagctttgcccgcctagcaacatgtcgcttggctgccacccacctcagcttggggggccccggctctccccacgcccctgccagagacccccagtctagggcctgtggcccacatgggtttcctgagatttggggagtgtgactgaggggcgagggtaggcactggaatgggtccaagaccggcactgttggtgggcaggggctctgaccaggaaagctagtgccatcccctggggaccccaacgaccttcctgctgggggcagggggtgagggaggacagcagagggctaggaggctcgggctcagctgagtacctctctcacaccaactttggggttaacgaagcccagggctcactttgagggtgacatttgcaaagaaaagactgttctcctggggcgaggaggggagggggcggcatggatacgcggagcagacctcctcccccggcccccaaaacctgccccccaacccctcctcacacccccttggcacaactgagaaaagcaagcaggcagagaagccaggggtgtgaggaagcagactccctgttatatttgcatgacgattttactgtatttttctgagcaaacatctgtcgtgtatgtgccagtttgtccagactcccccgccccctctctgatgccctgctttcccacattctgtctgttgtgatctgacgagcagctcttgaaacccagggaggggtcagctctgcaaaaacagacccaaaacaggtgccaccaagacacagccctgccccacacccacctcctgtgtttctgagcattgggcccatgtgccacctcccttcctccctccctctctccactgccacctcccttgtccccagttccttcccctcctccatgccagggagggcagccccagggaagcctcctcaagggctcttgtcccggtggaagggactgtctgtccgtcccgcttgttcccgttttgtagatgaggaagtcagggctcccagacgggcctggtgaattggctggccagctggggtggaggatcagtcacactgctgagtgtaggaggccaggagcttggggcttcgtggggggcttcagggagagggtgggggctttgagaaaggaacccgtgggaagaaggagcacgcctgggctgggccccagggagggttcccagcagcaggagttaggggcctgcgcttgccatttccccatcctttctgcgtgaagatatttaggaaacctcagactctctgactgcagggacaggggcccttccaaagagcaggactctgatgatccaggaggggaactggccttgaagacccagttcatgtggttctttgtgaggcagagcggggtctaagactcgggtctctggcctcccagccaggccagagccccaactgctcagcttggggagagcccacccggaggctggcctgcatctgtgtcccacgtcctgctcaggatgagtttttcccaggcgggagggaagtattcacaaaatgttgccatccaaggtctgggtttgtgatgatgatgagcatggtggagctgggctgtggtctggggcaggccagcagggcagacaccaggaaaagagggcagggggggccacagggagggaggggagatggaggcccggtggagcgagggatgtgtgggtgccacgccctggacctctgcggggaggcctcctgccttgggccggaacaaggtcacacctgggcttgcctgcctctgttggagaatctcctctgaagctgtttctgggaagtagcacaatgggtctgctccttcctgggagggcacagcaggtgcagctaaccctctgttggagcttatggccttccagtagcaaaacacagaggtctggcatgaaggcaagaaagcctggttggtggggaaacctcgtcacgggtcccggccttgcttttccccgcggcaggaagagtctctctctgcccaccaaagaatccctcacctgggctcccctcctgaggcagtgcaggaggcctgtgggagcagcctgtgtccaggctggggagcccgtgtctgggtaggtctgggaaaagggctgtcaggggagcgaggagggtgggagtaaagagacctgcttgggaaggccaggcctggatcgtccccgggaggcagctggggcagcagcagtggggagtatcaggctggccgagagtcacccatgttctcaactggaagttggtcgcctgccccactccctcctggaaatgtaacagcggggtgaacagaagtgcagagacggaaaggagaggaaaggagacctagagctgacaaactcggttgtgacagtgctgaggccgggatggcatcaggaattaaggacaccagtgacaggtcctagcttataaggggcctaagtgcagggaagggataagacacaatgctccctagtgactggcgccttgcagaaaattaaaatagggtgatgggggaggggcaaggctggtcagggagcatcctgtgtgggatggggggacagggagccaagctgtgaatgacaagaggagccagaagggtgggtgggtgggtgggtgtgaagacgagactagagggagtggggttgcagtggctgcctgtcccccaagcaccgcctctgtcccctactaccctgcccctgcccattcctggcccagcagagccccctttccatgagtgtggatgggcggggcaagccgtcggggagcctggggaagctcagccctgaggggcttactttgcccgtggaagccagtgtgaaggttagggcagccttgcctggctggccccattgccacctctcctgtctgacaaggtggctgctccagaggtggctgagccccaggagaggggacctcctctaactctcatgctcagattccatcctgacacactccttccctgaccctgggtgccccttctaagacaaaaccagggtccatactgcttgcctccagaggcggcttcaggcctcactaaaggtcaggcagtcctgctgagcaggagggagaggaagggggtcctgtaggacgggcaggatggtctgggcctgctcctccttcctctgcccctctgccactccacactccagcacagggctgggacaggggcttggagttcctgcagtggcggccacacttccctccctccctcccttcctcaggagccgccagtccccaagttggctgtggttgggcacctggtttgggtcctgcagagctgggctcaggccctgggctctgaacctgtgaacccttgctgtgttacgaaactttccttcctctgagggccttgaaccctctccttttcttcttttgggggtgggggttaactttattttctcttccctgtatctgcctctcccttccctcaatttcctgttttaaaactgaatggcacgaaattgttttcctcaactcggagattcctgtatggagagaatcaatttctatatttgcaataaatttcttatttaaagcta

SEQ ID NO: 131700 - DNA, 8360 bp, Homo sapiens
  Payload ID: 5705
  Gene Symbol: ELFN2
  Gene Name: extracellular leucine-rich repeat and fibronectin type III domain containing 2
  Uniprot ID: Q5R3F8
  ENST ID: ENST00000613079
  CDS Start-End: 787-3249
cacacgcgcgctcccagacacacacacagacacacgcgggccaccccacggccacgcaccccgcacccacacccgcgctcacactcacattcacactcacactcacacgcgcaggccccgcggccgccgcttcccggaggcggtgcttggcccggatcccggctggggctgggaaggagaggacttgggtgaggagctgctgccacccgggctgggccaggacctgagatctcattgctactgctgccgctgctgcctggggaacctttctgagacccaggttggggacagtgccggaggggcctcctctgctgcagacatctggaaccaggtgcagatgggtctcttccttcctgcccccatctctctcactcctggctcagtgcggcactctccagcctcctgtgggaatcatctgaagttctgagcccggaagccaaggaggaagacgaggaggaggaggaggaggaggaggaggaggagggagaggaagtcaagccctgagaacccttgcaccttcctagcaggagacaaggagcaacgctgcggtggggagcaggctgtggggcccccacccccagccctagccaggcctagtgcctgctgtagcaccctagaagatccccagcagttggcactagctgtacccaccttgcctggggcccccgtgctgggggtcgcccccaagatggtggcggccccagggaggactgtactgccagccccagcctctggccgctaggcaccccctgccttgccctggcccctcactccgaggccagcgccatgctgcgcctggggctgtgcgcggcggcgctgctgtgcgtgtgccggccgggtgccgtgcgtgccgactgctggctcattgagggcgacaagggctacgtgtggctggccatctgcagccagaaccagccgccctacgagaccatcccgcagcacatcaatagcaccgtgcacgacctgcggctcaacgagaacaagctcaaagccgtgctctactcctcgctcaaccgctttgggaacctcaccgacctcaacctcaccaagaacgagatctcctacatcgaggacggtgccttcctgggccagtcgagcctgcaggtcctgcagctgggctacaacaagctcagcaacctgacggagggcatgctgcgaggcatgagccgcctgcagttcctctttgtccagcacaacctcatcgaggtggtgacgcccaccgccttctccgagtgcccgagcctcatcagcatcgacctgtcctccaaccgcctcagccgcctggacggtgccacctttgccagcctcgccagcctgatggtgtgtgagctggccggcaaccccttcaactgtgagtgcgacctcttcggcttcctggcctggctggtggtcttcaacaacgtcaccaagaactacgaccgcctgcagtgtgagtcgccgcgggagtttgccggctacccgctgctggtgccccggccctaccacagcctcaacgccatcaccgtactccaggccaagtgtcggaatggctcgctgcccgcccggcccgtgagccaccccacgccctactccaccgacgcccagagggagccagacgagaactcgggcttcaaccccgacgagatcctttcggtggagccgccggcctcgtccaccacggatgcgtcggcagggccagccatcaagctgcaccacgtcacgttcacctcggccaccctggtggtcatcatcccacacccctacagcaagatgtacatcctcgtgcagtacaacaacagctacttctccgacgtcatgaccctcaagaacaagaaggagatcgtgacgctggacaaactgcgggcgcacactgagtacaccttctgcgtgacctcgctgcgcaacagccgccgcttcaaccacacctgcctgaccttcaccacgcgggaccccgtccccggagacttggcgcccagcacctccaccaccacccactacatcatgaccatcctgggctgcctctttggcatggttatcgtgctgggagccgtgtactactgcctgcgcaagcggcgcatgcaggaggagaagcagaagtctgtcaacgtcaagaagaccatcctggagatgcgctacggggctgatgtggatgccggctccattgtgcacgccgcccagaagctgggcgagcctcccgtgctgcccgtatctcgcatggcctccatcccctccatgatcggggagaagctgcccaccgccaaggggttggaggccgggctggacacacccaaggtagccaccaaaggcaactatatcgaggtgcgcacaggcgccggcggggacggtctggctcggcccgaggatgacctcccggacctcgagaacggccagggctcggctgcagagatctccaccattgccaaggaggtggacaaggtcaaccagatcattaacaactgcatcgatgctctcaagctggactcggcctcttttctgggaggcggcagcagcagtggggaccccgagctggccttcgagtgccagtccctccctgcagctgctgccgcctcctcagccactggccccggggccctggagcggcccagcttcctttcgcctccctacaaggagagctcccaccacccactacagcgccagctgagcgccgacgcggccgtgacccgcaagacctgcagcgtgtcgtccagtggttccatcaagagcgccaaggtctttagcctggacgtgcccgaccatccggccgccacagggctggctaagggcgactccaagtacatcgagaagggcagccccctcaacagcccgctggaccggctcccgctggtgccggcgggcagcggcgggggcagcggcgggggcgggggcatccaccacctggaggtgaagccggcctaccactgcagcgagcaccggcacagctttcccgccctgtactacgaggagggtgccgacagcctgagccagcgcgtgtccttcctcaagccgctgacccgctccaagcgtgactccacctactcgcagctctcccccagacactactactcagggtactcctccagccccgagtactcatccgagagcacgcacaagatctgggagcgcttccggccctacaagaagcaccaccgggaggaggtgtacatggccgccggtcacgccctgcgcaagaaggtccagttcgccaaggacgaggatctgcatgacatccttgattactggaagggggtctccgcccagcagaagctgtgaccccccccttcctccctggtgaggtcggagccagagggctgggggccttttgggggaagggtccaggcggccagggcggggagcagactcgggggccaaggcccaggagaggacgcacatgcagacccgcacgcacgcacgcacacacacacctgaccaccacccgactgtgaacaaaccaacatccgacaataacggacaggaaaacagagacacattttccttaaagtttacaaactgataccgaaaccagtcgtctttactgtgctgcccagggactctgctggggtgtgcagggccggggggctggcggggggaggaaggaagccaagagagggtgtggggtctggggggtctggggctagaaacaggtgtgggggtcaagaaagctggagtagagagggactgaagcccctctagggcagggagagggtcccttcccaagctgggagtcaagtcacctgcagatttagcattagacatcgggcaatgtctccttccactttagagagggggggaaactgaggcccagagaagggagttgacaaccccagggtcacacagcagcttagcctcaagtcccccaacttcccagcccagtgctgtcccggaaccccctgcagctctcttgtggacccctgcccgccctgtgcccaccccacatccctttccgaagctgtggtcccttggggctgagggacttgggaatcaggcaggtgctttttcttcctagaaagccacatggcagtgcccccagagtgtgcagctgtgattcagaatcctggggggcttttgacccctatgccggcacccgggagaagggagagggtcctgttgacgggaaaggagccgaggcagggcgacattccaccagcccacttcaagtgtcttccacgtggcctgggaagagtggggcgtgtggcgggcaggccagctcccaggacgtctcaggtgcaggctcccggccccagcttctctggtcctccgagacccctgcccaccgcagaagggcagcggtgcactgtgatgcctggagggctgcagggaggagctgtcatgggggacttcctgcctgtccccatggcctgtgtccccacctgcccgaccccatcgtgggatctcggctcctatctcagccgcccacccggggaaggagggctttctcacccatcccctctgggctgctcatccaggcctggccccctggccagaggggctcccatgtttccgtggcaatggccacttccctctttctgacccccccacccaacatcaaacaaagcacaaacagtgaggcccccacccgagagagggttgaggagcaggctgggttcgtggcgccccagcccctcccagccagcctctgtcaccatggtaaccctgtgcctggcagttggtgcccagagtgaccgttgggctctggggttctctgtccatgtaggcggtggcagagggtggtgagggagggccagcctggcagcagctcctggggccagctcttttgggaggcaaatctgcggtcctgagactggggtcttgaccagtcaggatgctgatgggccggagtccatcatccttcacctctgggtgggagctggcccagcggggtgtggggacgcctctactagcagctttgcccgcctagcaacatgtcgcttggctgccacccacctcagcttggggggccccggctctccccacgcccctgccagagacccccagtctagggcctgtggcccacatgggtttcctgagatttggggagtgtgactgaggggcgagggtaggcactggaatgggtccaagaccggcactgttggtgggcaggggctctgaccaggaaagctagtgccatcccctggggaccccaacgaccttcctgctgggggcagggggtgagggaggacagcagagggctaggaggctcgggctcagctgagtacctctctcacaccaactttggggttaacgaagcccagggctcactttgagggtgacatttgcaaagaaaagactgttctcctggggcgaggaggggagggggcggcatggatacgcggagcagacctcctcccccggcccccaaaacctgccccccaacccctcctcacacccccttggcacaactgagaaaagcaagcaggcagagaagccaggggtgtgaggaagcagactccctgttatatttgcatgacgattttactgtatttttctgagcaaacatctgtcgtgtatgtgccagtttgtccagactcccccgccccctctctgatgccctgctttcccacattctgtctgttgtgatctgacgagcagctcttgaaacccagggaggggtcagctctgcaaaaacagacccaaaacaggtgccaccaagacacagccctgccccacacccacctcctgtgtttctgagcattgggcccatgtgccacctcccttcctccctccctctctccactgccacctcccttgtccccagttccttcccctcctccatgccagggagggcagccccagggaagcctcctcaagggctcttgtcccggtggaagggactgtctgtccgtcccgcttgttcccgttttgtagatgaggaagtcagggctcccagacgggcctggtgaattggctggccagctggggtggaggatcagtcacactgctgagtgtaggaggccaggagcttggggcttcgtggggggcttcagggagagggtgggggctttgagaaaggaacccgtgggaagaaggagcacgcctgggctgggccccagggagggttcccagcagcaggagttaggggcctgcgcttgccatttccccatcctttctgcgtgaagatatttaggaaacctcagactctctgactgcagggacaggggcccttccaaagagcaggactctgatgatccaggaggggaactggccttgaagacccagttcatgtggttctttgtgaggcagagcggggtctaagactcgggtctctggcctcccagccaggccagagccccaactgctcagcttggggagagcccacccggaggctggcctgcatctgtgtcccacgtcctgctcaggatgagtttttcccaggcgggagggaagtattcacaaaatgttgccatccaaggtctgggtttgtgatgatgatgagcatggtggagctgggctgtggtctggggcaggccagcagggcagacaccaggaaaagagggcagggggggccacagggagggaggggagatggaggcccggtggagcgagggatgtgtgggtgccacgccctggacctctgcggggaggcctcctgccttgggccggaacaaggtcacacctgggcttgcctgcctctgttggagaatctcctctgaagctgtttctgggaagtagcacaatgggtctgctccttcctgggagggcacagcaggtgcagctaaccctctgttggagcttatggccttccagtagcaaaacacagaggtctggcatgaaggcaagaaagcctggttggtggggaaacctcgtcacgggtcccggccttgcttttccccgcggcaggaagagtctctctctgcccaccaaagaatccctcacctgggctcccctcctgaggcagtgcaggaggcctgtgggagcagcctgtgtccaggctggggagcccgtgtctgggtaggtctgggaaaagggctgtcaggggagcgaggagggtgggagtaaagagacctgcttgggaaggccaggcctggatcgtccccgggaggcagctggggcagcagcagtggggagtatcaggctggccgagagtcacccatgttctcaactggaagttggtcgcctgccccactccctcctggaaatgtaacagcggggtgaacagaagtgcagagacggaaaggagaggaaaggagacctagagctgacaaactcggttgtgacagtgctgaggccgggatggcatcaggaattaaggacaccagtgacaggtcctagcttataaggggcctaagtgcagggaagggataagacacaatgctccctagtgactggcgccttgcagaaaattaaaatagggtgatgggggaggggcaaggctggtcagggagcatcctgtgtgggatggggggacagggagccaagctgtgaatgacaagaggagccagaagggtgggtgggtgggtgggtgtgaagacgagactagagggagtggggttgcagtggctgcctgtcccccaagcaccgcctctgtcccctactaccctgcccctgcccattcctggcccagcagagccccctttccatgagtgtggatgggcggggcaagccgtcggggagcctggggaagctcagccctgaggggcttactttgcccgtggaagccagtgtgaaggttagggcagccttgcctggctggccccattgccacctctcctgtctgacaaggtggctgctccagaggtggctgagccccaggagaggggacctcctctaactctcatgctcagattccatcctgacacactccttccctgaccctgggtgccccttctaagacaaaaccagggtccatactgcttgcctccagaggcggcttcaggcctcactaaaggtcaggcagtcctgctgagcaggagggagaggaagggggtcctgtaggacgggcaggatggtctgggcctgctcctccttcctctgcccctctgccactccacactccagcacagggctgggacaggggcttggagttcctgcagtggcggccacacttccctccctccctcccttcctcaggagccgccagtccccaagttggctgtggttgggcacctggtttgggtcctgcagagctgggctcaggccctgggctctgaacctgtgaacccttgctgtgttacgaaactttccttcctctgagggccttgaaccctctccttttcttcttttgggggtgggggttaactttattttctcttccctgtatctgcctctcccttccctcaatttcctgttttaaaactgaatggcacgaaattgttttcctcaactcggagattcctgtatggagagaatcaatttctatatttgcaataaatttcttatttaaagct

SEQ ID NO: 131701 - DNA, 1444 bp, Homo sapiens
  Payload ID: 5706
  Gene Symbol: ECM1
  Gene Name: extracellular matrix protein 1
  Uniprot ID: Q16610
  ENST ID: ENST00000346569
  CDS Start-End: 104-1351
acaaccgtaacagccaccagacaagcttcagtggccggcccttcacatccagacttgcctgagaggacccacctctgagtgtccagtggtcagttgccccaggatggggaccacagccagagcagccttggtcttgacctatttggctgttgcttctgctgcctctgagggaggcttcacggctacaggacagaggcagctgaggccagagcactttcaagaagttggctacgcagctcccccctccccacccctatcccgaagcctccccatggatcaccctgactcctctcagcatggccctccctttgagggacagagtcaagtgcagccccctccctctcaggaggccacccctctccaacaggaaaagctgctacctgcccaactccctgctgaaaaggaagtgggtccccctctccctcaggaagctgtccccctccaaaaagagctgccctctctccagcaccccaatgaacagaaggaaggaacgccagctccatttggggaccagagccatccagaacctgagtcctggaatgcagcccagcactgccaacaggaccggtcccaagggggctggggccaccggctggatggcttcccccctgggcggccttctccagacaatctgaaccaaatctgccttcctaaccgtcagcatgtggtatatggtccctggaacctaccacagtccagctactcccacctcactcgccagggtgagaccctcaatttcctggagattggatattcccgctgctgccactgccgcagccacacaaaccgcctagagtgtgccaaacttgtgtgggaggatacccttgacaaatactgtgaccgggagtatgctgtgaagacccaccaccacttgtgttgccgccaccctcccagccctactcgggatgagtgctttgcccgtcgggctccttaccccaactatgaccgggacatcttgaccattgacatcggtcgagtcacccccaacctcatgggccacctctgtggaaaccaaagagttctcaccaagcataaacatattcctgggctgatccacaacatgactgcccgctgctgtgacctgccatttccagaacaggcctgctgtgcagaggaggagaaattaaccttcatcaatgatctgtgtggtccccgacgtaacatctggcgagaccctgccctctgctgttacctgagtcctggggatgaacaggtcaactgcttcaacatcaattatctgaggaacgtggctctagtgtctggagacactgagaacgccaagggccagggggagcagggctcaactggaggaacaaatatcagctccacctctgagcccaaggaagaatgagtcaccccagagccctagagggtcagatggggggaaccccaccctgccccacccatctgaacactcattacactaaacacctcttggatttgg

SEQ ID NO: 131702 - DNA, 2070 bp, Homo sapiens
  Payload ID: 5706
  Gene Symbol: ECM1
  Gene Name: extracellular matrix protein 1
  Uniprot ID: Q16610
  ENST ID: ENST00000369047
  CDS Start-End: 126-1748
agaagagctggtcctgaagctcacaaccgtaacagccaccagacaagcttcagtggccggcccttcacatccagacttgcctgagaggacccacctctgagtgtccagtggtcagttgccccaggatggggaccacagccagagcagccttggtcttgacctatttggctgttgcttctgctgcctctgagggaggcttcacggctacaggacagaggcagctgaggccagagcactttcaagaagttggctacgcagctcccccctccccacccctatcccgaagcctccccatggatcaccctgactcctctcagcatggccctccctttgagggacagagtcaagtgcagccccctccctctcaggaggccacccctctccaacaggaaaagctgctacctgcccaactccctgctgaaaaggaagtgggtccccctctccctcaggaagctgtccccctccaaaaagagctgccctctctccagcaccccaatgaacagaaggaaggaacgccagctccatttggggaccagagccatccagaacctgagtcctggaatgcagcccagcactgccaacaggaccggtcccaagggggctggggccaccggctggatggcttcccccctgggcggccttctccagacaatctgaaccaaatctgccttcctaaccgtcagcatgtggtatatggtccctggaacctaccacagtccagctactcccacctcactcgccagggtgagaccctcaatttcctggagattggatattcccgctgctgccactgccgcagccacacaaaccgcctagagtgtgccaaacttgtgtgggaggaagcaatgagccgattctgtgaggccgagttctcggtcaagacccgaccccactggtgctgcacgcggcagggggaggctcggttctcctgcttccaggaggaagctccccagccacactaccagctccgggcctgccccagccatcagcctgatatttcctcgggtcttgagctgcctttccctcctggggtgcccacattggacaatatcaagaacatctgccacctgaggcgcttccgctctgtgccacgcaacctgccagctactgaccccctacaaagggagctgctggcactgatccagctggagagggagttccagcgctgctgccgccaggggaacaatcacacctgtacatggaaggcctgggaggatacccttgacaaatactgtgaccgggagtatgctgtgaagacccaccaccacttgtgttgccgccaccctcccagccctactcgggatgagtgctttgcccgtcgggctccttaccccaactatgaccgggacatcttgaccattgacatcggtcgagtcacccccaacctcatgggccacctctgtggaaaccaaagagttctcaccaagcataaacatattcctgggctgatccacaacatgactgcccgctgctgtgacctgccatttccagaacaggcctgctgtgcagaggaggagaaattaaccttcatcaatgatctgtgtggtccccgacgtaacatctggcgagaccctgccctctgctgttacctgagtcctggggatgaacaggtcaactgcttcaacatcaattatctgaggaacgtggctctagtgtctggagacactgagaacgccaagggccagggggagcagggctcaactggaggaacaaatatcagctccacctctgagcccaaggaagaatgagtcaccccagagccctagagggtcagatggggggaaccccaccctgccccacccatctgaacactcattacactaaacacctcttggatttggtgtcctcattgtctatctaatgtctcacccgcagtgttttaagtggatcttggtgccctggcccaggagggcactggcgttttcagacacaccacagacaaacacaccctcctaagcctgcttgtatttccttcagtgcctggcccctgaggcccacggccctgcccccttcactgagcagatgttcacaggctgtgggatgcgaccataactaaacagcttgacgtca

SEQ ID NO: 131703 - DNA, 1925 bp, Homo sapiens
  Payload ID: 5706
  Gene Symbol: ECM1
  Gene Name: extracellular matrix protein 1
  Uniprot ID: Q16610
  ENST ID: ENST00000369049
  CDS Start-End: 135-1838
aattataaaagaagagctggtcctgaagctcacaaccgtaacagccaccagacaagcttcagtggccggcccttcacatccagacttgcctgagaggacccacctctgagtgtccagtggtcagttgccccaggatggggaccacagccagagcagccttggtcttgacctatttggctgttgcttctgctgcctctgagggaggcttcacggctacaggacagaggcagctgaggccagagcactttcaagaagttggctacgcagctcccccctccccacccctatcccgaagcctccccatggatcaccctgactcctctcagcatggccctccctttgagggacagagtggaaaggagggaagaggccctcgcccccactcccagccctggctaggagaaagggtgggctgctcacacattcccccttctatagtgcagccccctccctctcaggaggccacccctctccaacaggaaaagctgctacctgcccaactccctgctgaaaaggaagtgggtccccctctccctcaggaagctgtccccctccaaaaagagctgccctctctccagcaccccaatgaacagaaggaaggaacgccagctccatttggggaccagagccatccagaacctgagtcctggaatgcagcccagcactgccaacaggaccggtcccaagggggctggggccaccggctggatggcttcccccctgggcggccttctccagacaatctgaaccaaatctgccttcctaaccgtcagcatgtggtatatggtccctggaacctaccacagtccagctactcccacctcactcgccagggtgagaccctcaatttcctggagattggatattcccgctgctgccactgccgcagccacacaaaccgcctagagtgtgccaaacttgtgtgggaggaagcaatgagccgattctgtgaggccgagttctcggtcaagacccgaccccactggtgctgcacgcggcagggggaggctcggttctcctgcttccaggaggaagctccccagccacactaccagctccgggcctgccccagccatcagcctgatatttcctcgggtcttgagctgcctttccctcctggggtgcccacattggacaatatcaagaacatctgccacctgaggcgcttccgctctgtgccacgcaacctgccagctactgaccccctacaaagggagctgctggcactgatccagctggagagggagttccagcgctgctgccgccaggggaacaatcacacctgtacatggaaggcctgggaggatacccttgacaaatactgtgaccgggagtatgctgtgaagacccaccaccacttgtgttgccgccaccctcccagccctactcgggatgagtgctttgcccgtcgggctccttaccccaactatgaccgggacatcttgaccattgacatcggtcgagtcacccccaacctcatgggccacctctgtggaaaccaaagagttctcaccaagcataaacatattcctgggctgatccacaacatgactgcccgctgctgtgacctgccatttccagaacaggcctgctgtgcagaggaggagaaattaaccttcatcaatgatctgtgtggtccccgacgtaacatctggcgagaccctgccctctgctgttacctgagtcctggggatgaacaggtcaactgcttcaacatcaattatctgaggaacgtggctctagtgtctggagacactgagaacgccaagggccagggggagcagggctcaactggaggaacaaatatcagctccacctctgagcccaaggaagaatgagtcaccccagagccctagagggtcagatggggggaaccccaccctgccccacccatctgaacactcattacactaaacacctcttgg

SEQ ID NO: 131704 - DNA, 3253 bp, Homo sapiens
  Payload ID: 5707
  Gene Symbol: ECM2
  Gene Name: extracellular matrix protein 2, female organ and adipocyte specific
  Uniprot ID: O94769
  ENST ID: ENST00000344604
  CDS Start-End: 151-2250
caaatacttttcaacattcccttctgtcctttctttgtttttaaagaaagctctgattttgtttcattttcagctggagacttaaatgacaccaagcaaagcctacttagtttagatctccagaaattggctggtggaaaaaaatcaaacatgaagattgcagttttgttttgtttttttctgcttatcatttttcaaactgactttggaaaaaatgaagaaattcctaggaagcaaaggaggaagatctaccacagaaggttgaggaaaagttcaacctcacacaagcacagatcaaacagacagcttggaattcagcaaacaacagtttttacaccagtagcaagacttcctattgttaactttgattatagcatggaggaaaagtttgaatccttttcaagttttcctggagtagaatcaagttataatgtgttaccaggaaagaagggacactgtttggtaaagggcataaccatgtacaacaaagctgtgtggtcgcctgagccctgcactacctgcctctgctcagatggaagagttctttgtgatgaaaccatgtgccatccccagaggtgcccccaaacagttatacctgaaggggaatgctgcccggtctgctccgctactgtctcctattctctactcagtggtatagcattaaatgatagaaatgaattttctggtgattcttcagaacaaagagaacctaccaatttacttcataagcaactgccacctcctcaggtgggaatggaccgaatagtaagaaaagaagcacttcaatctgaggaggatgaagaagtgaaagaagaagatacagagcaaaagagagagacccctgaatctagaaatcaggggcaactttacagtgagggggacagcagaggaggagacagaaagcagaggcctggagaggagaggaggctggcacaccagcaacaacgccaaggaagggaggaggaggaggatgaggaggaggagggtgaggagggtgaggaggatgaggaggacgaggaggacccggtaagaggagatatgttccgaatgccctctcgatccccgcttcctgctcctcccagaggcacactgcgcctgccaagcgggtgctctctgtcctacaggaccatcagctgcatcaacgccatgcttacccagataccaccgctgacagcaccacagataacaagtctggagctcactggcaattccatcgcctccatcccagatgaagcatttaatggattaccaaatttggaaaggcttgatctgagtaaaaataatatcacttcttcaggcataggtccaaaagcattcaagcttctgaagaagttaatgcgtttgaatatggatggaaataatttgatacagattccttcacaattgccatctacattagaagaacttaaagtcaatgagaacaatcttcaggctatcgatgaagaaagtttatcagacttaaatcagttggtcaccttagaattggaaggaaacaatctcagtgaagccaatgtcaatcctttagctttcaaacctttgaagagcctagcctacttgcgtctgggaaaaaataaatttagaattataccgcagggtcttcctggttctattgaggaattatacctagaaaataaccaaattgaagaaataactgaaatttgtttcaatcataccagaaagatcaatgtcattgtactacgttataacaaaattgaagaaaataggattgctcctttagcctggataaatcaagaaaatctagaatccattgatctctcctacaacaagctctatcacgtcccgtcctatctacccaagtccttgctgcacctagtactccttgggaaccagattgaacggatccctggctatgtgtttggccacatggaaccaggcctggaatacttgtacctgtcatttaacaaacttgctgatgatggcatggaccgtgtctccttctatggggcatatcattctctgagagaattatttctggatcacaatgacttaaaatctataccacctgggatacaagaaatgaaagcactacattttctgaggctgaacaacaacaagatacggaacattcttccagaagaaatttgcaatgctgaagaggatgatgactcaaatctggaacatcttcatcttgaaaacaattatattaaaattagagaaataccatcttacacattttcatgcataagatcatactcaagtatcgttcttaaaccacaaaacatcaagtaattccaagttttcctttgctgtttataaactttactcatgtatttgtagtagctgcatttgtcattaataagagagacataatcctcctgttatactcagtatcattatatgctagtcaacctgattcactaacacacagatgaacaaccaaaatatacctaaaaggtatagtctctaggagttttattaatagtaaaggtaaaatctctcagtttcctacctctagaaagaggccatctcactagaataggatattatgcatactgagctagaccagaagagtctggaacaaaataaacacagcctttataatcaacttgaatactggtgttagctgagaactctgtaagtccctttaaaaattatgtatcttttggttcaagattaagaagcataatgacaacaaaaaaagcaggcagaatttatgaataagtgttgtttattattaaaacaataatttgttaatttcttataaggtcctgtgctataattactggtataaatataactgaatattggggtagctttcatttcttccattaattacatgtgtaaaattaaaacactactgtaatgttaatttcctggttttgaaaatcatattatggttatgtacattgttaacattaaggaaagctggcagaagggtgtgcataaattctatactctttttgaaacttttctataattctaaaattattttttaaagttaaacagtatattaagattaccttcactattcctcactcaagattaagacattttttgaaaagcagtagagtttgcttaaaatacaaattaattattcttgactataaccttgtaaaggtaaatctaatgtataaatttttgaaaaattttgcaccactggtcatagcatctatctcctttgccttaatttactgaaatacatcattttattcggttcaattgaaataaagctatgtctttactatgtattggccctaccaaaatcatatattaaaattttctaacataatga

SEQ ID NO: 131705 - DNA, 1606 bp, Homo sapiens
  Payload ID: 5707
  Gene Symbol: ECM2
  Gene Name: extracellular matrix protein 2, female organ and adipocyte specific
  ENST ID: ENST00000375540
  CDS Start-End: 151-645
caaatacttttcaacattcccttctgtcctttctttgtttttaaagaaagctctgattttgtttcattttcagctggagacttaaatgacaccaagcaaagcctacttagtttagatctccagaaattggctggtggaaaaaaatcaaacatgaagattgcagttttgttttgtttttttctgcttatcatttttcaaactgactttggaaaaaatgaagaaattcctaggaagcaaaggaggaagatctaccacagaaggttgaggaaaagttcaacctcacacaagcacagatcaaacagacagcttggaattcagcaaacaacagtttttacaccagtagcaagacttcctattgttaactttgattatagcatggaggaaaagtttgaatccttttcaagttttcctggagtagaatcaagttataatgtgttaccaggaaagaagggacactgtttggtaaagggcataaccatgtacaacaaagctgtgtggtcgcctgagccctgcactacctgcctctgctcagatggaagagttctttgtgatgaaaccatgtgccatccccagaggtgcccccaaacagttatacctgaaggggaatgctgcccggtctgctccgctactggtacagagatttagctaagcaaaatatcagtgtgtgattaatctttaacttccatttgtttttgttactaattttagattaaaattatgatacattagtcagatctgagtacttaaaatattggcaaaatgctgattaacatagaaaatatctgggaaaatgtatggtaggggatataaataatagactgtggctttatagttctagctctatcagattcagtaaacttggatgagattacattccacatttgactctcagctttagagatatggtaacagaatttctacaacagatcctgaattcttattgcattaagggctctgctttggtctatatgtgcattatcccacttaatccagtgcaacgtgcctttatcatcttgaagccagggtaaacaaaggaagagtgatttgcatctaaagagaacaaagccccaaccctctggctatacccaaccactcaaaggcagcacaggaacccacatcactgcttggataatcccaggaaaatgcagaaaaagtgtagcctgaagcatgattttctcatgtggcacttctgtgtgcaggagatcacagcgcgggttttgttggctgctcatggaccccttctccaatgaggctcatacctgactgaatgaaggacccttgggagggaggcccagtctcctctgagaaaagcctaaccaacaccttatgaaaataagcaaataaatacttgttaaataattggctgggaagggatagggacatcttctcttgtctataaccaaggtagattgctcccatgcacacagatgatcacagggtaggtgtctacaaaagtctccttgccaggaaaaacttttgactatttagaaattgtgttttgcgttatactaccaaatatttcactaatatttaaaaagagttaggaaaaaagtgttcaatgaaatggattccttggagtgaaataaatacaaggtttacaaagtaa

SEQ ID NO: 131706 - DNA, 612 bp, Homo sapiens
  Payload ID: 5707
  Gene Symbol: ECM2
  Gene Name: extracellular matrix protein 2, female organ and adipocyte specific
  ENST ID: ENST00000395534
  CDS Start-End: 133-612
tttgcagataaagaaactgaggccaaagtacacaactaatttgccagcgtaacagctggagacttaaatgacaccaagcaaagcctacttagtttagatctccagaaattggctggtggaaaaaaatcaaacatgaagattgcagttttgttttgtttttttctgcttatcatttttcaaactgactttggaaaaaatgaagaaattcctaggaagcaaaggaggaagatctaccacagaaggttgaggaaaagttcaacctcacacaagcacagatcaaacagacagcttggaattcagcaaacaacagtttttacaccagtagcaagacttcctattgttaactttgattatagcatggaggaaaagtttgaatccttttcaagttttcctggagtagaatcaagttataatgtgttaccaggaaagaagggacactgtttggtaaagggcataaccatgtacaacaaagctgtgtggtcgcctgagccctgcactacctgcctctgctcagatggaagagttctttgtgatgaaaccatgtgccatccccagaggtgcccccaaacagttatacctgaaggggaatgctgcccggtctgctccgctact

SEQ ID NO: 131707 - DNA, 2648 bp, Homo sapiens
  Payload ID: 5707
  Gene Symbol: ECM2
  Gene Name: extracellular matrix protein 2, female organ and adipocyte specific
  Uniprot ID: O94769
  ENST ID: ENST00000444490
  CDS Start-End: 188-2119
gggaggcagttattttagattttactaagaagttcagcaaatacttttcaacattcccttctgtcctttctttgtttttaaagaaagctctgattttgtttcattttcagctggagacttaaatgacaccaagcaaagcctacttagtttagatctccagaaattggctggtggaaaaaaatcaaacatgaagattgcagttttgttttgtttttttctgcttatcatttttcaaactgactttggaaaaaatgaagaaattcctaggaagcaaaggaggaagatctaccacagaaggttgaggaaaagttcaacctcacacaagcacagatcaaacagacagcttggaattcagcaaacaacagtttttacaccagtagcaagacttcctattgttaactttgattatagcatggaggaaaagtttgaatccttttcaagttttcctggagtagaatcaagttataatgtgttaccaggaaagaagggacactgtttggtaaagggcataaccatgtacaacaaagctgtgtggtcgcctgagccctgcactacctgcctctgctcagatggaagagttctttgtgatgaaaccatgtgccatccccagaggtgcccccaaacagttatacctgaaggggaatgctgcccggtctgctccgctactgaacaaagagaacctaccaatttacttcataagcaactgccacctcctcaggtgggaatggaccgaatagtaagaaaagaagcacttcaatctgaggaggatgaagaagtgaaagaagaagatacagagcaaaagagagagacccctgaatctagaaatcaggggcaactttacagtgagggggacagcagaggaggagacagaaagcagaggcctggagaggagaggaggctggcacaccagcaacaacgccaaggaagggaggaggaggaggatgaggaggaggagggtgaggagggtgaggaggatgaggaggacgaggaggacccggtaagaggagatatgttccgaatgccctctcgatccccgcttcctgctcctcccagaggcacactgcgcctgccaagcgggtgctctctgtcctacaggaccatcagctgcatcaacgccatgcttacccagataccaccgctgacagcaccacagataacaagtctggagctcactggcaattccatcgcctccatcccagatgaagcatttaatggattaccaaatttggaaaggcttgatctgagtaaaaataatatcacttcttcaggcataggtccaaaagcattcaagcttctgaagaagttaatgcgtttgaatatggatggaaataatttgatacagattccttcacaattgccatctacattagaagaacttaaagtcaatgagaacaatcttcaggctatcgatgaagaaagtttatcagacttaaatcagttggtcaccttagaattggaaggaaacaatctcagtgaagccaatgtcaatcctttagctttcaaacctttgaagagcctagcctacttgcgtctgggaaaaaataaatttagaattataccgcagggtcttcctggttctattgaggaattatacctagaaaataaccaaattgaagaaataactgaaatttgtttcaatcataccagaaagatcaatgtcattgtactacgttataacaaaattgaagaaaataggattgctcctttagcctggataaatcaagaaaatctagaatccattgatctctcctacaacaagctctatcacgtcccgtcctatctacccaagtccttgctgcacctagtactccttgggaaccagattgaacggatccctggctatgtgtttggccacatggaaccaggcctggaatacttgtacctgtcatttaacaaacttgctgatgatggcatggaccgtgtctccttctatggggcatatcattctctgagagaattatttctggatcacaatgacttaaaatctataccacctgggatacaagaaatgaaagcactacattttctgaggctgaacaacaacaagatacgctgtgtttcagatgctgttctagagacagtgacaaacagatcagatgtggcctttcctctctggtagaggcaataagcaggaaatcaaacagacaagtaagcaggcaagtgctgtgcagtcagaaaaatgggtgacaatgcgacgagcacactggggcctgagggccgccaggagactacggccaccctcaacggcctggattaacagcagatccagaccggtgcctgtggagcagacgcactgtgggcttgctgtgtatgtcgcttctcaactctgctctggctgcagaatcccaagaaaaaaatgaaaatcagaatgactgattgaagcttttttcttaagtggaagttgtacttatttctactgattttataatttttaaaatatggctagcatggaacttgttcagccctgaaatttcatgatgttctagatgggaagttttaattccataaaaaagtgataaatgtccttatagcaaacactcttcacaatataatgtactaaaaaacagatgttctgtttggcttcaaaaattacactataattactaacacacatatacactaaagaagtcctggtctagccatgatct

SEQ ID NO: 131708 - DNA, 3930 bp, Homo sapiens
  Payload ID: 5708
  Gene Symbol: EYA1
  Gene Name: EYA transcriptional coactivator and phosphatase 1
  ENST ID: ENST00000303824
  CDS Start-End: 269-2029
cgagcctgcggcagcggccaggcgcctgccccctgcgccgagctttcccctgcagaggcgctccactcccagaagcgccgcggctgcaccagagcgcctgagagcccccgcgcgtacccatccaggagcaaaactatgtcaggaatggaggtttgctaacccagaaaattcgaaggaacacattaaactggtggatgcagcagatgtaagcgctgtgcaaacatctcaagccagttcagatgttgctgtttcctcaagttgcaggtctatggaaatgcaggatctaaccagcccgcatagccgtctgagtggtagtagtgaatcccccagtggccccaaactcggtaactctcatataaatagtaattccatgactcccaatggcaccgaagttaaaacagagccaatgagcagcagtgaaacagcttcaacgacagccgacgggtctttaaacaatttctcaggttcagcaattgggagcagtagtttcagcccacgaccaactcaccagttctctccaccacagatttacccttccaaaccatacccacatattctccctaccccttcctcacaaactatggctgcatatgggcaaacacagtttaccacaggaatgcaacaagctacagcctatgccacgtacccacagccaggacagccgtacggcatttcctcatatggcatcaagactgaaggtggattgtcacagtctcagtcacctggacagacaggatttctcagctatggcacaagcttcagtacccctcaacctggacaggcaccatacagctaccagatgcaaggtagcagttttacaacatcatcaggaatatatacaggaaataattcactcacaaattcctctggatttaatagttcacagcaggactatccgtcttatcccagttttggccagggtcagtacgcacagtattataacagctcaccgtatccagcacattatatgaccagcagcaacaccagcccaacgacaccatccaccaatgccacttaccagcttcaagaaccgccatctggcatcaccagccaagcagttacagatcccacagcagagtacagcacaatccacagcccatcaacacccattaaagattcagattctgatcgattgcgtcgaggttcagatgggaaatcacgtggacggggccgaagaaacaataatccttcacctcccccagattctgatcttgagagagtgttcatctgggacttggatgagacaatcattgttttccactccttgcttactgggtcctacgccaacagatatgggagggatccacccacttcagtttcccttggactgcgaatggaagaaatgattttcaacttggcagacacacatttattttttaatgacttagaagaatgtgaccaagtccatatagatgatgtttcttcagatgataacggacaggacctaagcacatataactttggaacagatggctttcctgctgcagcaaccagtgctaacttatgtttggcaactggtgtacggggcggtgtggactggatgagaaagttggccttccgctacagacgggtaaaagagatctacaacacctacaaaaataatgttggaggtctgcttggtccagctaagagggaagcctggctgcagttgagggccgaaattgaagccctgaccgactcctggttgacactggccctgaaagcactctcgctcattcactcccggacaaactgtgtgaatattttagtaacaactactcagctcatcccagcattggcgaaagtcctgctgtatgggttaggaattgtatttccaatagaaaatatttacagtgcaactaaaataggaaaagaaagctgttttgagagaataattcaaaggtttggaagaaaagtggtgtatgttgttataggagatggtgtagaagaagaacaaggagcaaaaaagcacgcgatgcccttctggaggatctccagccactcggacctcatggccctgcaccatgccttggaactggagtacctgtaacagcgctcggcactttgacagcgcacagctgctctgtgaccagggacagatccagcaggccccagtctcgcatcagcgccggcctccagaacttagcaatttccgcctggtgatgcgcagttgctgtcagtcttgacctctgcctttgtggtgaatggaggaccacgtctatttcatcagaacagctgttgactctagtactgtgaatccagtgaaaataagccatgagaatgttttagcacagcgttatgtgtctgccacattaactacacggttcaaacctgtgaagaaaggacctgcaaacgcttcagttgttagcattttcaatgtgatataaacagcttctccaatacagcaaacctaattgcacaacagagactgaaatgtgtttcctgaataccagtggaggaattttcttgtaaagaaggtttactttttggtgtctcatacccagggtaatctgtacatctctacttatttatgaacagactttttttaaaaagataaaaaaacagctttattgaggtataattcacccaccagacttttttaaacatcaaataattgaagagacaatagcattagaaataagtgattaaaggcctctgcctcacaacatggcaagtacagtactttgaattttagcacattgcatagtagttttaagtatgtctaatttaaacgtataatatgtacatcactgagacaatcatgtacagaaagaatttttggtgtaaatttgtaataatggataattcttttacatattgtttagggaaatgatattgaaaggtagcaatgcctggatagtgaagcatgaggcagcacgtgcacaaattcatgtgccgtgccttatctgagttttcggtataaatatgtagataatggattttttttttttagataatgttgtcaagaccaaaagcatggatgtcaagtgtcagtaaggattttgttttctaaaattttttcctgcatcagttcttctgagggccttgatgaaataacacagcagtttcttaaacaatttgaaacaaaatgagctctcctaccacctcactttttcatttccacactaatgtattatatgtaactacttggaaaaaataattattcaaatgcttcttcccacaaagaatatagatgatagtagatatattttattaataaaatggttcatgaatcggagactaacaaagttttcatgtgctcagaattattaattatcgtgtctgcattttctttcgataaaggaagacacacgatgctaatccggaaatcagcaaactttgcattactccctatgtgcgtattttctctttcttcctgtcaccctgaggaaggttcattgccattgtcatcaccatggaaacaacgttcctctccacctgcattatgtactacatgacaggcatcaatctggggaaataataaaattatcacctttgtcagaccataagagtttctccaaaagtggtcagtttggctgggcaatattttctctcatctaacaaacacaatccattgtcatgaaattacccttaggatgagtcttctttaatcaatcatatattgggcgggaaaaacaccagctttgacccgaagtagttgaagagctacttcattcttttctgaagttgtgtgttgctgctagaaatagtcatttgtgaattatccaaattgtttaaattcacaattgaattagttttttcttcctttttgcttgaagcaaacagttgacaatttttaaccttttcattttatgtttttgtactctgcagactgaaaagacaaagtttatcttggccttactgtataaaggtgtgctgtgtccaccgttgtgtacagaatttttcttcattaattttgtgtttaagttaataaaatttatttgtgatgta

SEQ ID NO: 131709 - DNA, 4326 bp, Homo sapiens
  Payload ID: 5708
  Gene Symbol: EYA1
  Gene Name: EYA transcriptional coactivator and phosphatase 1
  Uniprot ID: Q99502
  ENST ID: ENST00000340726
  CDS Start-End: 641-2419
aaaccaataaggttaggacaagagaatagctgtggtttgcgttgcaaaaaccaaaaaaaaaaaaaaaaaaaaaaaaagaaagccccgaggctccatgggcagacctacaaggctgcgcaaacaaatcgagggatgagattctgctgtttctttgtctagggttctcagatgctatctgccgctgctgtttggtggggaaggagcgctgggcgcaaagctgttaccaaacagaacggtgggagctgatggctccgagtttggggcgaggtagaaactctccagtgccacttccgactttaagccttcctgttgccgtccactgtggcgggtttcttcctggggaacacgttttcgctcagtcgctcggcagcccgagcctgcggcagcggccaggcgcctgccccctgcgccgagctttcccctgcagaggcgctccactcccagaagcgccgcggctgcaccagagcgcctgagagcccccgcgcgtacccatccaggagcaaaactatgtcaggaatggaggtttgctaacccagaaaattcgaaggaacacattaaactggtggatgcagcagatgtaagcgctgtgcaaacatctcaagccagttcagatgttgctgtttcctcaagttgcaggtctatggaaatgcaggatctaaccagcccgcatagccgtctgagtggtagtagtgaatcccccagtggccccaaactcggtaactctcatataaatagtaattccatgactcccaatggcaccgaagttaaaacagagccaatgagcagcagtgaaacagcttcaacgacagccgacgggtctttaaacaatttctcaggttcagcaattgggagcagtagtttcagcccacgaccaactcaccagttctctccaccacagatttacccttccaacagaccatacccacatattctccctaccccttcctcacaaactatggctgcatatgggcaaacacagtttaccacaggaatgcaacaagctacagcctatgccacgtacccacagccaggacagccgtacggcatttcctcatatggtgcattgtgggcaggcatcaagactgaaggtggattgtcacagtctcagtcacctggacagacaggatttctcagctatggcacaagcttcagtacccctcaacctggacaggcaccatacagctaccagatgcaaggtagcagttttacaacatcatcaggaatatatacaggaaataattcactcacaaattcctctggatttaatagttcacagcaggactatccgtcttatcccagttttggccagggtcagtacgcacagtattataacagctcaccgtatccagcacattatatgaccagcagcaacaccagcccaacgacaccatccaccaatgccacttaccagcttcaagaaccgccatctggcatcaccagccaagcagttacagatcccacagcagagtacagcacaatccacagcccatcaacacccattaaagattcagattctgatcgattgcgtcgaggttcagatgggaaatcacgtggacggggccgaagaaacaataatccttcacctcccccagattctgatcttgagagagtgttcatctgggacttggatgagacaatcattgttttccactccttgcttactgggtcctacgccaacagatatgggagggatccacccacttcagtttcccttggactgcgaatggaagaaatgattttcaacttggcagacacacatttattttttaatgacttagaagaatgtgaccaagtccatatagatgatgtttcttcagatgataacggacaggacctaagcacatataactttggaacagatggctttcctgctgcagcaaccagtgctaacttatgtttggcaactggtgtacggggcggtgtggactggatgagaaagttggccttccgctacagacgggtaaaagagatctacaacacctacaaaaataatgttggaggtctgcttggtccagctaagagggaagcctggctgcagttgagggccgaaattgaagccctgaccgactcctggttgacactggccctgaaagcactctcgctcattcactcccggacaaactgtgtgaatattttagtaacaactactcagctcatcccagcattggcgaaagtcctgctgtatgggttaggaattgtatttccaatagaaaatatttacagtgcaactaaaataggaaaagaaagctgttttgagagaataattcaaaggtttggaagaaaagtggtgtatgttgttataggagatggtgtagaagaagaacaaggagcaaaaaagcacgcgatgcccttctggaggatctccagccactcggacctcatggccctgcaccatgccttggaactggagtacctgtaacagcgctcggcactttgacagcgcacagctgctctgtgaccagggacagatccagcaggccccagtctcgcatcagcgccggcctccagaacttagcaatttccgcctggtgatgcgcagttgctgtcagtcttgacctctgcctttgtggtgaatggaggaccacgtctatttcatcagaacagctgttgactctagtactgtgaatccagtgaaaataagccatgagaatgttttagcacagcgttatgtgtctgccacattaactacacggttcaaacctgtgaagaaaggacctgcaaacgcttcagttgttagcattttcaatgtgatataaacagcttctccaatacagcaaacctaattgcacaacagagactgaaatgtgtttcctgaataccagtggaggaattttcttgtaaagaaggtttactttttggtgtctcatacccagggtaatctgtacatctctacttatttatgaacagactttttttaaaaagataaaaaaacagctttattgaggtataattcacccaccagacttttttaaacatcaaataattgaagagacaatagcattagaaataagtgattaaaggcctctgcctcacaacatggcaagtacagtactttgaattttagcacattgcatagtagttttaagtatgtctaatttaaacgtataatatgtacatcactgagacaatcatgtacagaaagaatttttggtgtaaatttgtaataatggataattcttttacatattgtttagggaaatgatattgaaaggtagcaatgcctggatagtgaagcatgaggcagcacgtgcacaaattcatgtgccgtgccttatctgagttttcggtataaatatgtagataatggattttttttttttagataatgttgtcaagaccaaaagcatggatgtcaagtgtcagtaaggattttgttttctaaaattttttcctgcatcagttcttctgagggccttgatgaaataacacagcagtttcttaaacaatttgaaacaaaatgagctctcctaccacctcactttttcatttccacactaatgtattatatgtaactacttggaaaaaataattattcaaatgcttcttcccacaaagaatatagatgatagtagatatattttattaataaaatggttcatgaatcggagactaacaaagttttcatgtgctcagaattattaattatcgtgtctgcattttctttcgataaaggaagacacacgatgctaatccggaaatcagcaaactttgcattactccctatgtgcgtattttctctttcttcctgtcaccctgaggaaggttcattgccattgtcatcaccatggaaacaacgttcctctccacctgcattatgtactacatgacaggcatcaatctggggaaataataaaattatcacctttgtcagaccataagagtttctccaaaagtggtcagtttggctgggcaatattttctctcatctaacaaacacaatccattgtcatgaaattacccttaggatgagtcttctttaatcaatcatatattgggcgggaaaaacaccagctttgacccgaagtagttgaagagctacttcattcttttctgaagttgtgtgttgctgctagaaatagtcatttgtgaattatccaaattgtttaaattcacaattgaattagttttttcttcctttttgcttgaagcaaacagttgacaatttttaaccttttcattttatgtttttgtactctgcagactgaaaagacaaagtttatcttggccttactgtataaaggtgtgctgtgtccaccgttgtgtacagaatttttcttcattaattttgtgtttaagttaataaaatttatttgtgatgtactgtaa

SEQ ID NO: 131710 - DNA, 3788 bp, Homo sapiens
  Payload ID: 5708
  Gene Symbol: EYA1
  Gene Name: EYA transcriptional coactivator and phosphatase 1
  Uniprot ID: Q99502
  ENST ID: ENST00000388740
  CDS Start-End: 204-1883
aaacaacagttgagacctcaacttaaagacaatatgcctttcactgctgcagtatcctcctttttctcttttggttaaaagagagcattgtcgttctcagccatgtgctctgtataattaagagctgacactgaagcagagtaacaacatcttctaatttttttacccctgatcacaggtgcaaacatctcaagccagttcagatgttgctgtttcctcaagttgcagttaaaacagagccaatgagcagcagtgaaacagcttcaacgacagccgacgggtctttaaacaatttctcaggttcagcaattgggagcagtagtttcagcccacgaccaactcaccagttctctccaccacagatttacccttccaacagaccatacccacatattctccctaccccttcctcacaaactatggctgcatatgggcaaacacagtttaccacaggaatgcaacaagctacagcctatgccacgtacccacagccaggacagccgtacggcatttcctcatatggtgcattgtgggcaggcatcaagactgaaggtggattgtcacagtctcagtcacctggacagacaggatttctcagctatggcacaagcttcagtacccctcaacctggacaggcaccatacagctaccagatgcaaggtagcagttttacaacatcatcaggaatatatacaggaaataattcactcacaaattcctctggatttaatagttcacagcaggactatccgtcttatcccagttttggccagggtcagtacgcacagtattataacagctcaccgtatccagcacattatatgaccagcagcaacaccagcccaacgacaccatccaccaatgccacttaccagcttcaagaaccgccatctggcatcaccagccaagcagttacagatcccacagcagagtacagcacaatccacagcccatcaacacccattaaagattcagattctgatcgattgcgtcgaggttcagatgggaaatcacgtggacggggccgaagaaacaataatccttcacctcccccagattctgatcttgagagagtgttcatctgggacttggatgagacaatcattgttttccactccttgcttactgggtcctacgccaacagatatgggagggatccacccacttcagtttcccttggactgcgaatggaagaaatgattttcaacttggcagacacacatttattttttaatgacttagaagaatgtgaccaagtccatatagatgatgtttcttcagatgataacggacaggacctaagcacatataactttggaacagatggctttcctgctgcagcaaccagtgctaacttatgtttggcaactggtgtacggggcggtgtggactggatgagaaagttggccttccgctacagacgggtaaaagagatctacaacacctacaaaaataatgttggaggtctgcttggtccagctaagagggaagcctggctgcagttgagggccgaaattgaagccctgaccgactcctggttgacactggccctgaaagcactctcgctcattcactcccggacaaactgtgtgaatattttagtaacaactactcagctcatcccagcattggcgaaagtcctgctgtatgggttaggaattgtatttccaatagaaaatatttacagtgcaactaaaataggaaaagaaagctgttttgagagaataattcaaaggtttggaagaaaagtggtgtatgttgttataggagatggtgtagaagaagaacaaggagcaaaaaagcacgcgatgcccttctggaggatctccagccactcggacctcatggccctgcaccatgccttggaactggagtacctgtaacagcgctcggcactttgacagcgcacagctgctctgtgaccagggacagatccagcaggccccagtctcgcatcagcgccggcctccagaacttagcaatttccgcctggtgatgcgcagttgctgtcagtcttgacctctgcctttgtggtgaatggaggaccacgtctatttcatcagaacagctgttgactctagtactgtgaatccagtgaaaataagccatgagaatgttttagcacagcgttatgtgtctgccacattaactacacggttcaaacctgtgaagaaaggacctgcaaacgcttcagttgttagcattttcaatgtgatataaacagcttctccaatacagcaaacctaattgcacaacagagactgaaatgtgtttcctgaataccagtggaggaattttcttgtaaagaaggtttactttttggtgtctcatacccagggtaatctgtacatctctacttatttatgaacagactttttttaaaaagataaaaaaacagctttattgaggtataattcacccaccagacttttttaaacatcaaataattgaagagacaatagcattagaaataagtgattaaaggcctctgcctcacaacatggcaagtacagtactttgaattttagcacattgcatagtagttttaagtatgtctaatttaaacgtataatatgtacatcactgagacaatcatgtacagaaagaatttttggtgtaaatttgtaataatggataattcttttacatattgtttagggaaatgatattgaaaggtagcaatgcctggatagtgaagcatgaggcagcacgtgcacaaattcatgtgccgtgccttatctgagttttcggtataaatatgtagataatggattttttttttttagataatgttgtcaagaccaaaagcatggatgtcaagtgtcagtaaggattttgttttctaaaattttttcctgcatcagttcttctgagggccttgatgaaataacacagcagtttcttaaacaatttgaaacaaaatgagctctcctaccacctcactttttcatttccacactaatgtattatatgtaactacttggaaaaaataattattcaaatgcttcttcccacaaagaatatagatgatagtagatatattttattaataaaatggttcatgaatcggagactaacaaagttttcatgtgctcagaattattaattatcgtgtctgcattttctttcgataaaggaagacacacgatgctaatccggaaatcagcaaactttgcattactccctatgtgcgtattttctctttcttcctgtcaccctgaggaaggttcattgccattgtcatcaccatggaaacaacgttcctctccacctgcattatgtactacatgacaggcatcaatctggggaaataataaaattatcacctttgtcagaccataagagtttctccaaaagtggtcagtttggctgggcaatattttctctcatctaacaaacacaatccattgtcatgaaattacccttaggatgagtcttctttaatcaatcatatattgggcgggaaaaacaccagctttgacccgaagtagttgaagagctacttcattcttttctgaagttgtgtgttgctgctagaaatagtcatttgtgaattatccaaattgtttaaattcacaattgaattagttttttcttcctttttgcttgaagcaaacagttgacaatttttaaccttttcattttatgtttttgtactctgcagactgaaaagacaaagtttatcttggccttactgtataaaggtgtgctgtgtccaccgttgtgtacagaatttttcttcattaattttgtgtttaagttaataaaatttatttgtgatgtactgt

SEQ ID NO: 131711 - DNA, 3404 bp, Homo sapiens
  Payload ID: 5708
  Gene Symbol: EYA1
  Gene Name: EYA transcriptional coactivator and phosphatase 1
  ENST ID: ENST00000388741
  CDS Start-End: 516-2192
gggcagacctacaaggctgcgcaaacaaatcgagggatgagattctgctgtttctttgtctagggttctcagatgctatctgccgctgctgtttggtggggaaggagcgctgggcgcaaagctgttaccaaacagaacggtgggagctgatggctccgagtttggggcgaggtagaaactctccagtgccacttccgactttaagccttcctgttgccgtccactgtggcgggtttcttcctggggaacacgttttcgctcagtcgctcggcagcccgagcctgcggcagcggccaggcgcctgccccctgcgccgagctttcccctgcagaggcgctccactcccagaagcgccgcggctgcaccagagcgcctgagagcccccgcgcgtacccatccaggagcaaaactatgtcaggaatggaggtttgctaacccagaaaattcgaaggaacacattaaactggtggatgcagcagatgtaagcgctgtgcaaacatctcaagccagttcagatgttgctgtttcctcaagttgcagttaaaacagagccaatgagcagcagtgaaacagcttcaacgacagccgacgggtctttaaacaatttctcaggttcagcaattgggagcagtagtttcagcccacgaccaactcaccagttctctccaccacagatttacccttccaaaccatacccacatattctccctaccccttcctcacaaactatggctgcatatgggcaaacacagtttaccacaggaatgcaacaagctacagcctatgccacgtacccacagccaggacagccgtacggcatttcctcatatggtgcattgtgggcaggcatcaagactgaaggtggattgtcacagtctcagtcacctggacagacaggatttctcagctatggcacaagcttcagtacccctcaacctggacaggcaccatacagctaccagatgcaaggtagcagttttacaacatcatcaggaatatatacaggaaataattcactcacaaattcctctggatttaatagttcacagcaggactatccgtcttatcccagttttggccagggtcagtacgcacagtattataacagctcaccgtatccagcacattatatgaccagcagcaacaccagcccaacgacaccatccaccaatgccacttaccagcttcaagaaccgccatctggcatcaccagccaagcagttacagatcccacagcagagtacagcacaatccacagcccatcaacacccattaaagattcagattctgatcgattgcgtcgaggttcagatgggaaatcacgtggacggggccgaagaaacaataatccttcacctcccccagattctgatcttgagagagtgttcatctgggacttggatgagacaatcattgttttccactccttgcttactgggtcctacgccaacagatatgggagggatccacccacttcagtttcccttggactgcgaatggaagaaatgattttcaacttggcagacacacatttattttttaatgacttagaagaatgtgaccaagtccatatagatgatgtttcttcagatgataacggacaggacctaagcacatataactttggaacagatggctttcctgctgcagcaaccagtgctaacttatgtttggcaactggtgtacggggcggtgtggactggatgagaaagttggccttccgctacagacgggtaaaagagatctacaacacctacaaaaataatgttggaggtctgcttggtccagctaagagggaagcctggctgcagttgagggccgaaattgaagccctgaccgactcctggttgacactggccctgaaagcactctcgctcattcactcccggacaaactgtgtgaatattttagtaacaactactcagctcatcccagcattggcgaaagtcctgctgtatgggttaggaattgtatttccaatagaaaatatttacagtgcaactaaaataggaaaagaaagctgttttgagagaataattcaaaggtttggaagaaaagtggtgtatgttgttataggagatggtgtagaagaagaacaaggagcaaaaaagcacgcgatgcccttctggaggatctccagccactcggacctcatggccctgcaccatgccttggaactggagtacctgtaacagcgctcggcactttgacagcgcacagctgctctgtgaccagggacagatccagcaggccccagtctcgcatcagcgccggcctccagaacttagcaatttccgcctggtgatgcgcagttgctgtcagtcttgacctctgcctttgtggtgaatggaggaccacgtctatttcatcagaacagctgttgactctagtactgtgaatccagtgaaaataagccatgagaatgttttagcacagcgttatgtgtctgccacattaactacacggttcaaacctgtgaagaaaggacctgcaaacgcttcagttgttagcattttcaatgtgatataaacagcttctccaatacagcaaacctaattgcacaacagagactgaaatgtgtttcctgaataccagtggaggaattttcttgtaaagaaggtttactttttggtgtctcatacccagggtaatctgtacatctctacttatttatgaacagactttttttaaaaagataaaaaaacagctttattgaggtataattcacccaccagacttttttaaacatcaaataattgaagagacaatagcattagaaataagtgattaaaggcctctgcctcacaacatggcaagtacagtactttgaattttagcacattgcatagtagttttaagtatgtctaatttaaacgtataatatgtacatcactgagacaatcatgtacagaaagaatttttggtgtaaatttgtaataatggataattcttttacatattgtttagggaaatgatattgaaaggtagcaatgcctggatagtgaagcatgaggcagcacgtgcacaaattcatgtgccgtgccttatctgagttttcggtataaatatgtagataatggattttttttttttagataatgttgtcaagaccaaaagcatggatgtcaagtgtcagtaaggattttgttttctaaaattttttcctgcatcagttcttctgagggccttgatgaaataacacagcagtttcttaaacaatttgaaacaaaatgagctctcctaccacctcactttttcatttccacactaatgtattatatgtaactacttggaaaaaataattattcaaatgcttcttcccacaaagaatatagatgatagtagatatattttattaataaaatggttcatgaatcggagactaacaaagttttcatgtgctc

SEQ ID NO: 131712 - DNA, 3907 bp, Homo sapiens
  Payload ID: 5708
  Gene Symbol: EYA1
  Gene Name: EYA transcriptional coactivator and phosphatase 1
  Uniprot ID: Q99502
  ENST ID: ENST00000388742
  CDS Start-End: 222-2000
gagacctcaacttaaagacaatatgcctttcactgctgcagtatcctcctttttctcttttggttaaaagagagcattgtcgttctcagccatgtgctctgtataattaagagctgacactgaagcagagtaacaacatcttctaatttttttacccctgatcacaggtgcaaacatctcaagccagttcagatgttgctgtttcctcaagttgcaggtctatggaaatgcaggatctaaccagcccgcatagccgtctgagtggtagtagtgaatcccccagtggccccaaactcggtaactctcatataaatagtaattccatgactcccaatggcaccgaagttaaaacagagccaatgagcagcagtgaaacagcttcaacgacagccgacgggtctttaaacaatttctcaggttcagcaattgggagcagtagtttcagcccacgaccaactcaccagttctctccaccacagatttacccttccaacagaccatacccacatattctccctaccccttcctcacaaactatggctgcatatgggcaaacacagtttaccacaggaatgcaacaagctacagcctatgccacgtacccacagccaggacagccgtacggcatttcctcatatggtgcattgtgggcaggcatcaagactgaaggtggattgtcacagtctcagtcacctggacagacaggatttctcagctatggcacaagcttcagtacccctcaacctggacaggcaccatacagctaccagatgcaaggtagcagttttacaacatcatcaggaatatatacaggaaataattcactcacaaattcctctggatttaatagttcacagcaggactatccgtcttatcccagttttggccagggtcagtacgcacagtattataacagctcaccgtatccagcacattatatgaccagcagcaacaccagcccaacgacaccatccaccaatgccacttaccagcttcaagaaccgccatctggcatcaccagccaagcagttacagatcccacagcagagtacagcacaatccacagcccatcaacacccattaaagattcagattctgatcgattgcgtcgaggttcagatgggaaatcacgtggacggggccgaagaaacaataatccttcacctcccccagattctgatcttgagagagtgttcatctgggacttggatgagacaatcattgttttccactccttgcttactgggtcctacgccaacagatatgggagggatccacccacttcagtttcccttggactgcgaatggaagaaatgattttcaacttggcagacacacatttattttttaatgacttagaagaatgtgaccaagtccatatagatgatgtttcttcagatgataacggacaggacctaagcacatataactttggaacagatggctttcctgctgcagcaaccagtgctaacttatgtttggcaactggtgtacggggcggtgtggactggatgagaaagttggccttccgctacagacgggtaaaagagatctacaacacctacaaaaataatgttggaggtctgcttggtccagctaagagggaagcctggctgcagttgagggccgaaattgaagccctgaccgactcctggttgacactggccctgaaagcactctcgctcattcactcccggacaaactgtgtgaatattttagtaacaactactcagctcatcccagcattggcgaaagtcctgctgtatgggttaggaattgtatttccaatagaaaatatttacagtgcaactaaaataggaaaagaaagctgttttgagagaataattcaaaggtttggaagaaaagtggtgtatgttgttataggagatggtgtagaagaagaacaaggagcaaaaaagcacgcgatgcccttctggaggatctccagccactcggacctcatggccctgcaccatgccttggaactggagtacctgtaacagcgctcggcactttgacagcgcacagctgctctgtgaccagggacagatccagcaggccccagtctcgcatcagcgccggcctccagaacttagcaatttccgcctggtgatgcgcagttgctgtcagtcttgacctctgcctttgtggtgaatggaggaccacgtctatttcatcagaacagctgttgactctagtactgtgaatccagtgaaaataagccatgagaatgttttagcacagcgttatgtgtctgccacattaactacacggttcaaacctgtgaagaaaggacctgcaaacgcttcagttgttagcattttcaatgtgatataaacagcttctccaatacagcaaacctaattgcacaacagagactgaaatgtgtttcctgaataccagtggaggaattttcttgtaaagaaggtttactttttggtgtctcatacccagggtaatctgtacatctctacttatttatgaacagactttttttaaaaagataaaaaaacagctttattgaggtataattcacccaccagacttttttaaacatcaaataattgaagagacaatagcattagaaataagtgattaaaggcctctgcctcacaacatggcaagtacagtactttgaattttagcacattgcatagtagttttaagtatgtctaatttaaacgtataatatgtacatcactgagacaatcatgtacagaaagaatttttggtgtaaatttgtaataatggataattcttttacatattgtttagggaaatgatattgaaaggtagcaatgcctggatagtgaagcatgaggcagcacgtgcacaaattcatgtgccgtgccttatctgagttttcggtataaatatgtagataatggattttttttttttagataatgttgtcaagaccaaaagcatggatgtcaagtgtcagtaaggattttgttttctaaaattttttcctgcatcagttcttctgagggccttgatgaaataacacagcagtttcttaaacaatttgaaacaaaatgagctctcctaccacctcactttttcatttccacactaatgtattatatgtaactacttggaaaaaataattattcaaatgcttcttcccacaaagaatatagatgatagtagatatattttattaataaaatggttcatgaatcggagactaacaaagttttcatgtgctcagaattattaattatcgtgtctgcattttctttcgataaaggaagacacacgatgctaatccggaaatcagcaaactttgcattactccctatgtgcgtattttctctttcttcctgtcaccctgaggaaggttcattgccattgtcatcaccatggaaacaacgttcctctccacctgcattatgtactacatgacaggcatcaatctggggaaataataaaattatcacctttgtcagaccataagagtttctccaaaagtggtcagtttggctgggcaatattttctctcatctaacaaacacaatccattgtcatgaaattacccttaggatgagtcttctttaatcaatcatatattgggcgggaaaaacaccagctttgacccgaagtagttgaagagctacttcattcttttctgaagttgtgtgttgctgctagaaatagtcatttgtgaattatccaaattgtttaaattcacaattgaattagttttttcttcctttttgcttgaagcaaacagttgacaatttttaaccttttcattttatgtttttgtactctgcagactgaaaagacaaagtttatcttggccttactgtataaaggtgtgctgtgtccaccgttgtgtacagaatttttcttcattaattttgtgtttaagttaataaaatttatttgtgatgtactgtaa

SEQ ID NO: 131713 - DNA, 2199 bp, Homo sapiens
  Payload ID: 5708
  Gene Symbol: EYA1
  Gene Name: EYA transcriptional coactivator and phosphatase 1
  ENST ID: ENST00000388743
  CDS Start-End: 153-1928
gagagcattgtcgttctcagccatgtgctctgtataattaagagctgacactgaagcagagtaacaacatcttctaatttttttacccctgatcacaggtgcaaacatctcaagccagttcagatgttgctgtttcctcaagttgcaggtctatggaaatgcaggatctaaccagcccgcatagccgtctgagtggtagtagtgaatcccccagtggccccaaactcggtaactctcatataaatagtaattccatgactcccaatggcaccgaagttaaaacagagccaatgagcagcagtgaaacagcttcaacgacagccgacgggtctttaaacaatttctcaggttcagcaattgggagcagtagtttcagcccacgaccaactcaccagttctctccaccacagatttacccttccaaaccatacccacatattctccctaccccttcctcacaaactatggctgcatatgggcaaacacagtttaccacaggaatgcaacaagctacagcctatgccacgtacccacagccaggacagccgtacggcatttcctcatatggtgcattgtgggcaggcatcaagactgaaggtggattgtcacagtctcagtcacctggacagacaggatttctcagctatggcacaagcttcagtacccctcaacctggacaggcaccatacagctaccagatgcaaggtagcagttttacaacatcatcaggaatatatacaggaaataattcactcacaaattcctctggatttaatagttcacagcaggactatccgtcttatcccagttttggccagggtcagtacgcacagtattataacagctcaccgtatccagcacattatatgaccagcagcaacaccagcccaacgacaccatccaccaatgccacttaccagcttcaagaaccgccatctggcatcaccagccaagcagttacagatcccacagcagagtacagcacaatccacagcccatcaacacccattaaagattcagattctgatcgattgcgtcgaggttcagatgggaaatcacgtggacggggccgaagaaacaataatccttcacctcccccagattctgatcttgagagagtgttcatctgggacttggatgagacaatcattgttttccactccttgcttactgggtcctacgccaacagatatgggagggatccacccacttcagtttcccttggactgcgaatggaagaaatgattttcaacttggcagacacacatttattttttaatgacttagaagaatgtgaccaagtccatatagatgatgtttcttcagatgataacggacaggacctaagcacatataactttggaacagatggctttcctgctgcagcaaccagtgctaacttatgtttggcaactggtgtacggggcggtgtggactggatgagaaagttggccttccgctacagacgggtaaaagagatctacaacacctacaaaaataatgttggaggtctgcttggtccagctaagagggaagcctggctgcagttgagggccgaaattgaagccctgaccgactcctggttgacactggccctgaaagcactctcgctcattcactcccggacaaactgtgtgaatattttagtaacaactactcagctcatcccagcattggcgaaagtcctgctgtatgggttaggaattgtatttccaatagaaaatatttacagtgcaactaaaataggaaaagaaagctgttttgagagaataattcaaaggtttggaagaaaagtggtgtatgttgttataggagatggtgtagaagaagaacaaggagcaaaaaagcacgcgatgcccttctggaggatctccagccactcggacctcatggccctgcaccatgccttggaactggagtacctgtaacagcgctcggcactttgacagcgcacagctgctctgtgaccagggacagatccagcaggccccagtctcgcatcagcgccggcctccagaacttagcaatttccgcctggtgatgcgcagttgctgtcagtcttgacctctgcctttgtggtgaatggaggaccacgtctatttcatcagaacagctgttgactctagtactgtgaatccagtgaaaataagccatgagaatgttttagcacagcgttatgtgtctgccacattaactaca

SEQ ID NO: 131714 - DNA, 1723 bp, Homo sapiens
  Payload ID: 5708
  Gene Symbol: EYA1
  Gene Name: EYA transcriptional coactivator and phosphatase 1
  Uniprot ID: Q99502
  ENST ID: ENST00000419131
  CDS Start-End: 30-1703
atgttgctgtttcctcaagttgcaggtctatggaaatgcaggatctaaccagcccgcatagccgtctgagtggtagtagtgaatcccccagtggccccaaactcggtaactctcatataaatagtaattccatgactcccaatggcaccgaagttaaaacagagccaatgagcagcagtgaaacagcttcaacgacagccgacgggtctttaaacaatttctcaggttcagcaattgggagcagtagtttcagcccacgaccaactcaccagttctctccaccacagatttacccttccaacagaccatacccacatattctccctaccccttcctcacaaactatggctgcatatgggcaaacacagtttaccacaggaatgcaacaagctacagcctatgccacgtacccacagccaggacagccgtacggcatttcctcatatggcatcaagactgaaggtggattgtcacagtctcagtcacctggacagacaggatttctcagctatggcacaagcttcagtacccctcaacctggacaggcaccatacagctaccagatgcaaggtagcagttttacaacatcatcaggaatatatacaggaaataattcactcacaaattcctctggatttaatagttcacagcaggactatccgtcttatcccagttttggccagggtcagtacgcacagtattataacagctcaccgtatccagcacattatatgaccagcagcaacaccagcccaacgacaccatccaccaatgccacttaccagcttcaagaaccgccatctggcatcaccagccaagcagttacagatcccacagcagagtacagcacaatccacagcccatcaacacccattaaagattcagattctgatcgattgcgtcgaggttcagatgggaaatcacgtggacggggccgaagaaacaataatccttcacctcccccagattctgatcttgagagagtgttcatctgggacttggatgagacaatcattgttttccactccttgcttactgggtcctacgccaacagatatgggagggaatgtgaccaagtccatatagatgatgtttcttcagatgataacggacaggacctaagcacatataactttggaacagatggctttcctgctgcagcaaccagtgctaacttatgtttggcaactggtgtacggggcggtgtggactggatgagaaagttggccttccgctacagacgggtaaaagagatctacaacacctacaaaaataatgttggaggtctgcttggtccagctaagagggaagcctggctgcagttgagggccgaaattgaagccctgaccgactcctggttgacactggccctgaaagcactctcgctcattcactcccggacaaactgtgtgaatattttagtaacaactactcagctcatcccagcattggcgaaagtcctgctgtatgggttaggaattgtatttccaatagaaaatatttacagtgcaactaaaataggaaaagaaagctgttttgagagaataattcaaaggtttggaagaaaagtggtgtatgttgttataggagatggtgtagaagaagaacaaggagcaaaaaagcacgcgatgcccttctggaggatctccagccactcggacctcatggccctgcaccatgccttggaactggagtacctgtaacagcgctcggcactttgaca

SEQ ID NO: 131715 - DNA, 3743 bp, Homo sapiens
  Payload ID: 5708
  Gene Symbol: EYA1
  Gene Name: EYA transcriptional coactivator and phosphatase 1
  ENST ID: ENST00000465115
  CDS Start-End: 140-778
aaaactatgtcaggaatggaggtttgctaacccagaaaattcgaaggaacacattaaactggtggatgcagcagatgtaagcgctgtgcaaacatctcaagccagttcagatgttgctgtttcctcaagttgcaggtctatggaaatgcaggatctaaccagcccgcatagccgtctgagtggtagtagtgaatcccccagtggccccaaactcggtaactctcatataaatagtaattccatgactcccaatggcaccgaagttaaaacagagccaatgagcagcagtgaaacagcttcaacgacagccgacgggtctttaaacaatttctcaggttcagcaattgggagcagtagtttcagcccacgaccaactcaccagttctctccaccacagatttacccttccaatttaccacaggaatgcaacaagctacagcctatgccacgtacccacagccaggacagccgtacggcatttcctcatatggcatcaagactgaaggtggattgtcacagtctcagtcacctggacagacaggatttctcagctatggcacaagcttcagtacccctcaacctggacaggcaccatacagctaccagatgcaaggtagcagttttacaacatcatcaggaatatatacaggaaataattcactcacaaattcctctggatttaatagttcacagcaggactatccgtcttatcccagttttggccagggtcagtacgcacagtattataacagctcaccgtatccagcacattatatgaccagcagcaacaccagcccaacgacaccatccaccaatgccacttaccagcttcaagaaccgccatctggcatcaccagccaagcagttacagatcccacagcagagtacagcacaatccacagcccatcaacacccattaaagattcagattctgatcgattgcgtcgaggttcagatgggaaatcacgtggacggggccgaagaaacaataatccttcacctcccccagattctgatcttgagagagtgttcatctgggacttggatgagacaatcattgttttccactccttgcttactgggtcctacgccaacagatatgggagggatccacccacttcagtttcccttggactgcgaatggaagaaatgattttcaacttggcagacacacatttattttttaatgacttagaagaatgtgaccaagtccatatagatgatgtttcttcagatgataacggacaggacctaagcacatataactttggaacagatggctttcctgctgcagcaaccagtgctaacttatgtttggcaactggtgtacggggcggtgtggactggatgagaaagttggccttccgctacagacgggtaaaagagatctacaacacctacaaaaataatgttggaggtctgcttggtccagctaagagggaagcctggctgcagttgagggccgaaattgaagccctgaccgactcctggttgacactggccctgaaagcactctcgctcattcactcccggacaaactgtgtgaatattttagtaacaactactcagctcatcccagcattggcgaaagtcctgctgtatgggttaggaattgtatttccaatagaaaatatttacagtgcaactaaaataggaaaagaaagctgttttgagagaataattcaaaggtttggaagaaaagtggtgtatgttgttataggagatggtgtagaagaagaacaaggagcaaaaaagcacgcgatgcccttctggaggatctccagccactcggacctcatggccctgcaccatgccttggaactggagtacctgtaacagcgctcggcactttgacagcgcacagctgctctgtgaccagggacagatccagcaggccccagtctcgcatcagcgccggcctccagaacttagcaatttccgcctggtgatgcgcagttgctgtcagtcttgacctctgcctttgtggtgaatggaggaccacgtctatttcatcagaacagctgttgactctagtactgtgaatccagtgaaaataagccatgagaatgttttagcacagcgttatgtgtctgccacattaactacacggttcaaacctgtgaagaaaggacctgcaaacgcttcagttgttagcattttcaatgtgatataaacagcttctccaatacagcaaacctaattgcacaacagagactgaaatgtgtttcctgaataccagtggaggaattttcttgtaaagaaggtttactttttggtgtctcatacccagggtaatctgtacatctctacttatttatgaacagactttttttaaaaagataaaaaaacagctttattgaggtataattcacccaccagacttttttaaacatcaaataattgaagagacaatagcattagaaataagtgattaaaggcctctgcctcacaacatggcaagtacagtactttgaattttagcacattgcatagtagttttaagtatgtctaatttaaacgtataatatgtacatcactgagacaatcatgtacagaaagaatttttggtgtaaatttgtaataatggataattcttttacatattgtttagggaaatgatattgaaaggtagcaatgcctggatagtgaagcatgaggcagcacgtgcacaaattcatgtgccgtgccttatctgagttttcggtataaatatgtagataatggattttttttttttagataatgttgtcaagaccaaaagcatggatgtcaagtgtcagtaaggattttgttttctaaaattttttcctgcatcagttcttctgagggccttgatgaaataacacagcagtttcttaaacaatttgaaacaaaatgagctctcctaccacctcactttttcatttccacactaatgtattatatgtaactacttggaaaaaataattattcaaatgcttcttcccacaaagaatatagatgatagtagatatattttattaataaaatggttcatgaatcggagactaacaaagttttcatgtgctcagaattattaattatcgtgtctgcattttctttcgataaaggaagacacacgatgctaatccggaaatcagcaaactttgcattactccctatgtgcgtattttctctttcttcctgtcaccctgaggaaggttcattgccattgtcatcaccatggaaacaacgttcctctccacctgcattatgtactacatgacaggcatcaatctggggaaataataaaattatcacctttgtcagaccataagagtttctccaaaagtggtcagtttggctgggcaatattttctctcatctaacaaacacaatccattgtcatgaaattacccttaggatgagtcttctttaatcaatcatatattgggcgggaaaaacaccagctttgacccgaagtagttgaagagctacttcattcttttctgaagttgtgtgttgctgctagaaatagtcatttgtgaattatccaaattgtttaaattcacaattgaattagttttttcttcctttttgcttgaagcaaacagttgacaatttttaaccttttcattttatgtttttgtactctgcagactgaaaagacaaagtttatcttggccttactgtataaaggtgtgctgtgtccaccgttgtgtacagaatttttcttcattaattttgtgtttaagttaataaaatttatttgtgatgtactgtaa

SEQ ID NO: 131716 - DNA, 879 bp, Homo sapiens
  Payload ID: 5708
  Gene Symbol: EYA1
  Gene Name: EYA transcriptional coactivator and phosphatase 1
  ENST ID: ENST00000493349
  CDS Start-End: 320-445
ttaccagcttcaagaaccgccatctggcatcaccagccaagcagttacagatcccacagcagagtacagcacaatccacagcccatcaacacccattaaagattcagattctgatcgattgcgtcgaggttcagatgggaaatcacgtggacggggccgaagaaacaataatccttcacctcccccagattctgatcttgagagagtgttcatctgggacttggatgagacaatcattgttttccactccttgcttactgggtcctacgccaacagatatgggagggatccacccacttcagtttcccttggactgcgaatggaagaaatgattttcaacttggcagacacacatttattttttaatgacttagaagagtcaagggcttccagagagtccatgatgctggtgaagctgggcagaagaaagcctagcagcgcttgagctcttcatgaggtctatttgaaagcacagtgagggcttggacgtgcccttagaaagcacaatggaatcatgctgttctgcatcagaatgtgaccaagtccatatagatgatgtttcttcagatgataacggacaggacctaagcacatataactttggaacagatggctttcctgctgcagcaaccagtgctaacttatgtttggcaactggtgtacggggcggtgtggactggatgagaaagttggccttccgctacagacgggtaaaagagatctacaacacctacaaaaataatgttggaggtctgcttggtccagctaagagggaagcctggctgcagttgagggccgaaattgaagccctgaccgactcctggttgacactggccctgaaagcactctcgctcattcactcccggacaaactgtgtga

SEQ ID NO: 131717 - DNA, 1540 bp, Homo sapiens
  Payload ID: 5709
  Gene Symbol: EYA2
  Gene Name: EYA transcriptional coactivator and phosphatase 2
  ENST ID: ENST00000317304
  CDS Start-End: 11-1537
gtacaaggaaatggtagaactagtgatctcacccagcctcactgtaaacagcgattgtctggataaactgaagtttaaccgtgctgacgctgctgtgtggactctgagtgacagacaaggcatcaccaaatcggcccccctgagagtgtcccagctcttctccagatcttgcccacgtgtcctcccccgccagccttccacagccatggcagcctacggccagacgcagtacagtgcggggatccagcaggctaccccctatacagcttacccacctccagcacaagcctatggaatcccttcctacagcatcaagacagaagacagcttgaaccattcccctggccagagtggattcctcagctatggctccagcttcagcacctcacccactggacagagcccatacacctaccagatgcacggcacaacagggttctatcaaggaggaaatggactgggcaacgcagccggtttcgggagtgtgcaccaggactatccttcctaccccggcttcccccagagccagtacccccagtattacggctcatcctacaaccctccctacgtcccggccagcagcatctgcccttcgcccctctccacgtccacctacgtcctccaggaggcatctcacaacgtccccaaccagagttccgagtcacttgctggtgaatacaacacacacaatggaccttccacaccagcgaaagagggagacacagacaggccgcaccgggcctccgacgggaagctccgaggccggtctaagaggagcagtgacccgtccccggcaggggacaatgagattgagcgtgtgttcgtgtgggacttggatgagacaataattatttttcactccttactcacggggacatttgcatccagatacgggaaggattgtgaccagatccacgttgatgacgtctcatcagatgacaatggccaagatttaagcacatacaacttctccgctgacggcttccacagttcggccccaggagccaacctgtgcctgggctctggcgtgcacggcggcgtggactggatgaggaagctggccttccgctaccggcgggtgaaggagatgtacaatacctacaagaacaacgttggtgggttgataggcactcccaaaagggagacctggctacagctccgagctgagctggaagctctcacagacctctggctgacccactccctgaaggcactaaacctcatcaactcccggcccaactgtgtcaatgtgctggtcaccaccactcaactaattcctgccctggccaaagtcctgctatatggcctggggtctgtgtttcctattgagaacatctacagtgcaaccaagacagggaaggagagctgcttcgagaggataatgcagagattcggcagaaaagctgtctacgtggtgatcggtgatggtgtggaagaggagcaaggagcgaaaaagcacaacatgcctttctggcggatatcctgccacgcagacctggaggcactgaggcacgccctggagctggagtatttatagcag

SEQ ID NO: 131718 - DNA, 2702 bp, Homo sapiens
  Payload ID: 5709
  Gene Symbol: EYA2
  Gene Name: EYA transcriptional coactivator and phosphatase 2
  Uniprot ID: O00167
  ENST ID: ENST00000327619
  CDS Start-End: 375-1991
gcgcgctctgctcggctgcaggctcaggaagcggcgcggcggcacgtgctgggccagagccccgcgccctgcgtccagccgccgggtgtgtgcgcccgcgtagcccagcgtcgcgcctcggcgcccccacgcgcccacgcagcggcgcggggacccgggcgggggcagagggagggcccggcccagggaggagaaggggccggtcctcccggcgcaggcagcagccgcggcagcccaggaggcggaggcagcggcaacggcagagacagcaacgtgcccgccgcagtcagcccggcctcgtcggacccgcaccggcccgcccgcccgcccgcaccgcgtcggggcgccctctccactgcgcgcggtacaaggaaatggtagaactagtgatctcacccagcctcactgtaaacagcgattgtctggataaactgaagtttaaccgtgctgacgctgctgtgtggactctgagtgacagacaaggcatcaccaaatcggcccccctgagagtgtcccagctcttctccagatcttgcccacgtgtcctcccccgccagccttccacagccatggcagcctacggccagacgcagtacagtgcggggatccagcaggctaccccctatacagcttacccacctccagcacaagcctatggaatcccttcctacagcatcaagacagaagacagcttgaaccattcccctggccagagtggattcctcagctatggctccagcttcagcacctcacccactggacagagcccatacacctaccagatgcacggcacaacagggttctatcaaggaggaaatggactgggcaacgcagccggtttcgggagtgtgcaccaggactatccttcctaccccggcttcccccagagccagtacccccagtattacggctcatcctacaaccctccctacgtcccggccagcagcatctgcccttcgcccctctccacgtccacctacgtcctccaggaggcatctcacaacgtccccaaccagagttccgagtcacttgctggtgaatacaacacacacaatggaccttccacaccagcgaaagagggagacacagacaggccgcaccgggcctccgacgggaagctccgaggccggtctaagaggagcagtgacccgtccccggcaggggacaatgagattgagcgtgtgttcgtgtgggacttggatgagacaataattatttttcactccttactcacggggacatttgcatccagatacgggaaggacaccacgacgtccgtgcgcattggccttatgatggaagagatgatcttcaaccttgcagatacacatctgttcttcaatgacctggaggattgtgaccagatccacgttgatgacgtctcatcagatgacaatggccaagatttaagcacatacaacttctccgctgacggcttccacagttcggccccaggagccaacctgtgcctgggctctggcgtgcacggcggcgtggactggatgaggaagctggccttccgctaccggcgggtgaaggagatgtacaatacctacaagaacaacgttggtgggttgataggcactcccaaaagggagacctggctacagctccgagctgagctggaagctctcacagacctctggctgacccactccctgaaggcactaaacctcatcaactcccggcccaactgtgtcaatgtgctggtcaccaccactcaactaattcctgccctggccaaagtcctgctatatggcctggggtctgtgtttcctattgagaacatctacagtgcaaccaagacagggaaggagagctgcttcgagaggataatgcagagattcggcagaaaagctgtctacgtggtgatcggtgatggtgtggaagaggagcaaggagcgaaaaagcacaacatgcctttctggcggatatcctgccacgcagacctggaggcactgaggcacgccctggagctggagtatttatagcaggatcagcagcatctccacctgccatctcaccctcagaccccctcgccttccccacctccccaccgagaactccagagacccagatgttggacaccaggaaggggccccacagccgagacgacgtgtccagtgaccatctcagaagccgtccatcagtccaaatgggggttctgagaaggaaagtacccaacattggcttcggagtatttgactttggggaaaagggctggctcggagtctagactcttctgtaagactcacagaacaaaagcaaggaattgctgatttggggggtgcctggtgatgaggaggggatgggtttgtcttgtcttctttttaatttatggactagtctcattactccggaattatgctcttgtacctgtgtggctgggtttcttagtcgttggtttggtttggttttttgaactggtatgtggggtggttcacagttctaatgtaagcactctattctccaagttgtgctttgtggggacaatcattctttgaacattagagaggaaggcagttcaagctgttgaaaagactattgcttatttttgtttttaaagacctacttgacgtcatgtggacagtgcacgtgccttacgctacatcttgttttctaggaagagggggatgctgggaaggaatgggtgctttgtgatggataaaaggcattaaataaaaccacgtttacattttgaa

SEQ ID NO: 131719 - DNA, 2465 bp, Homo sapiens
  Payload ID: 5709
  Gene Symbol: EYA2
  Gene Name: EYA transcriptional coactivator and phosphatase 2
  Uniprot ID: O00167
  ENST ID: ENST00000357410
  CDS Start-End: 375-1754
gcgcgctctgctcggctgcaggctcaggaagcggcgcggcggcacgtgctgggccagagccccgcgccctgcgtccagccgccgggtgtgtgcgcccgcgtagcccagcgtcgcgcctcggcgcccccacgcgcccacgcagcggcgcggggacccgggcgggggcagagggagggcccggcccagggaggagaaggggccggtcctcccggcgcaggcagcagccgcggcagcccaggaggcggaggcagcggcaacggcagagacagcaacgtgcccgccgcagtcagcccggcctcgtcggacccgcaccggcccgcccgcccgcccgcaccgcgtcggggcgccctctccactgcgcgcggtacaaggaaatggtagaactagtgatctcacccagcctcactgtaaacagcgattgtctggataaactgaagtttaaccgtgctgacgctgctgtgtggactctgagtgacagacaaggcatcaccaaatcggcccccctgagagtgtcccagctcttctccagatcttgcccacgtgtcctcccccgccagccttccacagccatggcagcctacggccagacgcagtacagtgcggggatccagcaggctaccccctatacagcttacccacctccagcacaagcctatggaatcccttcctacagcatcaagacagaagacagcttgaaccattcccctggccagagtggattcctcagctatggctccagcttcagcacctcacccactggacagagcccatacacctaccagatgcacggcacaacagggttctatcaaggaggaaatggactgggcaacgcagccggtttcgggagtgtgcaccaggactatccttcctaccccggcttcccccagagccagtacccccagtattacggctcatcctacaaccctccctacgtcccggccagcagcatctgcccttcgcccctctccacgtccacctacgtcctccaggaggcatctcacaacgtccccaaccagagttccgagtcacttgctggtgaatacaacacacacaatggaccttccacaccagcgaaagagggagacacagacaggccgcaccgggcctccgacgggaagctccgaggccggtctaagaggagcagtgacccgtccccggcaggggacaatgagattgagcgtgtgttcgtgtgggacttggatgagacaataattatttttcactccttactcacggggacatttgcatccagatacgggaaggacaccacgacgtccgtgcgcattggccttatgatggaagagatgatcttcaaccttgcagatacacatctgttcttcaatgacctggaggattgtgaccagatccacgttgatgacgtctcatcagatgacaatggccaagatttaagcacatacaacttctccgctgacggcttccacagttcggccccaggagccaacctgtgcctgggctctggcgtgcacggcggcgtggactggatgaggaagctggccttccgctaccggcgggtgaaggagatgtacaatacctacaagaacaacgttggtgggaaggagagctgcttcgagaggataatgcagagattcggcagaaaagctgtctacgtggtgatcggtgatggtgtggaagaggagcaaggagcgaaaaagcacaacatgcctttctggcggatatcctgccacgcagacctggaggcactgaggcacgccctggagctggagtatttatagcaggatcagcagcatctccacctgccatctcaccctcagaccccctcgccttccccacctccccaccgagaactccagagacccagatgttggacaccaggaaggggccccacagccgagacgacgtgtccagtgaccatctcagaagccgtccatcagtccaaatgggggttctgagaaggaaagtacccaacattggcttcggagtatttgactttggggaaaagggctggctcggagtctagactcttctgtaagactcacagaacaaaagcaaggaattgctgatttggggggtgcctggtgatgaggaggggatgggtttgtcttgtcttctttttaatttatggactagtctcattactccggaattatgctcttgtacctgtgtggctgggtttcttagtcgttggtttggtttggttttttgaactggtatgtggggtggttcacagttctaatgtaagcactctattctccaagttgtgctttgtggggacaatcattctttgaacattagagaggaaggcagttcaagctgttgaaaagactattgcttatttttgtttttaaagacctacttgacgtcatgtggacagtgcacgtgccttacgctacatcttgttttctaggaagagggggatgctgggaaggaatgggtgctttgtgatggataaaaggcattaaataaaaccacgtttacattttgaa

SEQ ID NO: 131720 - DNA, 592 bp, Homo sapiens
  Payload ID: 5709
  Gene Symbol: EYA2
  Gene Name: EYA transcriptional coactivator and phosphatase 2
  ENST ID: ENST00000458636
  CDS Start-End: 1-592
cagctcttctccagatcttgcccacgtgtcctcccccgccagccttccacagccatggcagcctacggccagacgcagtacagtgcggggatccagcaggctaccccctatacagcttacccacctccagcacaagcctatggaatcccttcctacagcatcaagacagaagacagcttgaaccattcccctggccagagtggattcctcagctatggctccagcttcagcacctcacccactggacagagcccatacacctaccagatgcacggtgaatacaacacacacaatggaccttccacaccagcgaaagagggagacacagacaggccgcaccgggcctccgacgggaagctccgaggccggtctaagaggagcagtgacccgtccccggcaggggacaatgagattgagcgtgtgttcgtgtgggacttggatgagacaataattatttttcactccttactcacggggacatttgcatccagatacgggaaggacaccacgacgtccgtgcgcattggccttatgatggaagagatgatcttcaaccttgcagatacacatctgttcttcaatgacctggagg

SEQ ID NO: 131721 - DNA, 2384 bp, Homo sapiens
  Payload ID: 5709
  Gene Symbol: EYA2
  Gene Name: EYA transcriptional coactivator and phosphatase 2
  Uniprot ID: O00167
  ENST ID: ENST00000497062
  CDS Start-End: 129-1673
ggcagcggcaacggcagagacagcaacgtgcccgccgcagtcagcccggcctcgtcggacccgcaccggcccgcccgcccgcccgcaccgcgtcggggcgccctctccactgcgcgcggtacaaggaaatggtagaactagtgatctcacccagcctcactgtaaacagcgattgtctggataaactgaagtttaaccgtgctgacgctgctgtgtggactctgagtgacagacaaggcatcaccaaatcggcccccctgagagtgtcccagctcttctccagatcttgcccacgtgtcctcccccgccagccttccacagccatggcagcctacggccagacgcagtacagtgcggggatccagcaggctaccccctatacagcttacccacctccagcacaagcctatggaatcccttccttcagcacctcacccactggacagagcccatacacctaccagatgcacggcacaacagggttctatcaaggaggaaatggactgggcaacgcagccggtttcgggagtgtgcaccaggactatccttcctaccccggcttcccccagagccagtacccccagtattacggctcatcctacaaccctccctacgtcccggccagcagcatctgcccttcgcccctctccacgtccacctacgtcctccaggaggcatctcacaacgtccccaaccagagttccgagtcacttgctggtgaatacaacacacacaatggaccttccacaccagcgaaagagggagacacagacaggccgcaccgggcctccgacgggaagctccgaggccggtctaagaggagcagtgacccgtccccggcaggggacaatgagattgagcgtgtgttcgtgtgggacttggatgagacaataattatttttcactccttactcacggggacatttgcatccagatacgggaaggacaccacgacgtccgtgcgcattggccttatgatggaagagatgatcttcaaccttgcagatacacatctgttcttcaatgacctggaggattgtgaccagatccacgttgatgacgtctcatcagatgacaatggccaagatttaagcacatacaacttctccgctgacggcttccacagttcggccccaggagccaacctgtgcctgggctctggcgtgcacggcggcgtggactggatgaggaagctggccttccgctaccggcgggtgaaggagatgtacaatacctacaagaacaacgttggtgggttgataggcactcccaaaagggagacctggctacagctccgagctgagctggaagctctcacagacctctggctgacccactccctgaaggcactaaacctcatcaactcccggcccaactgtgtcaatgtgctggtcaccaccactcaactaattcctgccctggccaaagtcctgctatatggcctggggtctgtgtttcctattgagaacatctacagtgcaaccaagacagggaaggagagctgcttcgagaggataatgcagagattcggcagaaaagctgtctacgtggtgatcggtgatggtgtggaagaggagcaaggagcgaaaaagcacaacatgcctttctggcggatatcctgccacgcagacctggaggcactgaggcacgccctggagctggagtatttatagcaggatcagcagcatctccacctgccatctcaccctcagaccccctcgccttccccacctccccaccgagaactccagagacccagatgttggacaccaggaaggggccccacagccgagacgacgtgtccagtgaccatctcagaagccgtccatcagtccaaatgggggttctgagaaggaaagtacccaacattggcttcggagtatttgactttggggaaaagggctggctcggagtctagactcttctgtaagactcacagaacaaaagcaaggaattgctgatttggggggtgcctggtgatgaggaggggatgggtttgtcttgtcttctttttaatttatggactagtctcattactccggaattatgctcttgtacctgtgtggctgggtttcttagtcgttggtttggtttggttttttgaactggtatgtggggtggttcacagttctaatgtaagcactctattctccaagttgtgctttgtggggacaatcattctttgaacattagagaggaaggcagttcaagctgttgaaaagactattgcttatttttgtttttaaagacctacttgacgtcatgtggacagtgcacgtgccttacgctacatcttgttttctaggaagagggggatgctgggaaggaatgggtgctttgtgatggataaaaggcattaaataaaaccacgtttacattttgaa

SEQ ID NO: 131722 - DNA, 2612 bp, Homo sapiens
  Payload ID: 5709
  Gene Symbol: EYA2
  Gene Name: EYA transcriptional coactivator and phosphatase 2
  ENST ID: ENST00000611592
  CDS Start-End: 375-1901
gcgcgctctgctcggctgcaggctcaggaagcggcgcggcggcacgtgctgggccagagccccgcgccctgcgtccagccgccgggtgtgtgcgcccgcgtagcccagcgtcgcgcctcggcgcccccacgcgcccacgcagcggcgcggggacccgggcgggggcagagggagggcccggcccagggaggagaaggggccggtcctcccggcgcaggcagcagccgcggcagcccaggaggcggaggcagcggcaacggcagagacagcaacgtgcccgccgcagtcagcccggcctcgtcggacccgcaccggcccgcccgcccgcccgcaccgcgtcggggcgccctctccactgcgcgcggtacaaggaaatggtagaactagtgatctcacccagcctcactgtaaacagcgattgtctggataaactgaagtttaaccgtgctgacgctgctgtgtggactctgagtgacagacaaggcatcaccaaatcggcccccctgagagtgtcccagctcttctccagatcttgcccacgtgtcctcccccgccagccttccacagccatggcagcctacggccagacgcagtacagtgcggggatccagcaggctaccccctatacagcttacccacctccagcacaagcctatggaatcccttcctacagcatcaagacagaagacagcttgaaccattcccctggccagagtggattcctcagctatggctccagcttcagcacctcacccactggacagagcccatacacctaccagatgcacggcacaacagggttctatcaaggaggaaatggactgggcaacgcagccggtttcgggagtgtgcaccaggactatccttcctaccccggcttcccccagagccagtacccccagtattacggctcatcctacaaccctccctacgtcccggccagcagcatctgcccttcgcccctctccacgtccacctacgtcctccaggaggcatctcacaacgtccccaaccagagttccgagtcacttgctggtgaatacaacacacacaatggaccttccacaccagcgaaagagggagacacagacaggccgcaccgggcctccgacgggaagctccgaggccggtctaagaggagcagtgacccgtccccggcaggggacaatgagattgagcgtgtgttcgtgtgggacttggatgagacaataattatttttcactccttactcacggggacatttgcatccagatacgggaaggattgtgaccagatccacgttgatgacgtctcatcagatgacaatggccaagatttaagcacatacaacttctccgctgacggcttccacagttcggccccaggagccaacctgtgcctgggctctggcgtgcacggcggcgtggactggatgaggaagctggccttccgctaccggcgggtgaaggagatgtacaatacctacaagaacaacgttggtgggttgataggcactcccaaaagggagacctggctacagctccgagctgagctggaagctctcacagacctctggctgacccactccctgaaggcactaaacctcatcaactcccggcccaactgtgtcaatgtgctggtcaccaccactcaactaattcctgccctggccaaagtcctgctatatggcctggggtctgtgtttcctattgagaacatctacagtgcaaccaagacagggaaggagagctgcttcgagaggataatgcagagattcggcagaaaagctgtctacgtggtgatcggtgatggtgtggaagaggagcaaggagcgaaaaagcacaacatgcctttctggcggatatcctgccacgcagacctggaggcactgaggcacgccctggagctggagtatttatagcaggatcagcagcatctccacctgccatctcaccctcagaccccctcgccttccccacctccccaccgagaactccagagacccagatgttggacaccaggaaggggccccacagccgagacgacgtgtccagtgaccatctcagaagccgtccatcagtccaaatgggggttctgagaaggaaagtacccaacattggcttcggagtatttgactttggggaaaagggctggctcggagtctagactcttctgtaagactcacagaacaaaagcaaggaattgctgatttggggggtgcctggtgatgaggaggggatgggtttgtcttgtcttctttttaatttatggactagtctcattactccggaattatgctcttgtacctgtgtggctgggtttcttagtcgttggtttggtttggttttttgaactggtatgtggggtggttcacagttctaatgtaagcactctattctccaagttgtgctttgtggggacaatcattctttgaacattagagaggaaggcagttcaagctgttgaaaagactattgcttatttttgtttttaaagacctacttgacgtcatgtggacagtgcacgtgccttacgctacatcttgttttctaggaagagggggatgctgggaaggaatgggtgctttgtgatggataaaaggcattaaataaaaccacgtttacattttgaa

SEQ ID NO: 131723 - DNA, 1729 bp, Homo sapiens
  Payload ID: 5710
  Gene Symbol: EYA3
  Gene Name: EYA transcriptional coactivator and phosphatase 3
  Uniprot ID: Q99504
  ENST ID: ENST00000373863
  CDS Start-End: 110-1720
ctgatctccatgtcctgttgtggggcttttacagcctttggattgtgaaaactgctgagagagacttgcaatccagtcacataagtataataaagaaatattggtcctcatggaagaagagcaagatttaccagagcaaccagtgaaaaaagccaagatgcaggaatcaggagagcaaactataagtcaagtaagcaatccagatgtcagtgatcagaagcctgaaacatcaagccttgcttcaaaccttcccatgtcagaggaaattatgacatgcaccgattacatccctcgctcatccaatgattatacctcacaaatgtattctgcaaaaccttatgcacatattctctcagttcctgtttcggaaactgcttaccctggacagactcaataccagacactacagcagactcaaccctatgctgtctaccctcaggcaacccaaacgtatggactacctccttttgcttcaagcacaaatgccagcctgatatctacttcttctacaattgccaatattccagcagcagcagtagccagcatctcaaaccaggattatcccacctatactattcttggtcagaatcagtaccaggcctgctaccccagctccagctttggagtcacaggtcagactaacagtgatgcagagagcaccacattagcagcaaccacataccagtcggagaagcctagtgtcatggcgcctgcacctgcagcacagagactttcctctggagacccttctacaagtccatctttgtcccagactacaccaagtaaagatactgatgatcagtccaggaaaaacatgactagcaagaaccggggcaagaggaaagctgatgccacttcttcccaagacagtgaattagaacgggtatttctgtgggacttggatgaaaccatcatcatcttccactcacttcttactggatcctatgcccagaaatatggaaaggacccaacagtagtgattggctcaggtttaacaatggaagaaatgatttttgaagtggctgatactcatctatttttcaatgacttagaggagtgtgaccaggtacatgtggaagatgtggcttctgatgacaatggccaagacttgagcaactacagtttctcaacagatggtttcagtggctcaggaggtagtggcagccatggttcatctgtgggtgttcagggaggtgtggactggatgaggaaactagctttccgctaccggaaagtgagagaaatctatgataagcataaaagcaacgtgggtggtctcctcagtccccagaggaaggaagcactgcagagattaagagcagaaattgaagttttaacagattcctggttaggaactgcattaaagtccttacttctcatccagtccagaaagaattgtgtgaatgttctgatcactaccacccagctggttccagccctggccaaggttctcctatatggactaggagaaatatttcctattgagaacatctatagtgctaccaaaattggtaaggagagctgctttgagagaattgtgtcaaggtttggaaagaaagtcacatatgtagtgattggagatggacgagatgaagaaattgcagccaaacagcaactctatttcttagacatggaggcattgggttgccagctagaaccaactgccctgatactcttcatccagttaagtggaaaccttagcaactataataaactatgagattggtaa

SEQ ID NO: 131724 - DNA, 2459 bp, Homo sapiens
  Payload ID: 5710
  Gene Symbol: EYA3
  Gene Name: EYA transcriptional coactivator and phosphatase 3
  ENST ID: ENST00000373864
  CDS Start-End: 211-1461
aaactgctgagagagacttgcaatccagtcacataagtataataaagaaatattggtcctcatggaagaagagcaagatttaccagagcaaccatcaagtaagcaatccagatgtcagtgatcagaagcctgaaacatcaagccttgcttcaaaccttcccatgtcagaggaaattatgacatgcaccgattacatccctcgctcatccaatgattatacctcacaaatgtattctgcaaacttcaagcacaaatgccagcctgatatctacttcttctacaattgccaatattccagcagcagcagtagccagcatctcaaaccaggattatcccacctatactattcttggtcagaatcagtaccaggcctgctaccccagctccagctttggagtcacaggtcagactaacagtgatgcagagagcaccacattagcagcaaccacataccagtcggagaagcctagtgtcatggcgcctgcacctgcagcacagagactttcctctgacccttctacaagtccatctttgtcccagactacaccaagtaaagatactgatgatcagtccaggaaaaacatgactagcaagaaccggggcaagaggaaagctgatgccacttcttcccaagacagtgaattagaacgggtatttctgtgggacttggatgaaaccatcatcatcttccactcacttcttactggatcctatgcccagaaatatggaaaggacccaacagtagtgattggctcaggtttaacaatggaagaaatgatttttgaagtggctgatactcatctatttttcaatgacttagaggagtgtgaccaggtacatgtggaagatgtggcttctgatgacaatggccaagacttgagcaactacagtttctcaacagatggtttcagtggctcaggaggtagtggcagccatggttcatctgtgggtgttcagggaggtgtggactggatgaggaaactagctttccgctaccggaaagtgagagaaatctatgataagcataaaagcaacgtgggtggtctcctcagtccccagaggaaggaagcactgcagagattaagagcagaaattgaagttttaacagattcctggttaggaactgcattaaagtccttacttctcatccagtccagaaagaattgtgtgaatgttctgatcactaccacccagctggttccagccctggccaaggttctcctatatggactaggagaaatatttcctattgagaacatctatagtgctaccaaaattggtaaggagagctgctttgagagaattgtgtcaaggtttggaaagaaagtcacatatgtagtgattggagatggacgagatgaagaaattgcagccaaacagcacaacatgcctttctggaggatcacaaaccatggagacctagtatcccttcaccaggctttagagcttgattttctctaagaactggaatgaggagccttccccttgagctccttttcactcctgaagggagctggagactggaaccaactgagaactttctctgtctgtctctctctgtgtctctgtctctatctctctctctttctctctttctctctctccctctctccctccctcccttcctctctccctccctctctgcctctctctctctctctctctctgtctttatccatggaatgctggcgagaacacaatcagaaccaacagctgcaatttttgctaagagtgagctgcagccccgtgttcatctccatacagaagcagggacagttggatagagagaacaatggactcactgcagctacagtgcttttaatttttctgtgttttgtttttgtttttttgttttcaaaaaatgaaaaagaaaaggaaattcctggggcagagttgcactcttagtccatgaccagattgagaattactgataacttgtggtgatcagataaatgcagcagacttttatgataacatctcttgcagtcttagagtctccttagcttagaatctcacttatttccagcgaatgtgtatgttatttttataggtaagggtctgatctttgacgcaggtttcccccactttctttttctagcaagaaggggtgtttaaagtcttgaaaatagtaattgaaatatctaaaatacctccctgtggcagtagcacctctatagctgctccagtggtctgctctctaggatgatacctttcctgttcttctatctcctagctggtgaactgtggggcactggacactgagtaacttaaactttggcatttcccatctagaagccttagtcttctttccagtcccttttccctttagtcaaatggcacaaccctaaaaactccttcagcttgactgtcattcagactgtatcacaggaggcttagcttccaaactggagagaaggaactaaagtgtcttatgaatttcagcttcttggctcttgaga

SEQ ID NO: 131725 - DNA, 6085 bp, Homo sapiens
  Payload ID: 5710
  Gene Symbol: EYA3
  Gene Name: EYA transcriptional coactivator and phosphatase 3
  Uniprot ID: Q99504
  ENST ID: ENST00000373871
  CDS Start-End: 242-1963
aggtttctagtggaacgaggtgtggattgtgaggtgactctggccgcttacttccggttcctagcgatgcgcatccgggtcacgctaacgccgcggtttcctccgctcgattggttctactgtgggtctggactgatctccatgtcctgttgtggggcttttacagcctttggattgtgaaaactgctgagagagacttgcaatccagtcacataagtataataaagaaatattggtcctcatggaagaagagcaagatttaccagagcaaccagtgaaaaaagccaagatgcaggaatcaggagagcaaactataagtcaagtaagcaatccagatgtcagtgatcagaagcctgaaacatcaagccttgcttcaaaccttcccatgtcagaggaaattatgacatgcaccgattacatccctcgctcatccaatgattatacctcacaaatgtattctgcaaaaccttatgcacatattctctcagttcctgtttcggaaactgcttaccctggacagactcaataccagacactacagcagactcaaccctatgctgtctaccctcaggcaacccaaacgtatggactacctccttttggtgcattgtggccaggtatgaaacctgaaagtggtttaattcagactccatctccaagtcaacacagtgttcttacctgcactacagggttaaccacaagccagccaagcccagcacattattcttatcccattcaagcttcaagcacaaatgccagcctgatatctacttcttctacaattgccaatattccagcagcagcagtagccagcatctcaaaccaggattatcccacctatactattcttggtcagaatcagtaccaggcctgctaccccagctccagctttggagtcacaggtcagactaacagtgatgcagagagcaccacattagcagcaaccacataccagtcggagaagcctagtgtcatggcgcctgcacctgcagcacagagactttcctctggagacccttctacaagtccatctttgtcccagactacaccaagtaaagatactgatgatcagtccaggaaaaacatgactagcaagaaccggggcaagaggaaagctgatgccacttcttcccaagacagtgaattagaacgggtatttctgtgggacttggatgaaaccatcatcatcttccactcacttcttactggatcctatgcccagaaatatggaaaggacccaacagtagtgattggctcaggtttaacaatggaagaaatgatttttgaagtggctgatactcatctatttttcaatgacttagaggagtgtgaccaggtacatgtggaagatgtggcttctgatgacaatggccaagacttgagcaactacagtttctcaacagatggtttcagtggctcaggaggtagtggcagccatggttcatctgtgggtgttcagggaggtgtggactggatgaggaaactagctttccgctaccggaaagtgagagaaatctatgataagcataaaagcaacgtgggtggtctcctcagtccccagaggaaggaagcactgcagagattaagagcagaaattgaagttttaacagattcctggttaggaactgcattaaagtccttacttctcatccagtccagaaagaattgtgtgaatgttctgatcactaccacccagctggttccagccctggccaaggttctcctatatggactaggagaaatatttcctattgagaacatctatagtgctaccaaaattggtaaggagagctgctttgagagaattgtgtcaaggtttggaaagaaagtcacatatgtagtgattggagatggacgagatgaagaaattgcagccaaacagcacaacatgcctttctggaggatcacaaaccatggagacctagtatcccttcaccaggctttagagcttgattttctctaagaactggaatgaggagccttccccttgagctccttttcactcctgaagggagctggagactggaaccaactgagaactttctctgtctgtctctctctgtgtctctgtctctatctctctctctttctctctttctctctctccctctctccctccctcccttcctctctccctccctctctgcctctctctctctctctctctctgtctttatccatggaatgctggcgagaacacaatcagaaccaacagctgcaatttttgctaagagtgagctgcagccccgtgttcatctccatacagaagcagggacagttggatagagagaacaatggactcactgcagctacagtgcttttaatttttctgtgttttgtttttgtttttttgttttcaaaaaatgaaaaagaaaaggaaattcctggggcagagttgcactcttagtccatgaccagattgagaattactgataacttgtggtgatcagataaatgcagcagacttttatgataacatctcttgcagtcttagagtctccttagcttagaatctcacttatttccagcgaatgtgtatgttatttttataggtaagggtctgatctttgacgcaggtttcccccactttctttttctagcaagaaggggtgtttaaagtcttgaaaatagtaattgaaatatctaaaatacctccctgtggcagtagcacctctatagctgctccagtggtctgctctctaggatgatacctttcctgttcttctatctcctagctggtgaactgtggggcactggacactgagtaacttaaactttggcatttcccatctagaagccttagtcttctttccagtcccttttccctttagtcaaatggcacaaccctaaaaactccttcagcttgactgtcattcagactgtatcacaggaggcttagcttccaaactggagagaaggaactaaagtgtcttatgaatttcagcttcttggctcttgagaccgaaaggttctacctattccccctgcagagaagcacccatttcccatcagatgctcgtccctgcagcttcttccttcttggtcatcataatgctaggttcttacccctttcctgccctctgcacctcatgtccacctccaggcagctctggccagtccccgggtattagacccaagaattcaaatcaaatctaaaaacatgcttataactacattttggccaaaactgccaatgtatttgacttcctttgtggaagccctaagccatatgaaggatgtcccaggtatgtatttacccagatctctgcctgaaactgaagagcagattgctgtatttaaattttcccatggaaaaccctgcttctcaaatcccattctaaagtaggaaaccagaaagactttgctgattgtggggggaagggagaaacagacaggttttcacattgttgccaaggctggtcttgaacacctggcctcaagcgatcctcccacctcggcctctcaaagtgttgggattgtaggcatgagccactgcacccagccagactttcctgatttaaatgagagtactgcatcattccctacttcatggcccaaaacttaatcctgggccaaatgcaggagcatctctcgacctctgggcagattggtgggtgcccaggcactagtcacagccttccagcccagccatgattgttggatgccccatccctccaagagcaatttgggcatctactcaggcaggataaaattccctagagctgaggaagttcagcctctcccaggctacacagagagagatgatacaagcacctcagattgagatgcaggattggtccgcagaaggaggcattgttgaccaaccccagctataattgcttgtcaccagagattctgcatacccatttccagagatgttgcagcacaaagaggcaagactccttccaatgccaggccacccagatagcaagagagagaggctggtatacacattccttcagaactcattgaaaagcgctcataactcgtgattttaaggagtaagtttttgctgagtagctgaagtcagtgctcctttacttagctgcctctttggccttgtttcctgtggggttgggaggagggagatgtagtgtgaggtaggccttcccttggtctgtattcagcatagttgcctagatgctgctctgccttgtttgatggttgatcttaggaagctctaggttttactctgaggcctcaaaccctccccctatgcagtatagctgttgggtttttgtcctggacaaaggccacggctgttgtgctgcgcttcaggtttgtgaggctgcggagtggtacccccaccatgcacgcaagcacacacacacagatacttccctctccacccttttgggagctctttattttagaatgtaacttgaactcacttttatcattggcctttttcctcttactctgacttcctagcttagctctttccaaaaggaacttgaacttggccaagagaggtaaggaggctgagcagagcagtctttgctcattcctggttgttgccaccctcatttaaatggaagagagaaaacaggagcttcttggctgtttgccaaaatgaattgtccagggaacacagtgctctctgtaattaccctgcctttttctccaccccaacacaaaaatctggaaaggaaaataagtgggtaggattaagagctgttagaagctgaggaccaaaggacactgtgggtccattcatcaagggggagaccctcttcattagagtcctcatgaaattagccaaatgatgagtccttccctagctgggcatggtgggttctctttttttttttttttttttttttgttgttgttgttgagatggagtctcgctctgtcacccaggctggagtacagtggcatgatctcggctcactgcaacctccgcctcccaggttcaagcgattctcctacctcagcctcctgattagctgagattacaggcgcccaccaccacgcctggctaatttttgtatttttagtagagatggggtttcaccatgttgaccaggctgttctcaaactcctgacctcaggtgatctgctcaccttggcctcccaaagtgctgggattacaggcatgagccaccatgcctggccaggcactgtgggttctacaggatgggtctgtaatgtcacggtgagggctctctctagtagtagatctggagtgaggtgtgtcttgggttgaggaggtggcttgactttcgaatgtaaaactgactgtgccttagcatcaccctgtccagtgcccctggggcagctggtagtgtccagaagaatggacacctgctccagatttagatgcccatctgggcttttgtttgatttgcggcgttcctgtcttctgtaaagctagtgagttgtcccaagagactgatgccacagcttgttcgcagtttacacaaactcagctttaaaattccaaatagaatctgacttgcaaactctagctgcagcatgtggagcttctagatgtttactaccttgaatggttgtcagtgtcactgaaccacaggggagaggagtatggggtagagcaatggtctgggccaaggaatggtgagcttagggtcttcctctgactccttactcctcaaggaggcagttagggtccctcttaagcaggcttctatttcttaccactaaattggtttcctttttcatccagaagttagaactccccagatattcacactataggatctgaattccgagattctaaaatatcttaaaccacaagagagaaaatctagttctgcctcagccccagtcagcaggccatctgtcccttcctctcctctgagtcagacagctctggcaagcaaggctccttggctagttcctaatgcactgacaggagccctcccattaaggacgacttctactcaaaatgcgactctccctctgaacttcagatgcctctgttagcaggaaaaggcattgattggattggatatatttatgtgactgcgggcatttgtggctgtagaatccgtgaccgtaatgttatatgtaatgggaactatcttataaacttgaaaaaaataaagtttttattttctata

SEQ ID NO: 131726 - DNA, 5943 bp, Homo sapiens
  Payload ID: 5710
  Gene Symbol: EYA3
  Gene Name: EYA transcriptional coactivator and phosphatase 3
  Uniprot ID: Q99504
  ENST ID: ENST00000436342
  CDS Start-End: 262-1824
cctagcgatgcgcatccgggtcacgctaacgccgcggtttcctccgctcgattggttctactgtgggtctggactgatctccatgtcctgttgtggggcttttacagcctttggattgtgaaaactgctgagagagacttgcaatccagtcacataagtataataaagaaatattggtcctcatggaagaagagcaagatttaccagagcaaccagtgaaaaaagccaagatgcaggaatcaggagagcaaactataagttatgacatgcaccgattacatccctcgctcatccaatgattatacctcacaaatgtattctgcaaaaccttatgcacatattctctcagttcctgtttcggaaactgcttaccctggacagactcaataccagacactacagcagactcaaccctatgctgtctaccctcaggcaacccaaacgtatggactacctccttttggtgcattgtggccaggtatgaaacctgaaagtggtttaattcagactccatctccaagtcaacacagtgttcttacctgcactacagggttaaccacaagccagccaagcccagcacattattcttatcccattcaagcttcaagcacaaatgccagcctgatatctacttcttctacaattgccaatattccagcagcagcagtagccagcatctcaaaccaggattatcccacctatactattcttggtcagaatcagtaccaggcctgctaccccagctccagctttggagtcacaggtcagactaacagtgatgcagagagcaccacattagcagcaaccacataccagtcggagaagcctagtgtcatggcgcctgcacctgcagcacagagactttcctctggagacccttctacaagtccatctttgtcccagactacaccaagtaaagatactgatgatcagtccaggaaaaacatgactagcaagaaccggggcaagaggaaagctgatgccacttcttcccaagacagtgaattagaacgggtatttctgtgggacttggatgaaaccatcatcatcttccactcacttcttactggatcctatgcccagaaatatggaaaggacccaacagtagtgattggctcaggtttaacaatggaagaaatgatttttgaagtggctgatactcatctatttttcaatgacttagaggagtgtgaccaggtacatgtggaagatgtggcttctgatgacaatggccaagacttgagcaactacagtttctcaacagatggtttcagtggctcaggaggtagtggcagccatggttcatctgtgggtgttcagggaggtgtggactggatgaggaaactagctttccgctaccggaaagtgagagaaatctatgataagcataaaagcaacgtgggtggtctcctcagtccccagaggaaggaagcactgcagagattaagagcagaaattgaagttttaacagattcctggttaggaactgcattaaagtccttacttctcatccagtccagaaagaattgtgtgaatgttctgatcactaccacccagctggttccagccctggccaaggttctcctatatggactaggagaaatatttcctattgagaacatctatagtgctaccaaaattggtaaggagagctgctttgagagaattgtgtcaaggtttggaaagaaagtcacatatgtagtgattggagatggacgagatgaagaaattgcagccaaacagcacaacatgcctttctggaggatcacaaaccatggagacctagtatcccttcaccaggctttagagcttgattttctctaagaactggaatgaggagccttccccttgagctccttttcactcctgaagggagctggagactggaaccaactgagaactttctctgtctgtctctctctgtgtctctgtctctatctctctctctttctctctttctctctctccctctctccctccctcccttcctctctccctccctctctgcctctctctctctctctctctctgtctttatccatggaatgctggcgagaacacaatcagaaccaacagctgcaatttttgctaagagtgagctgcagccccgtgttcatctccatacagaagcagggacagttggatagagagaacaatggactcactgcagctacagtgcttttaatttttctgtgttttgtttttgtttttttgttttcaaaaaatgaaaaagaaaaggaaattcctggggcagagttgcactcttagtccatgaccagattgagaattactgataacttgtggtgatcagataaatgcagcagacttttatgataacatctcttgcagtcttagagtctccttagcttagaatctcacttatttccagcgaatgtgtatgttatttttataggtaagggtctgatctttgacgcaggtttcccccactttctttttctagcaagaaggggtgtttaaagtcttgaaaatagtaattgaaatatctaaaatacctccctgtggcagtagcacctctatagctgctccagtggtctgctctctaggatgatacctttcctgttcttctatctcctagctggtgaactgtggggcactggacactgagtaacttaaactttggcatttcccatctagaagccttagtcttctttccagtcccttttccctttagtcaaatggcacaaccctaaaaactccttcagcttgactgtcattcagactgtatcacaggaggcttagcttccaaactggagagaaggaactaaagtgtcttatgaatttcagcttcttggctcttgagaccgaaaggttctacctattccccctgcagagaagcacccatttcccatcagatgctcgtccctgcagcttcttccttcttggtcatcataatgctaggttcttacccctttcctgccctctgcacctcatgtccacctccaggcagctctggccagtccccgggtattagacccaagaattcaaatcaaatctaaaaacatgcttataactacattttggccaaaactgccaatgtatttgacttcctttgtggaagccctaagccatatgaaggatgtcccaggtatgtatttacccagatctctgcctgaaactgaagagcagattgctgtatttaaattttcccatggaaaaccctgcttctcaaatcccattctaaagtaggaaaccagaaagactttgctgattgtggggggaagggagaaacagacaggttttcacattgttgccaaggctggtcttgaacacctggcctcaagcgatcctcccacctcggcctctcaaagtgttgggattgtaggcatgagccactgcacccagccagactttcctgatttaaatgagagtactgcatcattccctacttcatggcccaaaacttaatcctgggccaaatgcaggagcatctctcgacctctgggcagattggtgggtgcccaggcactagtcacagccttccagcccagccatgattgttggatgccccatccctccaagagcaatttgggcatctactcaggcaggataaaattccctagagctgaggaagttcagcctctcccaggctacacagagagagatgatacaagcacctcagattgagatgcaggattggtccgcagaaggaggcattgttgaccaaccccagctataattgcttgtcaccagagattctgcatacccatttccagagatgttgcagcacaaagaggcaagactccttccaatgccaggccacccagatagcaagagagagaggctggtatacacattccttcagaactcattgaaaagcgctcataactcgtgattttaaggagtaagtttttgctgagtagctgaagtcagtgctcctttacttagctgcctctttggccttgtttcctgtggggttgggaggagggagatgtagtgtgaggtaggccttcccttggtctgtattcagcatagttgcctagatgctgctctgccttgtttgatggttgatcttaggaagctctaggttttactctgaggcctcaaaccctccccctatgcagtatagctgttgggtttttgtcctggacaaaggccacggctgttgtgctgcgcttcaggtttgtgaggctgcggagtggtacccccaccatgcacgcaagcacacacacacagatacttccctctccacccttttgggagctctttattttagaatgtaacttgaactcacttttatcattggcctttttcctcttactctgacttcctagcttagctctttccaaaaggaacttgaacttggccaagagaggtaaggaggctgagcagagcagtctttgctcattcctggttgttgccaccctcatttaaatggaagagagaaaacaggagcttcttggctgtttgccaaaatgaattgtccagggaacacagtgctctctgtaattaccctgcctttttctccaccccaacacaaaaatctggaaaggaaaataagtgggtaggattaagagctgttagaagctgaggaccaaaggacactgtgggtccattcatcaagggggagaccctcttcattagagtcctcatgaaattagccaaatgatgagtccttccctagctgggcatggtgggttctctttttttttttttttttttttttgttgttgttgttgagatggagtctcgctctgtcacccaggctggagtacagtggcatgatctcggctcactgcaacctccgcctcccaggttcaagcgattctcctacctcagcctcctgattagctgagattacaggcgcccaccaccacgcctggctaatttttgtatttttagtagagatggggtttcaccatgttgaccaggctgttctcaaactcctgacctcaggtgatctgctcaccttggcctcccaaagtgctgggattacaggcatgagccaccatgcctggccaggcactgtgggttctacaggatgggtctgtaatgtcacggtgagggctctctctagtagtagatctggagtgaggtgtgtcttgggttgaggaggtggcttgactttcgaatgtaaaactgactgtgccttagcatcaccctgtccagtgcccctggggcagctggtagtgtccagaagaatggacacctgctccagatttagatgcccatctgggcttttgtttgatttgcggcgttcctgtcttctgtaaagctagtgagttgtcccaagagactgatgccacagcttgttcgcagtttacacaaactcagctttaaaattccaaatagaatctgacttgcaaactctagctgcagcatgtggagcttctagatgtttactaccttgaatggttgtcagtgtcactgaaccacaggggagaggagtatggggtagagcaatggtctgggccaaggaatggtgagcttagggtcttcctctgactccttactcctcaaggaggcagttagggtccctcttaagcaggcttctatttcttaccactaaattggtttcctttttcatccagaagttagaactccccagatattcacactataggatctgaattccgagattctaaaatatcttaaaccacaagagagaaaatctagttctgcctcagccccagtcagcaggccatctgtcccttcctctcctctgagtcagacagctctggcaagcaaggctccttggctagttcctaatgcactgacaggagccctcccattaaggacgacttctactcaaaatgcgactctccctctgaacttcagatgcctctgttagcaggaaaaggcattgattggattggatatatttatgtgactgcgggcatttgtggctgtagaatccgtgaccgtaatgttatatgtaatgggaactatcttataaacttgaaaaaaataaagtttttattttct

SEQ ID NO: 131727 - DNA, 5885 bp, Homo sapiens
  Payload ID: 5710
  Gene Symbol: EYA3
  Gene Name: EYA transcriptional coactivator and phosphatase 3
  Uniprot ID: Q99504
  ENST ID: ENST00000540618
  CDS Start-End: 183-1766
cctagcgatgcgcatccgggtcacgctaacgccgcggtttcctccgctcgattggttctactgtgggtctggactgatctccatgtcctgttgtggggcttttacagcctttggattgtgaaaactgctgagagagacttgcaatccagtcacataagtataataaagaaatattggtcctcatggaagaagagcaagatttaccagagcaaccagtgaaaaaagccaagatgcaggaatcaggagagcaaactataagtcaagtaagcaatccagatgtcagtgatcagaagcctgaaacatcaagccttgcttcaaaccttcccatgtcagaggaaattatgacatgcaccgattacatccctcgctcatccaatgattatacctcacaaatgtattctgcaaaaccttatgcacatattctctcagttcctgtttcggaaactgcttaccctggacagactcaataccagacactacagcagactcaaccctatgctgtctaccctcaggcaacccaaacgtatggactacctccttttgcttcaagcacaaatgccagcctgatatctacttcttctacaattgccaatattccagcagcagcagtagccagcatctcaaaccaggattatcccacctatactattcttggtcagaatcagtaccaggcctgctaccccagctccagctttggagtcacaggtcagactaacagtgatgcagagagcaccacattagcagcaaccacataccagtcggagaagcctagtgtcatggcgcctgcacctgcagcacagagactttcctctggagacccttctacaagtccatctttgtcccagactacaccaagtaaagatactgatgatcagtccaggaaaaacatgactagcaagaaccggggcaagaggaaagctgatgccacttcttcccaagacagtgaattagaacgggtatttctgtgggacttggatgaaaccatcatcatcttccactcacttcttactggatcctatgcccagaaatatggaaaggacccaacagtagtgattggctcaggtttaacaatggaagaaatgatttttgaagtggctgatactcatctatttttcaatgacttagaggagtgtgaccaggtacatgtggaagatgtggcttctgatgacaatggccaagacttgagcaactacagtttctcaacagatggtttcagtggctcaggaggtagtggcagccatggttcatctgtgggtgttcagggaggtgtggactggatgaggaaactagctttccgctaccggaaagtgagagaaatctatgataagcataaaagcaacgtgggtggtctcctcagtccccagaggaaggaagcactgcagagattaagagcagaaattgaagttttaacagattcctggttaggaactgcattaaagtccttacttctcatccagtccagaaagaattgtgtgaatgttctgatcactaccacccagctggttccagccctggccaaggttctcctatatggactaggagaaatatttcctattgagaacatctatagtgctaccaaaattggtaaggagagctgctttgagagaattgtgtcaaggtttggaaagaaagtcacatatgtagtgattggagatggacgagatgaagaaattgcagccaaacagcacaacatgcctttctggaggatcacaaaccatggagacctagtatcccttcaccaggctttagagcttgattttctctaagaactggaatgaggagccttccccttgagctccttttcactcctgaagggagctggagactggaaccaactgagaactttctctgtctgtctctctctgtgtctctgtctctatctctctctctttctctctttctctctctccctctctccctccctcccttcctctctccctccctctctgcctctctctctctctctctctctgtctttatccatggaatgctggcgagaacacaatcagaaccaacagctgcaatttttgctaagagtgagctgcagccccgtgttcatctccatacagaagcagggacagttggatagagagaacaatggactcactgcagctacagtgcttttaatttttctgtgttttgtttttgtttttttgttttcaaaaaatgaaaaagaaaaggaaattcctggggcagagttgcactcttagtccatgaccagattgagaattactgataacttgtggtgatcagataaatgcagcagacttttatgataacatctcttgcagtcttagagtctccttagcttagaatctcacttatttccagcgaatgtgtatgttatttttataggtaagggtctgatctttgacgcaggtttcccccactttctttttctagcaagaaggggtgtttaaagtcttgaaaatagtaattgaaatatctaaaatacctccctgtggcagtagcacctctatagctgctccagtggtctgctctctaggatgatacctttcctgttcttctatctcctagctggtgaactgtggggcactggacactgagtaacttaaactttggcatttcccatctagaagccttagtcttctttccagtcccttttccctttagtcaaatggcacaaccctaaaaactccttcagcttgactgtcattcagactgtatcacaggaggcttagcttccaaactggagagaaggaactaaagtgtcttatgaatttcagcttcttggctcttgagaccgaaaggttctacctattccccctgcagagaagcacccatttcccatcagatgctcgtccctgcagcttcttccttcttggtcatcataatgctaggttcttacccctttcctgccctctgcacctcatgtccacctccaggcagctctggccagtccccgggtattagacccaagaattcaaatcaaatctaaaaacatgcttataactacattttggccaaaactgccaatgtatttgacttcctttgtggaagccctaagccatatgaaggatgtcccaggtatgtatttacccagatctctgcctgaaactgaagagcagattgctgtatttaaattttcccatggaaaaccctgcttctcaaatcccattctaaagtaggaaaccagaaagactttgctgattgtggggggaagggagaaacagacaggttttcacattgttgccaaggctggtcttgaacacctggcctcaagcgatcctcccacctcggcctctcaaagtgttgggattgtaggcatgagccactgcacccagccagactttcctgatttaaatgagagtactgcatcattccctacttcatggcccaaaacttaatcctgggccaaatgcaggagcatctctcgacctctgggcagattggtgggtgcccaggcactagtcacagccttccagcccagccatgattgttggatgccccatccctccaagagcaatttgggcatctactcaggcaggataaaattccctagagctgaggaagttcagcctctcccaggctacacagagagagatgatacaagcacctcagattgagatgcaggattggtccgcagaaggaggcattgttgaccaaccccagctataattgcttgtcaccagagattctgcatacccatttccagagatgttgcagcacaaagaggcaagactccttccaatgccaggccacccagatagcaagagagagaggctggtatacacattccttcagaactcattgaaaagcgctcataactcgtgattttaaggagtaagtttttgctgagtagctgaagtcagtgctcctttacttagctgcctctttggccttgtttcctgtggggttgggaggagggagatgtagtgtgaggtaggccttcccttggtctgtattcagcatagttgcctagatgctgctctgccttgtttgatggttgatcttaggaagctctaggttttactctgaggcctcaaaccctccccctatgcagtatagctgttgggtttttgtcctggacaaaggccacggctgttgtgctgcgcttcaggtttgtgaggctgcggagtggtacccccaccatgcacgcaagcacacacacacagatacttccctctccacccttttgggagctctttattttagaatgtaacttgaactcacttttatcattggcctttttcctcttactctgacttcctagcttagctctttccaaaaggaacttgaacttggccaagagaggtaaggaggctgagcagagcagtctttgctcattcctggttgttgccaccctcatttaaatggaagagagaaaacaggagcttcttggctgtttgccaaaatgaattgtccagggaacacagtgctctctgtaattaccctgcctttttctccaccccaacacaaaaatctggaaaggaaaataagtgggtaggattaagagctgttagaagctgaggaccaaaggacactgtgggtccattcatcaagggggagaccctcttcattagagtcctcatgaaattagccaaatgatgagtccttccctagctgggcatggtgggttctctttttttttttttttttttttttgttgttgttgttgagatggagtctcgctctgtcacccaggctggagtacagtggcatgatctcggctcactgcaacctccgcctcccaggttcaagcgattctcctacctcagcctcctgattagctgagattacaggcgcccaccaccacgcctggctaatttttgtatttttagtagagatggggtttcaccatgttgaccaggctgttctcaaactcctgacctcaggtgatctgctcaccttggcctcccaaagtgctgggattacaggcatgagccaccatgcctggccaggcactgtgggttctacaggatgggtctgtaatgtcacggtgagggctctctctagtagtagatctggagtgaggtgtgtcttgggttgaggaggtggcttgactttcgaatgtaaaactgactgtgccttagcatcaccctgtccagtgcccctggggcagctggtagtgtccagaagaatggacacctgctccagatttagatgcccatctgggcttttgtttgatttgcggcgttcctgtcttctgtaaagctagtgagttgtcccaagagactgatgccacagcttgttcgcagtttacacaaactcagctttaaaattccaaatagaatctgacttgcaaactctagctgcagcatgtggagcttctagatgtttactaccttgaatggttgtcagtgtcactgaaccacaggggagaggagtatggggtagagcaatggtctgggccaaggaatggtgagcttagggtcttcctctgactccttactcctcaaggaggcagttagggtccctcttaagcaggcttctatttcttaccactaaattggtttcctttttcatccagaagttagaactccccagatattcacactataggatctgaattccgagattctaaaatatcttaaaccacaagagagaaaatctagttctgcctcagccccagtcagcaggccatctgtcccttcctctcctctgagtcagacagctctggcaagcaaggctccttggctagttcctaatgcactgacaggagccctcccattaaggacgacttctactcaaaatgcgactctccctctgaacttcagatgcctctgttagcaggaaaaggcattgattggattggatatatttatgtgactgcgggcatttgtggctgtagaatccgtgaccgtaatgttatatgtaatgggaactatcttataaacttgaaaaaaataaagtttttattttct

SEQ ID NO: 131728 - DNA, 5692 bp, Homo sapiens
  Payload ID: 5711
  Gene Symbol: EYA4
  Gene Name: EYA transcriptional coactivator and phosphatase 4
  Uniprot ID: O95677
  ENST ID: ENST00000355167
  CDS Start-End: 459-2378
gcaaaacttccatcctgtccacgtgaagttgtcgctgccttagagagggggaaagagctgcgggaaaagccggggagtgacgactgcggcggctgggcgcgctctctcattttcttttcttctcctttcccccctgtcgcagtccggagttttggctcctctcctttcctcctccccctcggagccggcttctccctccgccccgcttctcccccgcttgtgtacgctatttgttgtggggtggccgaaggggatgtcctgttttcaccagaggcacagcgcgaaggggaaacttcgacactggaaggaacgagaataaatacttaattacggacgcactgaaccgcggctgggacagacacttcgggaacccgaggcggaccgggcgacgagatagtcatttttacttgaaggaagctgcttctacttgggagtggcaggagaagtgagaaaaccacatggaagactcccaggatttaaatgaacaatcagtaaagaaaacgtgcacagaatcagatgtttcacaatctcagaattccaggtctatggaaatgcaggacctagcaagtcctcatactcttgttggaggtggtgatactccaggtagctccaaactggaaaaatctaatctcagcagcacatcagttactacaaatgggacaggaggggaaaacatgactgttttaaacacagcagactggttgctgagttgcaacaccccctcttctgcaacaatgtctcttcttgcagtcaaaacagagcccttgaacagcagtgaaaccacagccacgactggagatggagcgcttgacacttttactgggtcagtaattacaagtagtggctacagccccagatcagcacatcagtattccccacagctgtatccttccaagccctatccacacattctttctacaccagcagctcaaacaatgtctgcctatgcaggccagactcagtattcggggatgcagcagccagccgtctacacagcctactcacagacaggacagccctacagcttgcccacttacgatttgggtgtgatgttgccagccatcaagacagagagtggactttcccaaactcagtccccattacagagtggctgcctcagttacagcccagggttctctaccccacagccaggccagacaccttattcttaccaaatgccaggttctagttttgcaccatcatctactatttatgcaaataattcagtttccaattcaacgaatttcagtggttcacaacaggattatccatcctatacagcctttggccaaaaccagtatgcacagtattattcagcatcaacgtatggagcgtatatgacatcgaataacacagccgatggcacaccctcttcaacctctacttatcagttgcaggaatctctcccaggactgactaaccaaccaggagagttcgataccatgcagagtccctccacacccatcaaagatcttgatgagagaacctgtaggagttctgggtcaaagtccagaggaagaggccggaaaaataatccctccccgcctcctgatagtgacctggagcgtgtgtttgtctgggatttggatgaaaccatcattgtttttcactcactgctcaccgggtcttatgcacagaagtatggcaaggatccccccatggctgtaacccttggactccgcatggaagaaatgatttttaatcttgctgatactcatttgttttttaatgatttagaggagtgtgatcaagttcatatagatgatgtttcctctgatgataatgggcaggacttaagtacctacagttttgcaactgatggcttccatgcagctgcaagtagtgcaaacctttgtttgccaacaggtgtaagaggaggggttgactggatgaggaagttggcttttcgttacagaagagtaaaagaattatataacacctacaagaacaacgttggaggactccttggccctgccaagagggatgcctggctacagttaagggcagagattgaaggtctgacagattcctggctaacaaatgcacttaagtctttatcaattattagcactaggagtaactgcataaatgtcttggtaacgacaactcaactgatcccagcacttgcgaaggttctactctatagtttaggaggtgctttccccattgagaatatttacagtgcaactaaaataggcaaggaaagctgttttgagcgtatagtgtccagatttggcactaacataacttatgttgtgattggagatggccgagatgaggagcatgccgctaaccagcacaacatgcccttctggaggatatccagtcactcagacctcctggctctccaccaagcactggaattagagtatttgtaactgtgttctttagccggagatccattttttatatttcaagtacactgaatttttatgtgtgattcaatgcctctggctctacacatataaattgtcttaatggatgaaatcatatttggaataaaaattccagaatgaagaattcagattgctgaatggagttaaactttagtgctacagaaaagaaactctatggtcttatatttacaacactttaatgggttttttaaaaatctgtggaggttgctggtacacaccaaatgagtccaaactggaatgagcagctttagcaaagaactcttaccctggcaaagcagcaacacacatgctccgtctgacaaggtggtcaacaacattcctcaaaatgggagatcttctcagccctgaggtttgaatctgactttagcctacctaacccagaaaatctgaattggaatgcactcagactgtataaggacagtcctatttagacatgtaatttgtgtaaattattgatgaaaataatttactgtgactttattagcagctgactttcaaagtggatgcaatttttctttcttttgttggggaggggaatgggaggggaaatgggaatataatattgtctcttttttaagtttggcaaacagaatgttcatactgatgtgttgtgccttaaagacaagacagcatttgtgtgttacaatgtaactttggttaaaatctctgtagataatgaaaaaaaacaaaaaaaaaaacctttgtgatgattcttaacatgaccaaatttaaaagtcaagctctcagagcttaattaccgcatcagcaagaaactgagtattttttgcaataagaaaacaacaataataaaggaaagcttgtgtttcatttgggttcttaataattccaataattgtatgaggcaactatttgcgcatccaaccatgagtggaaggtttgggaaagactgtgggacctttacttagaaagtgaaatgtatgtagaagtctcaagtaccccttctacagttttactggagaaaactaagagccatattcatgacaacttgcacagttttgaggttgagacttttgatatgtgtaagttgcatagaggaggatattatcatgcaaatcatgagcaattatcacataaacttttttagaatgtgccatgaacatggcataaaattcacattgagtgcacagggcttaaaataaagctaagtatgtttattcccaatgccatggcaaaaatgataatatcatcagaaatggaaggcagttctcccagatggtgtctaatgaaagcaatgagtctatgaaaattttacctagaatatcatcataaattaaattagcaagtgcgctggatcttggcagcgctgctgaaatgacaacagtaaaataatacctggttctccatctgaatacatcaatgcaggttctcctcgtaacagacttgcatatgtttgttagtttctgcctgtattgtcactgcgcaacggatggcattcattacaagaagagcccatcatcgttgtgtttgcatggtttttttccttgtgtgtagcccatgttgggaacacgatacaggttctcctcttatttcctatgacacgatttcccttgtggaaatttaagactttaagaactagagtatttttatggtgtctgcacctgcagttctgtgtttaaaatgtcataatgtggatcctggagtcaggctactagtcagtgcccctagccagaggctggttcatgagttcatcaactgaggcctctgtggcttcaataaagtctacattttgctcacagatcacaacattcactgtggaaatatgatttcatttctttaggctacaaacctgtatttctttactgaatgctaaggccatgtttatattgggtagaaagatattgagatcccaattttgtacaagattgtgatttcattatctaaaccttaaacttaatcctttaaattttgtagcttttggctgcatctgccccaagtactattccaggcaaattaaagttggaatacctttaataatataaaaataatgatagtaaatcttatacttctgttggcccttagcttgaaaatagcagttaaaaaaatttaaatgttgccttgattatcagtacttaattatgttgtgcactaaaaccttaaatatttattactgtgaataaaaacaaattatctttactgtatagctggtttctttaaatgttgatagaattgtggcattacatctaaatttgtaagtcttttcatatcaaacaagcaaggctttttatgctgctaagtctgtgggtgcagaaagaaacaccccttggaagggcaaagagaagccggctggttgcatcaccccgtgcagtttctcacacacatctctttttctgattctgtgttcagaagaggctgccggcataaaacctaaatgcaaggttgacggagaacagcttgtctggcacaacaatggtgcaggcccacgagccagcatcacagcttggccatgggacgttgagtatgcacaaactagaactcttcccttcccaccttaggaatagaaaatcctcttcctttctaatctgaaaaacgaaaactgaacaaacacaaaaccaaccccttggcagttcccacctcctattgacatatggaatattgtgccttattgtaaaccagtttgaaaaatgttctgtaactaaagtgggttttcggctattatgtatacagcttggtatattactacgaaagataaccaccttgtgttgcaccttaaaaatatcaagaccatgtaatttccataacaaaataggtggcctggctatggtattatagcatacaattaggacactatgcccctgcaaaattttgtaaatcaaattcagaggcaaaaacatattttagaatcatacagtttgcacacgacaagtaggtaataactgtctctaaaaatgttttctccttagtccgcaatgagctaagattcagaatagtgtcaacagcatgctcctatatgaagttgttttttttaaagcacatttgtttatgacaagcctacattctcagtgaatatggcatttagtatttcttttgaaaacaaacttaagcatcatgagccaaagttgcactttgactcccaactacggtagcattatggacatctcacaatgtcaagggtttctgttatgtattagtaaagtatagattattggggcctacataatttaaaagaaatgtaaattaatattaaaagcttgtaaaaatatgtatatctttactatttctcaataaatacctttgcaattgttttcatttccttc

SEQ ID NO: 131729 - DNA, 4317 bp, Homo sapiens
  Payload ID: 5711
  Gene Symbol: EYA4
  Gene Name: EYA transcriptional coactivator and phosphatase 4
  Uniprot ID: O95677
  ENST ID: ENST00000355286
  CDS Start-End: 398-2248
gggaaaagccggggagtgacgactgcggcggctgggcgcgctctctcattttcttttcttctcctttcccccctgtcgcagtccggagttttggctcctctcctttcctcctccccctcggagccggcttctccctccgccccgcttctcccccgcttgtgtacgctatttgttgtggggtggccgaaggggatgtcctgttttcaccagaggcacagcgcgaaggggaaacttcgacactggaaggaacgagaataaatacttaattacggacgcactgaaccgcggctgggacagacacttcgggaacccgaggcggaccgggcgacgagatagtcatttttacttgaaggaagctgcttctacttgggagtggcaggagaagtgagaaaaccacatggaagactcccaggatttaaatgaacaatcagtaaagaaaacgtgcacagaatcagatgtttcacaatctcagaattccaggtctatggaaatgcaggacctagcaagtcctcatactcttgttggaggtggtgatactccaggtagctccaaactggaaaaatctaatctcagcagcacatcagttactacaaatgggacaggagtgtctcttcttgcagtcaaaacagagcccttgaacagcagtgaaaccacagccacgactggagatggagcgcttgacacttttactgggtcagtaattacaagtagtggctacagccccagatcagcacatcagtattccccacagctgtatccttccaagccctatccacacattctttctacaccagcagctcaaacaatgtctgcctatgcaggccagactcagtattcggggatgcagcagccagccgtctacacagcctactcacagacaggacagccctacagcttgcccacttacgatttgggtgtgatgttgccagccatcaagacagagagtggactttcccaaactcagtccccattacagagtggctgcctcagttacagcccagggttctctaccccacagccaggccagacaccttattcttaccaaatgccaggttctagttttgcaccatcatctactatttatgcaaataattcagtttccaattcaacgaatttcagtggttcacaacaggattatccatcctatacagcctttggccaaaaccagtatgcacagtattattcagcatcaacgtatggagcgtatatgacatcgaataacacagccgatggcacaccctcttcaacctctacttatcagttgcaggaatctctcccaggactgactaaccaaccaggagagttcgataccatgcagagtccctccacacccatcaaagatcttgatgagagaacctgtaggagttctgggtcaaagtccagaggaagaggccggaaaaataatccctccccgcctcctgatagtgacctggagcgtgtgtttgtctgggatttggatgaaaccatcattgtttttcactcactgctcaccgggtcttatgcacagaagtatggcaaggatccccccatggctgtaacccttggactccgcatggaagaaatgatttttaatcttgctgatactcatttgttttttaatgatttagaggagtgtgatcaagttcatatagatgatgtttcctctgatgataatgggcaggacttaagtacctacagttttgcaactgatggcttccatgcagctgcaagtagtgcaaacctttgtttgccaacaggtgtaagaggaggggttgactggatgaggaagttggcttttcgttacagaagagtaaaagaattatataacacctacaagaacaacgttggaggactccttggccctgccaagagggatgcctggctacagttaagggcagagattgaaggtctgacagattcctggctaacaaatgcacttaagtctttatcaattattagcactaggagtaactgcataaatgtcttggtaacgacaactcaactgatcccagcacttgcgaaggttctactctatagtttaggaggtgctttccccattgagaatatttacagtgcaactaaaataggaaaagaaagttgctttgaacgaataatgcaaaggtttggcagaaaagtagtgtatgttgtaattggggatggtgtagaagaagaacaggcagcaaaaaagcacaacatgcccttctggaggatatccagtcactcagacctcctggctctccaccaagcactggaattagagtatttgtaactgtgttctttagccggagatccattttttatatttcaagtacactgaatttttatgtgtgattcaatgcctctggctctacacatataaattgtcttaatggatgaaatcatatttggaataaaaattccagaatgaagaattcagattgctgaatggagttaaactttagtgctacagaaaagaaactctatggtcttatatttacaacactttaatgggttttttaaaaatctgtggaggttgctggtacacaccaaatgagtccaaactggaatgagcagctttagcaaagaactcttaccctggcaaagcagcaacacacatgctccgtctgacaaggtggtcaacaacattcctcaaaatgggagatcttctcagccctgaggtttgaatctgactttagcctacctaacccagaaaatctgaattggaatgcactcagactgtataaggacagtcctatttagacatgtaatttgtgtaaattattgatgaaaataatttactgtgactttattagcagctgactttcaaagtggatgcaatttttctttcttttgttggggaggggaatgggaggggaaatgggaatataatattgtctcttttttaagtttggcaaacagaatgttcatactgatgtgttgtgccttaaagacaagacagcatttgtgtgttacaatgtaactttggttaaaatctctgtagataatgaaaaaaaacaaaaaaaaaaacctttgtgatgattcttaacatgaccaaatttaaaagtcaagctctcagagcttaattaccgcatcagcaagaaactgagtattttttgcaataagaaaacaacaataataaaggaaagcttgtgtttcatttgggttcttaataattccaataattgtatgaggcaactatttgcgcatccaaccatgagtggaaggtttgggaaagactgtgggacctttacttagaaagtgaaatgtatgtagaagtctcaagtaccccttctacagttttactggagaaaactaagagccatattcatgacaacttgcacagttttgaggttgagacttttgatatgtgtaagttgcatagaggaggatattatcatgcaaatcatgagcaattatcacataaacttttttagaatgtgccatgaacatggcataaaattcacattgagtgcacagggcttaaaataaagctaagtatgtttattcccaatgccatggcaaaaatgataatatcatcagaaatggaaggcagttctcccagatggtgtctaatgaaagcaatgagtctatgaaaattttacctagaatatcatcataaattaaattagcaagtgcgctggatcttggcagcgctgctgaaatgacaacagtaaaataatacctggttctccatctgaatacatcaatgcaggttctcctcgtaacagacttgcatatgtttgttagtttctgcctgtattgtcactgcgcaacggatggcattcattacaagaagagcccatcatcgttgtgtttgcatggtttttttccttgtgtgtagcccatgttgggaacacgatacaggttctcctcttatttcctatgacacgatttcccttgtggaaatttaagactttaagaactagagtatttttatggtgtctgcacctgcagttctgtgtttaaaatgtcataatgtggatcctggagtcaggctactagtcagtgcccctagccagaggctggttcatgagttcatcaactgaggcctctgtggcttcaataaagtctacattttgctcacagatcacaacattcactgtggaaatatgatttcatttctttaggctacaaacctgtatttctttactgaatgctaaggccatgtttatattgggtagaaagatattgagatcccaattttgtacaagattgtgatttcattatctaaaccttaaacttaatcctttaaattttgtagcttttggctgcatctgccccaagtactattccaggcaaattaaagttggaatacctttaataatataaaaataatgatagtaaatcttatacttctgt

SEQ ID NO: 131730 - DNA, 5699 bp, Homo sapiens
  Payload ID: 5711
  Gene Symbol: EYA4
  Gene Name: EYA transcriptional coactivator and phosphatase 4
  Uniprot ID: O95677
  ENST ID: ENST00000367895
  CDS Start-End: 465-2384
ttccgcgcaaaacttccatcctgtccacgtgaagttgtcgctgccttagagagggggaaagagctgcgggaaaagccggggagtgacgactgcggcggctgggcgcgctctctcattttcttttcttctcctttcccccctgtcgcagtccggagttttggctcctctcctttcctcctccccctcggagccggcttctccctccgccccgcttctcccccgcttgtgtacgctatttgttgtggggtggccgaaggggatgtcctgttttcaccagaggcacagcgcgaaggggaaacttcgacactggaaggaacgagaataaatacttaattacggacgcactgaaccgcggctgggacagacacttcgggaacccgaggcggaccgggcgacgagatagtcatttttacttgaaggaagctgcttctacttgggagtggcaggagaagtgagaaaaccacatggaagactcccaggatttaaatgaacaatcagtaaagaaaacgtgcacagaatcagatgtttcacaatctcagaattccaggtctatggaaatgcaggacctagcaagtcctcatactcttgttggaggtggtgatactccaggtagctccaaactggaaaaatctaatctcagcagcacatcagttactacaaatgggacaggaggggaaaacatgactgttttaaacacagcagactggttgctgagttgcaacaccccctcttctgcaacaatgtctcttcttgcagtcaaaacagagcccttgaacagcagtgaaaccacagccacgactggagatggagcgcttgacacttttactgggtcagtaattacaagtagtggctacagccccagatcagcacatcagtattccccacagctgtatccttccaagccctatccacacattctttctacaccagcagctcaaacaatgtctgcctatgcaggccagactcagtattcggggatgcagcagccagccgtctacacagcctactcacagacaggacagccctacagcttgcccacttacgatttgggtgtgatgttgccagccatcaagacagagagtggactttcccaaactcagtccccattacagagtggctgcctcagttacagcccagggttctctaccccacagccaggccagacaccttattcttaccaaatgccaggttctagttttgcaccatcatctactatttatgcaaataattcagtttccaattcaacgaatttcagtggttcacaacaggattatccatcctatacagcctttggccaaaaccagtatgcacagtattattcagcatcaacgtatggagcgtatatgacatcgaataacacagccgatggcacaccctcttcaacctctacttatcagttgcaggaatctctcccaggactgactaaccaaccaggagagttcgataccatgcagagtccctccacacccatcaaagatcttgatgagagaacctgtaggagttctgggtcaaagtccagaggaagaggccggaaaaataatccctccccgcctcctgatagtgacctggagcgtgtgtttgtctgggatttggatgaaaccatcattgtttttcactcactgctcaccgggtcttatgcacagaagtatggcaaggatccccccatggctgtaacccttggactccgcatggaagaaatgatttttaatcttgctgatactcatttgttttttaatgatttagaggagtgtgatcaagttcatatagatgatgtttcctctgatgataatgggcaggacttaagtacctacagttttgcaactgatggcttccatgcagctgcaagtagtgcaaacctttgtttgccaacaggtgtaagaggaggggttgactggatgaggaagttggcttttcgttacagaagagtaaaagaattatataacacctacaagaacaacgttggaggactccttggccctgccaagagggatgcctggctacagttaagggcagagattgaaggtctgacagattcctggctaacaaatgcacttaagtctttatcaattattagcactaggagtaactgcataaatgtcttggtaacgacaactcaactgatcccagcacttgcgaaggttctactctatagtttaggaggtgctttccccattgagaatatttacagtgcaactaaaataggaaaagaaagttgctttgaacgaataatgcaaaggtttggcagaaaagtagtgtatgttgtaattggggatggtgtagaagaagaacaggcagcaaaaaagcacaacatgcccttctggaggatatccagtcactcagacctcctggctctccaccaagcactggaattagagtatttgtaactgtgttctttagccggagatccattttttatatttcaagtacactgaatttttatgtgtgattcaatgcctctggctctacacatataaattgtcttaatggatgaaatcatatttggaataaaaattccagaatgaagaattcagattgctgaatggagttaaactttagtgctacagaaaagaaactctatggtcttatatttacaacactttaatgggttttttaaaaatctgtggaggttgctggtacacaccaaatgagtccaaactggaatgagcagctttagcaaagaactcttaccctggcaaagcagcaacacacatgctccgtctgacaaggtggtcaacaacattcctcaaaatgggagatcttctcagccctgaggtttgaatctgactttagcctacctaacccagaaaatctgaattggaatgcactcagactgtataaggacagtcctatttagacatgtaatttgtgtaaattattgatgaaaataatttactgtgactttattagcagctgactttcaaagtggatgcaatttttctttcttttgttggggaggggaatgggaggggaaatgggaatataatattgtctcttttttaagtttggcaaacagaatgttcatactgatgtgttgtgccttaaagacaagacagcatttgtgtgttacaatgtaactttggttaaaatctctgtagataatgaaaaaaaacaaaaaaaaaaacctttgtgatgattcttaacatgaccaaatttaaaagtcaagctctcagagcttaattaccgcatcagcaagaaactgagtattttttgcaataagaaaacaacaataataaaggaaagcttgtgtttcatttgggttcttaataattccaataattgtatgaggcaactatttgcgcatccaaccatgagtggaaggtttgggaaagactgtgggacctttacttagaaagtgaaatgtatgtagaagtctcaagtaccccttctacagttttactggagaaaactaagagccatattcatgacaacttgcacagttttgaggttgagacttttgatatgtgtaagttgcatagaggaggatattatcatgcaaatcatgagcaattatcacataaacttttttagaatgtgccatgaacatggcataaaattcacattgagtgcacagggcttaaaataaagctaagtatgtttattcccaatgccatggcaaaaatgataatatcatcagaaatggaaggcagttctcccagatggtgtctaatgaaagcaatgagtctatgaaaattttacctagaatatcatcataaattaaattagcaagtgcgctggatcttggcagcgctgctgaaatgacaacagtaaaataatacctggttctccatctgaatacatcaatgcaggttctcctcgtaacagacttgcatatgtttgttagtttctgcctgtattgtcactgcgcaacggatggcattcattacaagaagagcccatcatcgttgtgtttgcatggtttttttccttgtgtgtagcccatgttgggaacacgatacaggttctcctcttatttcctatgacacgatttcccttgtggaaatttaagactttaagaactagagtatttttatggtgtctgcacctgcagttctgtgtttaaaatgtcataatgtggatcctggagtcaggctactagtcagtgcccctagccagaggctggttcatgagttcatcaactgaggcctctgtggcttcaataaagtctacattttgctcacagatcacaacattcactgtggaaatatgatttcatttctttaggctacaaacctgtatttctttactgaatgctaaggccatgtttatattgggtagaaagatattgagatcccaattttgtacaagattgtgatttcattatctaaaccttaaacttaatcctttaaattttgtagcttttggctgcatctgccccaagtactattccaggcaaattaaagttggaatacctttaataatataaaaataatgatagtaaatcttatacttctgttggcccttagcttgaaaatagcagttaaaaaaatttaaatgttgccttgattatcagtacttaattatgttgtgcactaaaaccttaaatatttattactgtgaataaaaacaaattatctttactgtatagctggtttctttaaatgttgatagaattgtggcattacatctaaatttgtaagtcttttcatatcaaacaagcaaggctttttatgctgctaagtctgtgggtgcagaaagaaacaccccttggaagggcaaagagaagccggctggttgcatcaccccgtgcagtttctcacacacatctctttttctgattctgtgttcagaagaggctgccggcataaaacctaaatgcaaggttgacggagaacagcttgtctggcacaacaatggtgcaggcccacgagccagcatcacagcttggccatgggacgttgagtatgcacaaactagaactcttcccttcccaccttaggaatagaaaatcctcttcctttctaatctgaaaaacgaaaactgaacaaacacaaaaccaaccccttggcagttcccacctcctattgacatatggaatattgtgccttattgtaaaccagtttgaaaaatgttctgtaactaaagtgggttttcggctattatgtatacagcttggtatattactacgaaagataaccaccttgtgttgcaccttaaaaatatcaagaccatgtaatttccataacaaaataggtggcctggctatggtattatagcatacaattaggacactatgcccctgcaaaattttgtaaatcaaattcagaggcaaaaacatattttagaatcatacagtttgcacacgacaagtaggtaataactgtctctaaaaatgttttctccttagtccgcaatgagctaagattcagaatagtgtcaacagcatgctcctatatgaagttgttttttttaaagcacatttgtttatgacaagcctacattctcagtgaatatggcatttagtatttcttttgaaaacaaacttaagcatcatgagccaaagttgcactttgactcccaactacggtagcattatggacatctcacaatgtcaagggtttctgttatgtattagtaaagtatagattattggggcctacataatttaaaagaaatgtaaattaatattaaaagcttgtaaaaatatgtatatctttactatttctcaataaatacctttgcaattgttttcatttccttca

SEQ ID NO: 131731 - DNA, 2364 bp, Homo sapiens
  Payload ID: 5711
  Gene Symbol: EYA4
  Gene Name: EYA transcriptional coactivator and phosphatase 4
  ENST ID: ENST00000430974
  CDS Start-End: 465-2177
ttccgcgcaaaacttccatcctgtccacgtgaagttgtcgctgccttagagagggggaaagagctgcgggaaaagccggggagtgacgactgcggcggctgggcgcgctctctcattttcttttcttctcctttcccccctgtcgcagtccggagttttggctcctctcctttcctcctccccctcggagccggcttctccctccgccccgcttctcccccgcttgtgtacgctatttgttgtggggtggccgaaggggatgtcctgttttcaccagaggcacagcgcgaaggggaaacttcgacactggaaggaacgagaataaatacttaattacggacgcactgaaccgcggctgggacagacacttcgggaacccgaggcggaccgggcgacgagatagtcatttttacttgaaggaagctgcttctacttgggagtggcaggagaagtgagaaaaccacatggaagactcccaggatttaaatgaacaatcagtaaagaaaacgtgcacagaatcagatgtttcacaatctcagaattccaggtctatggaaatgcaggacctagcaagtcctcatactcttgttggaggtggtgatactccaggtagctccaaactggaaaaatctaatctcagcagcacatcagttactacaaatgggacaggagtaattacaagtagtggctacagccccagatcagcacatcagtattccccacagctgtatccttccaagccctatccacacattctttctacaccagcagctcaaacaatgtctgcctatgcaggccagactcagtattcggggatgcagcagccagccgtctacacagcctactcacagacaggacagccctacagcttgcccacttacgatttgggtgtgatgttgccagccatcaagacagagagtggactttcccaaactcagtccccattacagagtggctgcctcagttacagcccagggttctctaccccacagccaggccagacaccttattcttaccaaatgccaggttctagttttgcaccatcatctactatttatgcaaataattcagtttccaattcaacgaatttcagtggttcacaacaggattatccatcctatacagcctttggccaaaaccagtatgcacagtattattcagcatcaacgtatggagcgtatatgacatcgaataacacagccgatggcacaccctcttcaacctctacttatcagttgcaggaatctctcccaggactgactaaccaaccaggtacagatcttcacccaggagagttcgataccatgcagagtccctccacacccatcaaagatcttgatgagagaacctgtaggagttctgggtcaaagtccagaggaagaggccggaaaaataatccctccccgcctcctgatagtgacctggagcgtgtgtttgtctgggatttggatgaaaccatcattgtttttcactcactgctcaccgggtcttatgcacagaagtatggcaaggatccccccatggctgtaacccttggactccgcatggaagaaatgatttttaatcttgctgatactcatttgttttttaatgatttagaggagtgtgatcaagttcatatagatgatgtttcctctgatgataatgggcaggacttaagtacctacagttttgcaactgatggcttccatgcagctgcaagtagtgcaaacctttgtttgccaacaggtgtaagaggaggggttgactggatgaggaagttggcttttcgttacagaagagtaaaagaattatataacacctacaagaacaacgttggaggactccttggccctgccaagagggatgcctggctacagttaagggcagagattgaaggtctgacagattcctggctaacaaatgcacttaagtctttatcaattattagcactaggagtaactgcataaatgtcttggtaacgacaactcaactgatcccagcacttgcgaaggttctactctatagtttaggaggtgctttccccattgagaatatttacagtgcaactaaaataggcaaggaaagctgttttgagcgtatagtgtccagatttggcactaacataacttatgttgtgattggagatggccgagatgaggagcatgccgctaaccagaagaggctgccggcataaaacctaaatgcaaggttgacggagaacagcttgtctggcacaacaatggtgcaggcccacgagccagcatcacagcttggccatgggacgttgagtatgcacaaactagaactcttcccttcccaccttaggaatagaaaatcctcttcctttctaatctgaaaaacgaaaactgaacaaacacaaa

SEQ ID NO: 131732 - DNA, 2411 bp, Homo sapiens
  Payload ID: 5711
  Gene Symbol: EYA4
  Gene Name: EYA transcriptional coactivator and phosphatase 4
  Uniprot ID: O95677
  ENST ID: ENST00000452339
  CDS Start-End: 557-2314
gttgctgcctgacctttgggcgtctgggacggatgcctatacctgcacccagcagcactggaaggggcccaggcccttcgcagcacagcctatccccagaccgcttagtccttcataacatatatctccacggaaaagggtatttcctcccgtcagaaaaagcgccccagtctggtctgggttggtttttatttcacgttgttgcaagtaggcgaagtcccttctgtctcctcccttgggtccggagttttggctcctctcctttcctcctccccctcggagccggcttctccctccgccccgcttctcccccgcttgtgtacgctatttgttgtggggtggccgaaggggatgtcctgttttcaccagaggcacagcgcgaaggggaaacttcgacactggaaggaacgagaataaatacttaattacggacgcactgaaccgcggctgggacagacacttcgggaacccgaggcggaccgggcgacgagatagtcatttttacttgaaggaagctgcttctacttgggagtggcaggagaagtgagaaaaccacatggaagactcccaggatttaaatgaacaatcagtaaagaaaacgtgcacagaatcagatgtttcacaatctcagaattccaggtctatggaaatgcaggacctagcaagtcctcatactcttgttggaggtggtgatactccaggtagctccaaactggaaaaatctaatctcagcagcacatcagttactacaaatgggacaggagtaattacaagtagtggctacagccccagatcagcacatcagtattccccacagctgtatccttccaagccctatccacacattctttctacaccagcagctcaaacaatgtctgcctatgcaggccagactcagtattcggggatgcagcagccagccgtctacacagcctactcacagacaggacagccctacagcttgcccacttacgatttgggtgtgatgttgccagccatcaagacagagagtggactttcccaaactcagtccccattacagagtggctgcctcagttacagcccagggttctctaccccacagccaggccagacaccttattcttaccaaatgccaggttctagttttgcaccatcatctactatttatgcaaataattcagtttccaattcaacgaatttcagtggttcacaacaggattatccatcctatacagcctttggccaaaaccagtatgcacagtattattcagcatcaacgtatggagcgtatatgacatcgaataacacagccgatggcacaccctcttcaacctctacttatcagttgcaggaatctctcccaggactgactaaccaaccaggagagttcgataccatgcagagtccctccacacccatcaaagatcttgatgagagaacctgtaggagttctgggtcaaagtccagaggaagaggccggaaaaataatccctccccgcctcctgatagtgacctggagcgtgtgtttgtctgggatttggatgaaaccatcattgtttttcactcactgctcaccgggtcttatgcacagaagtatggcaaggatccccccatggctgtaacccttggactccgcatggaagaaatgatttttaatcttgctgatactcatttgttttttaatgatttagaggagtgtgatcaagttcatatagatgatgtttcctctgatgataatgggcaggacttaagtacctacagttttgcaactgatggcttccatgcagctgcaagtagtgcaaacctttgtttgccaacaggtgtaagaggaggggttgactggatgaggaagttggcttttcgttacagaagagtaaaagaattatataacacctacaagaacaacgttggaggactccttggccctgccaagagggatgcctggctacagttaagggcagagattgaaggtctgacagattcctggctaacaaatgcacttaagtctttatcaattattagcactaggagtaactgcataaatgtcttggtaacgacaactcaactgatcccagcacttgcgaaggttctactctatagtttaggaggtgctttccccattgagaatatttacagtgcaactaaaataggcaaggaaagctgttttgagcgtatagtgtccagatttggcactaacataacttatgttgtgattggagatggccgagatgaggagcatgccgctaaccagcacaacatgcccttctggaggatatccagtcactcagacctcctggctctccaccaagcactggaattagagtatttgtaactgtgttctttagccggagatccattttttatatttcaagtacactgaatttttatgtgtgattcaatgcctctggctctacacatataaattgtct

SEQ ID NO: 131733 - DNA, 2154 bp, Homo sapiens
  Payload ID: 5711
  Gene Symbol: EYA4
  Gene Name: EYA transcriptional coactivator and phosphatase 4
  Uniprot ID: O95677
  ENST ID: ENST00000431403
  CDS Start-End: 1-1920
atggaagactcccaggatttaaatgaacaatcagtaaagaaaacgtgcacagaatcagatgtttcacaatctcagaattccaggtctatggaaatgcaggacctagcaagtcctcatactcttgttggaggtggtgatactccaggtagctccaaactggaaaaatctaatctcagcagcacatcagttactacaaatgggacaggaggggaaaacatgactgttttaaacacagcagactggttgctgagttgcaacaccccctcttctgcaacaatgtctcttcttgcagtcaaaacagagcccttgaacagcagtgaaaccacagccacgactggagatggagcgcttgacacttttactgggtcagtaattacaagtagtggctacagccccagatcagcacatcagtattccccacagctgtatccttccaagccctatccacacattctttctacaccagcagctcaaacaatgtctgcctatgcaggccagactcagtattcggggatgcagcagccagccgtctacacagcctactcacagacaggacagccctacagcttgcccacttacgatttgggtgtgatgttgccagccatcaagacagagagtggactttcccaaactcagtccccattacagagtggctgcctcagttacagcccagggttctctaccccacagccaggccagacaccttattcttaccaaatgccaggttctagttttgcaccatcatctactatttatgcaaataattcagtttccaattcaacgaatttcagtggttcacaacaggattatccatcctatacagcctttggccaaaaccagtatgcacagtattattcagcatcaacgtatggagcgtatatgacatcgaataacacagccgatggcacaccctcttcaacctctacttatcagttgcaggaatctctcccaggactgactaaccaaccaggagagttcgataccatgcagagtccctccacacccatcaaagatcttgatgagagaacctgtaggagttctgggtcaaagtccagaggaagaggccggaaaaataatccctccccgcctcctgatagtgacctggagcgtgtgtttgtctgggatttggatgaaaccatcattgtttttcactcactgctcaccgggtcttatgcacagaagtatggcaaggatccccccatggctgtaacccttggactccgcatggaagaaatgatttttaatcttgctgatactcatttgttttttaatgatttagaggagtgtgatcaagttcatatagatgatgtttcctctgatgataatgggcaggacttaagtacctacagttttgcaactgatggcttccatgcagctgcaagtagtgcaaacctttgtttgccaacaggtgtaagaggaggggttgactggatgaggaagttggcttttcgttacagaagagtaaaagaattatataacacctacaagaacaacgttggaggactccttggccctgccaagagggatgcctggctacagttaagggcagagattgaaggtctgacagattcctggctaacaaatgcacttaagtctttatcaattattagcactaggagtaactgcataaatgtcttggtaacgacaactcaactgatcccagcacttgcgaaggttctactctatagtttaggaggtgctttccccattgagaatatttacagtgcaactaaaataggcaaggaaagctgttttgagcgtatagtgtccagatttggcactaacataacttatgttgtgattggagatggccgagatgaggagcatgccgctaaccagcacaacatgcccttctggaggatatccagtcactcagacctcctggctctccaccaagcactggaattagagtatttgtaactgtgttctttagccggagatccattttttatatttcaagtacactgaatttttatgtgtgattcaatgcctctggctctacacatataaattgtcttaatggatgaaatcatatttggaataaaaattccagaatgaagaattcagattgctgaatggagttaaactttagtgctacagaaaagaaactctatggtcttatatttacaacactttaatgggttttttaaaaat

SEQ ID NO: 131734 - DNA, 2892 bp, Homo sapiens
  Payload ID: 5711
  Gene Symbol: EYA4
  Gene Name: EYA transcriptional coactivator and phosphatase 4
  ENST ID: ENST00000531901
  CDS Start-End: 230-2167
tttgttgtggggtggccgaaggggatgtcctgttttcaccagaggcacagcgcgaaggggaaacttcgacactggaaggaacgagaataaatacttaattacggacgcactgaaccgcggctgggacagacacttcgggaacccgaggcggaccgggcgacgagatagtcatttttacttgaaggaagctgcttctacttgggagtggcaggagaagtgagaaaaccacatggaagactcccaggatttaaatgaacaatcagtaaagaaaacgtgcacagaatcagatgtttcacaatctcagaattccaggtctatggaaatgcaggacctagcaagtcctcatactcttgttggaggtggtgatactccaggtagctccaaactggaaaaatctaatctcagcagcacatcagttactacaaatgggacaggaggggaaaacatgactgttttaaacacagcagactggttgctgagttgcaacaccccctcttctgcaacaatgtctcttcttgcagtcaaaacagagcccttgaacagcagtgaaaccacagccacgactggagatggagcgcttgacacttttactgggtcagtaattacaagtagtggctacagccccagatcagcacatcagtattccccacagctgtatccttccaagccctatccacacattctttctacaccagcagctcaaacaatgtctgcctatgcaggccagactcagtattcggggatgcagcagccagccgtctacacagcctactcacagacaggacagccctacagcttgcccacttacgatttgggtgtgatgttgccagccatcaagacagagagtggactttcccaaactcagtccccattacagagtggctgcctcagttacagcccagggttctctaccccacagccaggccagacaccttattcttaccaaatgccaggttctagttttgcaccatcatctactatttatgcaaataattcagtttccaattcaacgaatttcagtggttcacaacaggattatccatcctatacagcctttggccaaaaccagtatgcacagtattattcagcatcaacgtatggagcgtatatgacatcgaataacacagccgatggcacaccctcttcaacctctacttatcagttgcaggaatctctcccaggactgactaaccaaccaggtacagatcttcacccaggagagttcgataccatgcagagtccctccacacccatcaaagatcttgatgagagaacctgtaggagttctgggtcaaagtccagaggaagaggccggaaaaataatccctccccgcctcctgatagtgacctggagcgtgtgtttgtctgggatttggatgaaaccatcattgtttttcactcactgctcaccgggtcttatgcacagaagtatggcaaggatccccccatggctgtaacccttggactccgcatggaagaaatgatttttaatcttgctgatactcatttgttttttaatgatttagaggagtgtgatcaagttcatatagatgatgtttcctctgatgataatgggcaggacttaagtacctacagttttgcaactgatggcttccatgcagctgcaagtagtgcaaacctttgtttgccaacaggtgtaagaggaggggttgactggatgaggaagttggcttttcgttacagaagagtaaaagaattatataacacctacaagaacaacgttggaggactccttggccctgccaagagggatgcctggctacagttaagggcagagattgaaggtctgacagattcctggctaacaaatgcacttaagtctttatcaattattagcactaggagtaactgcataaatgtcttggtaacgacaactcaactgatcccagcacttgcgaaggttctactctatagtttaggaggtgctttccccattgagaatatttacagtgcaactaaaataggaaaagaaagttgctttgaacgaataatgcaaaggtttggcagaaaagtagtgtatgttgtaattggggatggtgtagaagaagaacaggcagcaaaaaagcacaacatgcccttctggaggatatccagtcactcagacctcctggctctccaccaagcactggaattagagtatttgtaactgtgttctttagccggagatccattttttatatttcaagtacactgaatttttatgtgtgattcaatgcctctggctctacacatataaattgtcttaatggatgaaatcatatttggaataaaaattccagaatgaagaattcagattgctgaatggagttaaactttagtgctacagaaaagaaactctatggtcttatatttacaacactttaatgggttttttaaaaatctgtggaggttgctggtacacaccaaatgagtccaaactggaatgagcagctttagcaaagaactcttaccctggcaaagcagcaacacacatgctccgtctgacaaggtggtcaacaacattcctcaaaatgggagatcttctcagccctgaggtttgaatctgactttagcctacctaacccagaaaatctgaattggaatgcactcagactgtataaggacagtcctatttagacatgtaatttgtgtaaattattgatgaaaataatttactgtgactttattagcagctgactttcaaagtggatgcaatttttctttcttttgttggggaggggaatgggaggggaaatgggaatataatattgtctcttttttaagtttggcaaacagaatgttcatactgatgtgttgtgccttaaagacaagacagcatttgtgtgttacaatgtaactttggttaaaatctctgtagataatgaaaaaaaa

SEQ ID NO: 131735 - DNA, 3456 bp, Homo sapiens
  Payload ID: 5711
  Gene Symbol: EYA4
  Gene Name: EYA transcriptional coactivator and phosphatase 4
  ENST ID: ENST00000525849
  CDS Start-End: 185-2035
cacagcgcgaaggggaaacttcgacactggaaggaacgagaataaatacttaattacggacgcactgaaccgcggctgggacagacacttcgggaacccgaggcggaccgggcgacgagatagtcatttttacttgaaggaagctgcttctacttgggagtggcaggagaagtgagaaaaccacatggaagactcccaggatttaaatgaacaatcagtaaagaaaacgtgcacagaatcagatgtttcacaatctcagaattccaggtctatggaaatgcaggacctagcaagtcctcatactcttgttggaggtggtgatactccaggtagctccaaactggaaaaatctaatctcagcagcacatcagttactacaaatgggacaggagtgtctcttcttgcagtcaaaacagagcccttgaacagcagtgaaaccacagccacgactggagatggagcgcttgacacttttactgggtcagtaattacaagtagtggctacagccccagatcagcacatcagtattccccacagctgtatccttccaagccctatccacacattctttctacaccagcagctcaaacaatgtctgcctatgcaggccagactcagtattcggggatgcagcagccagccgtctacacagcctactcacagacaggacagccctacagcttgcccacttacgatttgggtgtgatgttgccagccatcaagacagagagtggactttcccaaactcagtccccattacagagtggctgcctcagttacagcccagggttctctaccccacagccaggccagacaccttattcttaccaaatgccaggttctagttttgcaccatcatctactatttatgcaaataattcagtttccaattcaacgaatttcagtggttcacaacaggattatccatcctatacagcctttggccaaaaccagtatgcacagtattattcagcatcaacgtatggagcgtatatgacatcgaataacacagccgatggcacaccctcttcaacctctacttatcagttgcaggaatctctcccaggactgactaaccaaccaggagagttcgataccatgcagagtccctccacacccatcaaagatcttgatgagagaacctgtaggagttctgggtcaaagtccagaggaagaggccggaaaaataatccctccccgcctcctgatagtgacctggagcgtgtgtttgtctgggatttggatgaaaccatcattgtttttcactcactgctcaccgggtcttatgcacagaagtatggcaaggatccccccatggctgtaacccttggactccgcatggaagaaatgatttttaatcttgctgatactcatttgttttttaatgatttagaggagtgtgatcaagttcatatagatgatgtttcctctgatgataatgggcaggacttaagtacctacagttttgcaactgatggcttccatgcagctgcaagtagtgcaaacctttgtttgccaacaggtgtaagaggaggggttgactggatgaggaagttggcttttcgttacagaagagtaaaagaattatataacacctacaagaacaacgttggaggactccttggccctgccaagagggatgcctggctacagttaagggcagagattgaaggtctgacagattcctggctaacaaatgcacttaagtctttatcaattattagcactaggagtaactgcataaatgtcttggtaacgacaactcaactgatcccagcacttgcgaaggttctactctatagtttaggaggtgctttccccattgagaatatttacagtgcaactaaaataggcaaggaaagctgttttgagcgtatagtgtccagatttggcactaacataacttatgttgtgattggagatggccgagatgaggagcatgccgctaaccagcacaacatgcccttctggaggatatccagtcactcagacctcctggctctccaccaagcactggaattagagtatttgtaactgtgttctttagccggagatccattttttatatttcaagtacactgaatttttatgtgtgattcaatgcctctggctctacacatataaattgtcttaatggatgaaatcatatttggaataaaaattccagaatgaagaattcagattgctgaatggagttaaactttagtgctacagaaaagaaactctatggtcttatatttacaacactttaatgggttttttaaaaatctgtggaggttgctggtacacaccaaatgagtccaaactggaatgagcagctttagcaaagaactcttaccctggcaaagcagcaacacacatgctccgtctgacaaggtggtcaacaacattcctcaaaatgggagatcttctcagccctgaggtttgaatctgactttagcctacctaacccagaaaatctgaattggaatgcactcagactgtataaggacagtcctatttagacatgtaatttgtgtaaattattgatgaaaataatttactgtgactttattagcagctgactttcaaagtggatgcaatttttctttcttttgttggggaggggaatgggaggggaaatgggaatataatattgtctcttttttaagtttggcaaacagaatgttcatactgatgtgttgtgccttaaagacaagacagcatttgtgtgttacaatgtaactttggttaaaatctctgtagataatgaaaaaaaacaaaaaaaaaaacctttgtgatgattcttaacatgaccaaatttaaaagtcaagctctcagagcttaattaccgcatcagcaagaaactgagtattttttgcaataagaaaacaacaataataaaggaaagcttgtgtttcatttgggttcttaataattccaataattgtatgaggcaactatttgcgcatccaaccatgagtggaaggtttgggaaagactgtgggacctttacttagaaagtgaaatgtatgtagaagtctcaagtaccccttctacagttttactggagaaaactaagagccatattcatgacaacttgcacagttttgaggttgagacttttgatatgtgtaagttgcatagaggaggatattatcatgcaaatcatgagcaattatcacataaacttttttagaatgtgccatgaacatggcataaaattcacattgagtgcacagggcttaaaataaagctaagtatgtttattcccaatgccatggcaaaaatgataatatcatcagaaatggaaggcagttctcccagatggtgtctaatgaaagcaatgagtctatgaaaattttacctagaatatcatcataaattaaattagcaagtgcgctggatcttggcagcgctgctgaaatgacaacagtaaaataatacctggttctccatctgaatacatcaatgca

SEQ ID NO: 131736 - DNA, 2168 bp, Homo sapiens
  Payload ID: 5712
  Gene Symbol: EYS
  Gene Name: eyes shut homolog (Drosophila)
  Uniprot ID: Q5T1H1
  ENST ID: ENST00000342421
  CDS Start-End: 333-2117
gtgttttttgaaaactaatcagaagaggaatgcttatctcccaagaaaattgaaaccatctgtaaaagaatcttggctgtgctgtgttttgattagattgaagcttggtgtaaagagaaaacacaaaagaccgcagaatatttacaacatttgaattcctgtttctccatcaaagcacattgtcatcaaagctactttgggtatagaaaaaaggtcaattccaattcccaggaatccttaaccacaactttacttggaaatttccggtaatacttaaaacaccattttgcagcaattctttatgataaactgtaaaatacagctacccgaaaatgactgacaaatcaatcgtcattctgagcctgatggtttttcacagctctttcataaatggaaaaacatgtagacggcaattggtggaagaatggcatccacaaccctcatcatatgtggtaaattggacactaacagaaaacatctgcttggacttctacagagattgctggtttttgggtgtaaacactaaaatagatacttcaggcaatcaagctgttccccagatttgccctttgcaaattcaattaggagatatccttgtaatttcttctgaaccatctcttcaatttccagaaataaatttgatgaatgtttctgaaacatctttcgttggctgtgtgcaaaataccacaacggaagatcagttactttttggctgcagactaaaaggaatgcacactgttaattctaagtggctgagtgttgggacacattattttatcacagttatggcaagtggtccatcaccttgtccactgggacttcgactaaatgtgacagtgaaacagcagttctgccaggaatctctgagttcagaattttgctctggtcatggtaaatgtcttagtgaagcttggagcaagacatatagctgccattgccagcctccattttctggaaaatactgccaggaacttgatgcatgttcttttaaaccatgtaaaaataatggcagttgcattaataaaagagaaaattgggatgagcaagcatatgaatgtgtctgtcacccaccatttacaggaaagaattgctcagaaataattggccagtgtcaaccacatgtctgtttccatggaaactgcagcaatattacttcaaatagtttcatttgtgaatgtgatgagcaattttcaggtccattctgtgaggtgtcagcaaaaccttgtgtttctctgcttttttggaaaagaggaatttgcccaaatagcagttctgcttatacttatgaatgcccaaaaggatcttccagccaaaatggtgaaactgatgtcagtgagttttcattagtaccatgtcagaatggtactgactgcatcaaaatatcaaatgatgttatgtgcatctgttcaccaatatttacagatttgctttgtaagagcattcaaacatcatgtgagtcatttcctttgaggaataatgctacatgtaagaaatgtgagaaagattatccttgcagctgtatatcaggatttactgaaaaaaactgtgagaaagcaattgaccactgtaaactgctcagcatcaactgtctgaatgaagaatggtgtttcaatataattggaagattcaaatatgtatgcattccagggtgcacaaaaaatccatgttggtttttgaagaatgtttacctaattcatcaacacctctgctactgtggagtcaccttccatggtatttgccaagataaaggtcctgctcaatttgaatatgtgtggcaattgggatttgcaggatctgaaggcgaaaagtgccaaggggttattgatgcctatttctttctggctgcaaactgcactgaagatgcaacctatgtgaacgatcctgaagataataattcttcatgttggttcccacatgaaggcacaaaagagatttgtgcaaatggatgcagttgtttgagtgaagaagacagtcaggaatatcggtatctatgttttctcagatgggctggcaacatgtatctggaaaatacaactgatgatcaagaaaatgagtgtcaacatgaagctgtttgtaaagatgaaattaatagacccaggtatttatgtatcatttgagcagataatatcacatatcaaaaagttataattaaattgatagtcatcgaa

SEQ ID NO: 131737 - DNA, 9498 bp, Homo sapiens
  Payload ID: 5712
  Gene Symbol: EYS
  Gene Name: eyes shut homolog (Drosophila)
  Uniprot ID: Q5T1H1
  ENST ID: ENST00000370616
  CDS Start-End: 1-9498
atgactgacaaatcaatcgtcattctgagcctgatggtttttcacagctctttcataaatggaaaaacatgtagacggcaattggtggaagaatggcatccacaaccctcatcatatgtggtaaattggacactaacagaaaacatctgcttggacttctacagagattgctggtttttgggtgtaaacactaaaatagatacttcaggcaatcaagctgttccccagatttgccctttgcaaattcaattaggagatatccttgtaatttcttctgaaccatctcttcaatttccagaaataaatttgatgaatgtttctgaaacatctttcgttggctgtgtgcaaaataccacaacggaagatcagttactttttggctgcagactaaaaggaatgcacactgttaattctaagtggctgagtgttgggacacattattttatcacagttatggcaagtggtccatcaccttgtccactgggacttcgactaaatgtgacagtgaaacagcagttctgccaggaatctctgagttcagaattttgctctggtcatggtaaatgtcttagtgaagcttggagcaagacatatagctgccattgccagcctccattttctggaaaatactgccaggaacttgatgcatgttcttttaaaccatgtaaaaataatggcagttgcattaataaaagagaaaattgggatgagcaagcatatgaatgtgtctgtcacccaccatttacaggaaagaattgctcagaaataattggccagtgtcaaccacatgtctgtttccatggaaactgcagcaatattacttcaaatagtttcatttgtgaatgtgatgagcaattttcaggtccattctgtgaggtgtcagcaaaaccttgtgtttctctgcttttttggaaaagaggaatttgcccaaatagcagttctgcttatacttatgaatgcccaaaaggatcttccagccaaaatggtgaaactgatgtcagtgagttttcattagtaccatgtcagaatggtactgactgcatcaaaatatcaaatgatgttatgtgcatctgttcaccaatatttacagatttgctttgtaagagcattcaaacatcatgtgagtcatttcctttgaggaataatgctacatgtaagaaatgtgagaaagattatccttgcagctgtatatcaggatttactgaaaaaaactgtgagaaagcaattgaccactgtaaactgctcagcatcaactgtctgaatgaagaatggtgtttcaatataattggaagattcaaatatgtatgcattccagggtgcacaaaaaatccatgttggtttttgaagaatgtttacctaattcatcaacacctctgctactgtggagtcaccttccatggtatttgccaagataaaggtcctgctcaatttgaatatgtgtggcaattgggatttgcaggatctgaaggcgaaaagtgccaaggggttattgatgcctatttctttctggctgcaaactgcactgaagatgcaacctatgtgaacgatcctgaagataataattcttcatgttggttcccacatgaaggcacaaaagagatttgtgcaaatggatgcagttgtttgagtgaagaagacagtcaggaatatcggtatctatgttttctcagatgggctggcaacatgtatctggaaaatacaactgatgatcaagaaaatgagtgtcaacatgaagctgtttgtaaagatgaaattaatagacccagatgcagctgttctcttagttacattggcagattgtgtgttgtcaatgttgactattgcttagggaaccacagtatatcagtgcatggcctctgcctggccctttcgcacaattgtaactgtagcggtctgcaaagatatgaaaggaacatctgtgagatagatactgaagactgcaaatctgcgtcctgcaaaaatggaacaactagtacacatttaaggggatatttcttccgcaagtgtgtcccaggatttaaaggtacgcaatgtgaaattgatatagatgagtgtgcttcacatccctgcaaaaatggagccacctgcattgaccaacctggtaattacttctgccagtgtgtgcctccatttaaagtggttgatggcttttcctgcttatgcaatccaggctatgttgggataagatgtgaacaggacattgatgactgcatcctgaatgcctgtgagcacaattctacctgcaaagacctgcatctcagctaccagtgtgtgtgcctatctgattgggaaggaaatttttgtgaacaagaatccaatgagtgtaaaatgaatccttgcaagaacaattccacctgtactgacctttacaaaagctatcgatgtgagtgtacatctggatggactggacagaactgtagtgaagaaataaatgaatgcgactctgatccatgcatgaatggaggtctttgtcatgaatctaccatccctggacaatttgtatgtctgtgcccacccctttatactggacaattttgccaccaacgctataacctttgtgacctacttcataacccttgcagaaacaactcaacatgcttagctttggtagacgcaaatcagcattgtatttgtagagaagaatttgaaggtaaaaactgtgaaattgatgtgaaagactgcctcttcctttcctgccaggattatggtgactgtgaagatatggtcaacaatttcaggtgtatttgcagacctgggttttctggatctctgtgtgaaattgaaattaatgaatgttcctctgaaccttgcaaaaataatggaacatgtgtggatctgacaaacagatttttttgtaattgtgaacctgagtaccatgggcccttctgtgaacttgatgtaaataaatgtaaaatctcaccttgtctagatgaagaaaattgtgtctacaggactgatggatacaactgcctctgtgcccctggttatacaggcatcaactgtgaaataaatctagatgaatgcctatcagagccctgtctccatgatggagtttgtatcgatggcatcaatcattatacctgtgactgcaagagtgggttttttggaacacactgtgaaacaaacgccaatgattgcctttcaaatccttgtctacatggaaggtgcacagaacttattaatgaatatccatgttcatgtgatgcagatgggactagcacacaatgtaagatcaaaattaatgactgcacatcaatcccttgtatgaatgaaggcttctgtcagaagtcagcacatggatttacttgcatttgcccacgtggatacactggtgcatactgtgaaaaaagcattgataattgtgctgagcctgaacttaattcagtcatctgtcttaatggagggatctgtgttgatgggcctggacatacttttgactgcagatgtcttcctggattttctggtcaattttgtgaaattaatataaatgaatgctcttcatcaccatgtctacatggtgcagactgtgaagatcacatcaatggatatgtttgcaaatgccaaccaggatggtctggacaccactgtgagaatgagcttgagtgcattcccaactcatgtgttcatgaactctgcatggagaatgaacctggctcgacatgtttatgcacacctggatttatgacctgctccattgggcttctttgtggtgatgaaataaggagaattacctgtttaactcccatctttcaaagaacagatcccatttccacacagacatatacaattcccccttctgagactttggtcagcagctttccatctataaaggctactagaataccagccataatggacacttacccagttgatcaaggtccaaaacagacaggcattgtcaagcacgacattctcccaaccactggtttggcaacattaagaattagcacacccttggaaagctacttactccaagaactgattgtcactagagagctttcagcaaaacacagtcttctttcttccgcagatgtttcctcttctcgattcctgaattttggtattcgtgacccagcacaaattgtccaggacaaaacatcggtatcacatatgcctattcgaacttcagcagccacactaggtttcttttttcctgataggagagcaaggaccccatttatcatgtcttccttaatgtcagattttatttttcctacacaatctttattatttgagaactgtcagactgttgctttatctgctaccccaacgacttcagtaattagaagcattccaggggctgatattgagctaaacaggcagtcattactctcccgtggattcctgcttatagctgcctccataagtgcaactccagttgtctctaggggggctcaagaggatattgaagaatattcagctgattctttaatttcaagaagagagcactggagattgctcagcccctcgatgtctcccatttttcctgctaaggtaattatatctaaacaggtaaccatcttaaactcatcagctctgcaccggttcagtacaaaagccttcaatcccagtgaatatcaggctattactgaggcttcaagcaaccagagactcacaaacatcaaatcacaggctgctgattctttaagagaattaagccaaacatgtgcaacatgttctatgactgaaataaaatcctctcgtgaattctcagatcaagttttgcatagcaaacagtcccacttttatgagacattctggatgaactcagcgatattagccagctggtatgcactaatgggagctcaaactatcacttctgggcattcattttcttctgctactgaaataacaccatcagtggcattcacagaagtgccatctttatttccttctaaaaagagtgcaaaaagaacaattttatcctcatccttggaagaatccattaccctatcaagtaatttggatgttaatttatgtttggataagacttgtttatccattgtcccttcacaaactatctcttcagacttgatgaattctgatttgacttcaaaaatgactactgatgaactgtcagtatcagaaaacattttaaaactattgaaaataagacaatatggcataactatgggacccactgaggtactaaatcaagagagcttattggacatggaaaaaagtaaaggatctcatacactgttcaaacttcacccaagtgatagttctctggattttgagttaaacttacaaatttatccggatgttactttaaagacatattcagaaattacacatgcaaatgacttcaaaaataatctgccaccattgacaggctcagtgcctgatttttcagaagtcaccaccaatgttgcattttatacagtttcagcaactccagcactttcaatacagacgtcttcctccatgtctgtaattaggccagattggccatattttacagattatatgacctctcttaaaaaagaggtcaagacttcttcagaatggtccaaatgggaacttcagcctagtgtgcaatatcaggaatttcccactgcaagccggcatcttcccttcactagatctcttactttgtcttcactggaatccattctggcacctcaacggctgatgatttctgatttcagttgtgttcgttattatggagattcttatctagaatttcagaatgtggctttaaatccacaaaataacatctccctagaatttcagaccttcagctcctatggacttctgctgtatgtcaagcaagactcaaatttagtagatggattttttattcaattgtttattgaaaatggtactttaaagtaccacttttactgtcctggtgaagcaaaatttaaaagcattaatactactgttagagtggacaacgggcaaaagtatacactgcttatcaggcaagaattggatccatgtaacgctgagctgactattttagggaggaatacacaaatatgcgaatctatcaatcatgtactcggaaaacccctgccaaaatcaggatctgtcttcattggtggatttccagaccttcatgggaaaatccagatgcctgtaccagtcaagaattttactggctgcatagaagttatagaaataaataactggagatctttcattccatccaaggcagtgaaaaactatcacattaacaattgcagatcccagggatttatgctgtctccaacagcctcctttgttgatgcttctgatgtgacacaaggggttgataccatgtggacttctgtcagcccctctgttgcagcaccctctgtgtgccagcaggatgtatgccacaatggaggcacatgccatgccatcttcctctccagtggcatagtgtcattccaatgtgactgtccactacatttcactggccgcttctgtgaaaaagatgcaggtttattctttccatctttcaatgggaattcctatttagaactgccctttttgaagtttgtcctggagaaggaacataacagaactgttaccatctacttgactataaaaacaaacagtttaaatggaactattctttacagtaatgggaataattgtggaaagcagtttcttcatttatttcttgtggaaggaaggccatcagttaaatatgggtgtggaaattctcaaaatattttgactgtttctgctaattacagcattaacacaaatgcattcacccctatcacaatacgctacacaacgcctgttggcagccctggagttgtttgtatgattgaaatgactgcagatggaaaacctccagtacagaagaaagacacagagatttcccatgcctctcaggcatattttgaatcaatgttccttggccatattcctgcaaatgttcaaattcataagaaagcaggtcctgtttatgggttcaggggctgcattctagaccttcaagtaaacaacaaagaattcttcatcatcgatgaagcacgacatggaaagaatattgagaactgccacgtcccttggtgtgctcatcatctgtgccgcaacaatggcacctgcatcagtgataatgaaaatctgttttgtgagtgtccaaggctgtattcaggcaagctgtgccagtttgcaagttgtgaaaacaacccatgtggaaatggtgccacctgtgttccaaaatccggaacagatattgtctgcctctgcccatatgggaggtctggacccctctgcactgatgctattaatattactcagccaaggttcagtggcacagatgcctttggatacacctcattcctggcttattcacggatctcagacatcagcttccattatgaattccacctgaagtttcagctggcaaacaaccactcagcactgcaaaataacttgatattttttactggacagaaaggccatgggttgaatggcgatgacttcctggctgtgggcctgctcaatggcagtgtggtttatagttataacctggggtctggcatagcaagcatcaggagcgagcccctcaatctgagccttggagtccacactgttcatctgggcaagttcttccaagagggctggctgaaggtagatgatcataaaaataaatccattatcgccccaggaagactggttggtctcaatgtcttcagtcagttttatgtaggtggctacagtgaatacactccagatctcttaccaaatggagcagattttaaaaatggttttcaaggctgtattttcactcttcaagttcgcactgagaaggatggccatttcagaggactgggaaatcctgagggccacccaaatgctggacgcagtgttggccagtgtcatgcttctccctgcagtttaatgaaatgtggcaatggtgggacatgcatagagagtggaactagtgtttactgcaattgtaccactgggtggaaaggatcattctgcacagagacagtttctacctgtgatcctgaacatgaccctccacaccactgtagcagaggagcaacctgcatttcattacctcatggatacacctgtttctgtcctctaggaaccactggaatctactgtgaacaagcacttatcctcattgtgatcttggaaaagccaaaaccagcagaacggaaagtgaagaaggaggctttatccataagtgatccatctttcagaagcaatgagttatcctggatgtcttttgcttcctttcatgttcgaaaaaagacacatattcaattgcagtttcagcctctcgctgcagatggtatcctattttatgctgcacaacacttaaaagcccaatcaggtgattttttatgcatctctttagtaaatagttccgttcaacttcgctacaaccttggcgacagaactatcattctagaaactctccaaaaagtaactataaacggaagtacttggcatataataaaagcaggaagagttggtgcagaaggctacctggatctagatgggataaatgtaacagaaaaggcctccactaaaatgagttctctggacacaaatacagacttctatattggaggagtatcttctttaaatcttgtaaatcccatggcaatagaaaatgaacctgtaggttttcaaggctgtatccgacaagttatcataaataatcaagaattacaattaactgaatttggagcaaaaggtggctcaaatgtaggtgactgtgatgggacagcctgtgggtacaacacatgcagaaatggaggtgaatgtacagtaaatggcacaactttttcttgcagatgtttgccagattgggctggaaatacatgtaaccagtctgtgtcctgtttgaataatctttgcctccaccaatctttatgtatacctgaccaatcattttcttacagttgcctgtgtactttgggttgggtgggaaggtattgtgaaaacaaaacttcattttcaactgcaaaatttatgggtaattcttacattaaatacattgatccaaattatagaatgagaaacctccagttcactactatatccttaaatttcagtaccactaaaacagaaggtctaattgtatggatgggaatagctcaaaatgaagaaaatgattttctggcaattggtctccataatcagaccttgaaaatagcagttaacttgggagaaagaatctctgtgcctatgagctataacaatggcacattctgttgtaataaatggcaccatgtagttgtaattcaaaatcagactcttatcaaggcctacataaataacagtctaattctttccgaggatattgatccacataaaaactttgtggctctaaactatgatggcatttgttatctagggggctttgaatatggtagaaaggtaaatatcgttactcaagagatttttaaaaccaattttgttggcaaaattaaagatgttgtattttttcaggaaccaaaaaacattgaactaattaaattagaaggatacaatgtttatgatggagatgaacaaaatgaggttacataa

SEQ ID NO: 131738 - DNA, 9435 bp, Homo sapiens
  Payload ID: 5712
  Gene Symbol: EYS
  Gene Name: eyes shut homolog (Drosophila)
  Uniprot ID: Q5T1H1
  ENST ID: ENST00000370618
  CDS Start-End: 1-9435
atgactgacaaatcaatcgtcattctgagcctgatggtttttcacagctctttcataaatggaaaaacatgtagacggcaattggtggaagaatggcatccacaaccctcatcatatgtggtaaattggacactaacagaaaacatctgcttggacttctacagagattgctggtttttgggtgtaaacactaaaatagatacttcaggcaatcaagctgttccccagatttgccctttgcaaattcaattaggagatatccttgtaatttcttctgaaccatctcttcaatttccagaaataaatttgatgaatgtttctgaaacatctttcgttggctgtgtgcaaaataccacaacggaagatcagttactttttggctgcagactaaaaggaatgcacactgttaattctaagtggctgagtgttgggacacattattttatcacagttatggcaagtggtccatcaccttgtccactgggacttcgactaaatgtgacagtgaaacagcagttctgccaggaatctctgagttcagaattttgctctggtcatggtaaatgtcttagtgaagcttggagcaagacatatagctgccattgccagcctccattttctggaaaatactgccaggaacttgatgcatgttcttttaaaccatgtaaaaataatggcagttgcattaataaaagagaaaattgggatgagcaagcatatgaatgtgtctgtcacccaccatttacaggaaagaattgctcagaaataattggccagtgtcaaccacatgtctgtttccatggaaactgcagcaatattacttcaaatagtttcatttgtgaatgtgatgagcaattttcaggtccattctgtgaggtgtcagcaaaaccttgtgtttctctgcttttttggaaaagaggaatttgcccaaatagcagttctgcttatacttatgaatgcccaaaaggatcttccagccaaaatggtgaaactgatgtcagtgagttttcattagtaccatgtcagaatggtactgactgcatcaaaatatcaaatgatgttatgtgcatctgttcaccaatatttacagatttgctttgtaagagcattcaaacatcatgtgagtcatttcctttgaggaataatgctacatgtaagaaatgtgagaaagattatccttgcagctgtatatcaggatttactgaaaaaaactgtgagaaagcaattgaccactgtaaactgctcagcatcaactgtctgaatgaagaatggtgtttcaatataattggaagattcaaatatgtatgcattccagggtgcacaaaaaatccatgttggtttttgaagaatgtttacctaattcatcaacacctctgctactgtggagtcaccttccatggtatttgccaagataaaggtcctgctcaatttgaatatgtgtggcaattgggatttgcaggatctgaaggcgaaaagtgccaaggggttattgatgcctatttctttctggctgcaaactgcactgaagatgcaacctatgtgaacgatcctgaagataataattcttcatgttggttcccacatgaaggcacaaaagagatttgtgcaaatggatgcagttgtttgagtgaagaagacagtcaggaatatcggtatctatgttttctcagatgggctggcaacatgtatctggaaaatacaactgatgatcaagaaaatgagtgtcaacatgaagctgtttgtaaagatgaaattaatagacccagatgcagctgttctcttagttacattggcagattgtgtgttgtcaatgttgactattgcttagggaaccacagtatatcagtgcatggcctctgcctggccctttcgcacaattgtaactgtagcggtctgcaaagatatgaaaggaacatctgtgagatagatactgaagactgcaaatctgcgtcctgcaaaaatggaacaactagtacacatttaaggggatatttcttccgcaagtgtgtcccaggatttaaaggtacgcaatgtgaaattgatatagatgagtgtgcttcacatccctgcaaaaatggagccacctgcattgaccaacctggtaattacttctgccagtgtgtgcctccatttaaagtggttgatggcttttcctgcttatgcaatccaggctatgttgggataagatgtgaacaggacattgatgactgcatcctgaatgcctgtgagcacaattctacctgcaaagacctgcatctcagctaccagtgtgtgtgcctatctgattgggaaggaaatttttgtgaacaagaatccaatgagtgtaaaatgaatccttgcaagaacaattccacctgtactgacctttacaaaagctatcgatgtgagtgtacatctggatggactggacagaactgtagtgaagaaataaatgaatgcgactctgatccatgcatgaatggaggtctttgtcatgaatctaccatccctggacaatttgtatgtctgtgcccacccctttatactggacaattttgccaccaacgctataacctttgtgacctacttcataacccttgcagaaacaactcaacatgcttagctttggtagacgcaaatcagcattgtatttgtagagaagaatttgaaggtaaaaactgtgaaattgatgtgaaagactgcctcttcctttcctgccaggattatggtgactgtgaagatatggtcaacaatttcaggtgtatttgcagacctgggttttctggatctctgtgtgaaattgaaattaatgaatgttcctctgaaccttgcaaaaataatggaacatgtgtggatctgacaaacagatttttttgtaattgtgaacctgagtaccatgggcccttctgtgaacttgatgtaaataaatgtaaaatctcaccttgtctagatgaagaaaattgtgtctacaggactgatggatacaactgcctctgtgcccctggttatacaggcatcaactgtgaaataaatctagatgaatgcctatcagagccctgtctccatgatggagtttgtatcgatggcatcaatcattatacctgtgactgcaagagtgggttttttggaacacactgtgaaacaaacgccaatgattgcctttcaaatccttgtctacatggaaggtgcacagaacttattaatgaatatccatgttcatgtgatgcagatgggactagcacacaatgtaagatcaaaattaatgactgcacatcaatcccttgtatgaatgaaggcttctgtcagaagtcagcacatggatttacttgcatttgcccacgtggatacactggtgcatactgtgaaaaaagcattgataattgtgctgagcctgaacttaattcagtcatctgtcttaatggagggatctgtgttgatgggcctggacatacttttgactgcagatgtcttcctggattttctggtcaattttgtgaaattaatataaatgaatgctcttcatcaccatgtctacatggtgcagactgtgaagatcacatcaatggatatgtttgcaaatgccaaccaggatggtctggacaccactgtgagaatgagcttgagtgcattcccaactcatgtgttcatgaactctgcatggagaatgaacctggctcgacatgtttatgcacacctggatttatgacctgctccattgggcttctttgtggtgatgaaataaggagaattacctgtttaactcccatctttcaaagaacagatcccatttccacacagacatatacaattcccccttctgagactttggtcagcagctttccatctataaaggctactagaataccagccataatggacacttacccagttgatcaaggtccaaaacagacaggcattgtcaagcacgacattctcccaaccactggtttggcaacattaagaattagcacacccttggaaagctacttactccaagaactgattgtcactagagagctttcagcaaaacacagtcttctttcttccgcagatgtttcctcttctcgattcctgaattttggtattcgtgacccagcacaaattgtccaggacaaaacatcggtatcacatatgcctattcgaacttcagcagccacactaggtttcttttttcctgataggagagcaaggaccccatttatcatgtcttccttaatgtcagattttatttttcctacacaatctttattatttgagaactgtcagactgttgctttatctgctaccccaacgacttcagtaattagaagcattccaggggctgatattgagctaaacaggcagtcattactctcccgtggattcctgcttatagctgcctccataagtgcaactccagttgtctctaggggggctcaagaggatattgaagaatattcagctgattctttaatttcaagaagagagcactggagattgctcagcccctcgatgtctcccatttttcctgctaaggtaattatatctaaacaggtaaccatcttaaactcatcagctctgcaccggttcagtacaaaagccttcaatcccagtgaatatcaggctattactgaggcttcaagcaaccagagactcacaaacatcaaatcacaggctgctgattctttaagagaattaagccaaacatgtgcaacatgttctatgactgaaataaaatcctctcgtgaattctcagatcaagttttgcatagcaaacagtcccacttttatgagacattctggatgaactcagcgatattagccagctggtatgcactaatgggagctcaaactatcacttctgggcattcattttcttctgctactgaaataacaccatcagtggcattcacagaagtgccatctttatttccttctaaaaagagtgcaaaaagaacaattttatcctcatccttggaagaatccattaccctatcaagtaatttggatgttaatttatgtttggataagacttgtttatccattgtcccttcacaaactatctcttcagacttgatgaattctgatttgacttcaaaaatgactactgatgaactgtcagtatcagaaaacattttaaaactattgaaaataagacaatatggcataactatgggacccactgaggtactaaatcaagagagcttattggacatggaaaaaagtaaaggatctcatacactgttcaaacttcacccaagtgatagttctctggattttgagttaaacttacaaatttatccggatgttactttaaagacatattcagaaattacacatgcaaatgacttcaaaaataatctgccaccattgacaggctcagtgcctgatttttcagaagtcaccaccaatgttgcattttatacagtttcagcaactccagcactttcaatacagacgtcttcctccatgtctgtaattaggccagattggccatattttacagattatatgacctctcttaaaaaagaggtcaagacttcttcagaatggtccaaatgggaacttcagcctagtgtgcaatatcaggaatttcccactgcaagccggcatcttcccttcactagatctcttactttgtcttcactggaatccattctggcacctcaacggctgatgatttctgatttcagttgtgttcgttattatggagattcttatctagaatttcagaatgtggctttaaatccacaaaataacatctccctagaatttcagaccttcagctcctatggacttctgctgtatgtcaagcaagactcaaatttagtagatggattttttattcaattgtttattgaaaatggtactttaaagtaccacttttactgtcctggtgaagcaaaatttaaaagcattaatactactgttagagtggacaacgggcaaaagtatacactgcttatcaggcaagaattggatccatgtaacgctgagctgactattttagggaggaatacacaaatatgcgaatctatcaatcatgtactcggaaaacccctgccaaaatcaggatctgtcttcattggtggatttccagaccttcatgggaaaatccagatgcctgtaccagtcaagaattttactggctgcatagaagttatagaaataaataactggagatctttcattccatccaaggcagtgaaaaactatcacattaacaattgcagatcccagggatttatgctgtctccaacagcctcctttgttgatgcttctgatgtgacacaaggggttgataccatgtggacttctgtcagcccctctgttgcagcaccctctgtgtgccagcaggatgtatgccacaatggaggcacatgccatgccatcttcctctccagtggcatagtgtcattccaatgtgactgtccactacatttcactggccgcttctgtgaaaaagatgcaggtttattctttccatctttcaatgggaattcctatttagaactgccctttttgaagtttgtcctggagaaggaacataacagaactgttaccatctacttgactataaaaacaaacagtttaaatggaactattctttacagtaatgggaataattgtggaaagcagtttcttcatttatttcttgtggaaggaaggccatcagttaaatatgggtgtggaaattctcaaaatattttgactgtttctgctaattacagcattaacacaaatgcattcacccctatcacaatacgctacacaacgcctgttggcagccctggagttgtttgtatgattgaaatgactgcagatggaaaacctccagtacagaagaaagacacagagatttcccatgcctctcaggcatattttgaatcaatgttccttggccatattcctgcaaatgttcaaattcataagaaagcaggtcctgtttatgggttcaggggctgcattctagaccttcaagtaaacaacaaagaattcttcatcatcgatgaagcacgacatggaaagaatattgagaactgccacgtcccttggtgtgctcatcatctgtgccgcaacaatggcacctgcatcagtgataatgaaaatctgttttgtgagtgtccaaggctgtattcaggcaagctgtgccagtttgcaagttgtgaaaacaacccatgtggaaatggtgccacctgtgttccaaaatccggaacagatattgtctgcctctgcccatatgggaggtctggacccctctgcactgatgctattaatattactcagccaaggttcagtggcacagatgcctttggatacacctcattcctggcttattcacggatctcagacatcagcttccattatgaattccacctgaagtttcagctggcaaacaaccactcagcactgcaaaataacttgatattttttactggacagaaaggccatgggttgaatggcgatgacttcctggctgtgggcctgctcaatggcagtgtggtttatagttataacctggggtctggcatagcaagcatcaggagcgagcccctcaatctgagccttggagtccacactgttcatctgggcaagttcttccaagagggctggctgaaggtagatgatcataaaaataaatccattatcgccccaggaagactggttggtctcaatgtcttcagtcagttttatgtaggtggctacagtgaatacactccagatctcttaccaaatggagcagattttaaaaatggttttcaaggctgtattttcactcttcaagttcgcactgagaaggatggccatttcagaggactgggaaatcctgagggccacccaaatgctggacgcagtgttggccagtgtcatgcttctccctgcagtttaatgaaatgtggcaatggtgggacatgcatagagagtggaactagtgtttactgcaattgtaccactgggtggaaaggatcattctgcacagagacagtttctacctgtgatcctgaacatgaccctccacaccactgtagcagaggagcaacctgcatttcattacctcatggatacacctgtttctgtcctctaggaaccactggaatctactgtgaacaagctttatccataagtgatccatctttcagaagcaatgagttatcctggatgtcttttgcttcctttcatgttcgaaaaaagacacatattcaattgcagtttcagcctctcgctgcagatggtatcctattttatgctgcacaacacttaaaagcccaatcaggtgattttttatgcatctctttagtaaatagttccgttcaacttcgctacaaccttggcgacagaactatcattctagaaactctccaaaaagtaactataaacggaagtacttggcatataataaaagcaggaagagttggtgcagaaggctacctggatctagatgggataaatgtaacagaaaaggcctccactaaaatgagttctctggacacaaatacagacttctatattggaggagtatcttctttaaatcttgtaaatcccatggcaatagaaaatgaacctgtaggttttcaaggctgtatccgacaagttatcataaataatcaagaattacaattaactgaatttggagcaaaaggtggctcaaatgtaggtgactgtgatgggacagcctgtgggtacaacacatgcagaaatggaggtgaatgtacagtaaatggcacaactttttcttgcagatgtttgccagattgggctggaaatacatgtaaccagtctgtgtcctgtttgaataatctttgcctccaccaatctttatgtatacctgaccaatcattttcttacagttgcctgtgtactttgggttgggtgggaaggtattgtgaaaacaaaacttcattttcaactgcaaaatttatgggtaattcttacattaaatacattgatccaaattatagaatgagaaacctccagttcactactatatccttaaatttcagtaccactaaaacagaaggtctaattgtatggatgggaatagctcaaaatgaagaaaatgattttctggcaattggtctccataatcagaccttgaaaatagcagttaacttgggagaaagaatctctgtgcctatgagctataacaatggcacattctgttgtaataaatggcaccatgtagttgtaattcaaaatcagactcttatcaaggcctacataaataacagtctaattctttccgaggatattgatccacataaaaactttgtggctctaaactatgatggcatttgttatctagggggctttgaatatggtagaaaggtaaatatcgttactcaagagatttttaaaaccaattttgttggcaaaattaaagatgttgtattttttcaggaaccaaaaaacattgaactaattaaattagaaggatacaatgtttatgatggagatgaacaaaatgaggttacataa

SEQ ID NO: 131739 - DNA, 10485 bp, Homo sapiens
  Payload ID: 5712
  Gene Symbol: EYS
  Gene Name: eyes shut homolog (Drosophila)
  Uniprot ID: Q5T1H1
  ENST ID: ENST00000370621
  CDS Start-End: 528-10025
gatacacgctaggcatgtccagacattaaccgtaatcagaagcctcctagggttgcaagcctccttggctaatggttgggctttgtgcctcactcttctcttacacctggggagtcaagtctggatcctctgctccatatttatttagcaaataaaacactgatctcaaacagcaacggaacctgtgtacttgaggtgttttttgaaaactaatcagaagaggaatgcttatctcccaagaaaattgaaaccatctgtaaaagaatcttggctgtgctgtgttttgattagattgaagcttggtgtaaagagaaaacacaaaagaccgcagaatatttacaacatttgaattcctgtttctccatcaaagcacattgtcatcaaagctactttgggtatagaaaaaaggtcaattccaattcccaggaatccttaaccacaactttacttggaaatttccggtaatacttaaaacaccattttgcagcaattctttatgataaactgtaaaatacagctacccgaaaatgactgacaaatcaatcgtcattctgagcctgatggtttttcacagctctttcataaatggaaaaacatgtagacggcaattggtggaagaatggcatccacaaccctcatcatatgtggtaaattggacactaacagaaaacatctgcttggacttctacagagattgctggtttttgggtgtaaacactaaaatagatacttcaggcaatcaagctgttccccagatttgccctttgcaaattcaattaggagatatccttgtaatttcttctgaaccatctcttcaatttccagaaataaatttgatgaatgtttctgaaacatctttcgttggctgtgtgcaaaataccacaacggaagatcagttactttttggctgcagactaaaaggaatgcacactgttaattctaagtggctgagtgttgggacacattattttatcacagttatggcaagtggtccatcaccttgtccactgggacttcgactaaatgtgacagtgaaacagcagttctgccaggaatctctgagttcagaattttgctctggtcatggtaaatgtcttagtgaagcttggagcaagacatatagctgccattgccagcctccattttctggaaaatactgccaggaacttgatgcatgttcttttaaaccatgtaaaaataatggcagttgcattaataaaagagaaaattgggatgagcaagcatatgaatgtgtctgtcacccaccatttacaggaaagaattgctcagaaataattggccagtgtcaaccacatgtctgtttccatggaaactgcagcaatattacttcaaatagtttcatttgtgaatgtgatgagcaattttcaggtccattctgtgaggtgtcagcaaaaccttgtgtttctctgcttttttggaaaagaggaatttgcccaaatagcagttctgcttatacttatgaatgcccaaaaggatcttccagccaaaatggtgaaactgatgtcagtgagttttcattagtaccatgtcagaatggtactgactgcatcaaaatatcaaatgatgttatgtgcatctgttcaccaatatttacagatttgctttgtaagagcattcaaacatcatgtgagtcatttcctttgaggaataatgctacatgtaagaaatgtgagaaagattatccttgcagctgtatatcaggatttactgaaaaaaactgtgagaaagcaattgaccactgtaaactgctcagcatcaactgtctgaatgaagaatggtgtttcaatataattggaagattcaaatatgtatgcattccagggtgcacaaaaaatccatgttggtttttgaagaatgtttacctaattcatcaacacctctgctactgtggagtcaccttccatggtatttgccaagataaaggtcctgctcaatttgaatatgtgtggcaattgggatttgcaggatctgaaggcgaaaagtgccaaggggttattgatgcctatttctttctggctgcaaactgcactgaagatgcaacctatgtgaacgatcctgaagataataattcttcatgttggttcccacatgaaggcacaaaagagatttgtgcaaatggatgcagttgtttgagtgaagaagacagtcaggaatatcggtatctatgttttctcagatgggctggcaacatgtatctggaaaatacaactgatgatcaagaaaatgagtgtcaacatgaagctgtttgtaaagatgaaattaatagacccagatgcagctgttctcttagttacattggcagattgtgtgttgtcaatgttgactattgcttagggaaccacagtatatcagtgcatggcctctgcctggccctttcgcacaattgtaactgtagcggtctgcaaagatatgaaaggaacatctgtgagatagatactgaagactgcaaatctgcgtcctgcaaaaatggaacaactagtacacatttaaggggatatttcttccgcaagtgtgtcccaggatttaaaggtacgcaatgtgaaattgatatagatgagtgtgcttcacatccctgcaaaaatggagccacctgcattgaccaacctggtaattacttctgccagtgtgtgcctccatttaaagtggttgatggcttttcctgcttatgcaatccaggctatgttgggataagatgtgaacaggacattgatgactgcatcctgaatgcctgtgagcacaattctacctgcaaagacctgcatctcagctaccagtgtgtgtgcctatctgattgggaaggaaatttttgtgaacaagaatccaatgagtgtaaaatgaatccttgcaagaacaattccacctgtactgacctttacaaaagctatcgatgtgagtgtacatctggatggactggacagaactgtagtgaagaaataaatgaatgcgactctgatccatgcatgaatggaggtctttgtcatgaatctaccatccctggacaatttgtatgtctgtgcccacccctttatactggacaattttgccaccaacgctataacctttgtgacctacttcataacccttgcagaaacaactcaacatgcttagctttggtagacgcaaatcagcattgtatttgtagagaagaatttgaaggtaaaaactgtgaaattgatgtgaaagactgcctcttcctttcctgccaggattatggtgactgtgaagatatggtcaacaatttcaggtgtatttgcagacctgggttttctggatctctgtgtgaaattgaaattaatgaatgttcctctgaaccttgcaaaaataatggaacatgtgtggatctgacaaacagatttttttgtaattgtgaacctgagtaccatgggcccttctgtgaacttgatgtaaataaatgtaaaatctcaccttgtctagatgaagaaaattgtgtctacaggactgatggatacaactgcctctgtgcccctggttatacaggcatcaactgtgaaataaatctagatgaatgcctatcagagccctgtctccatgatggagtttgtatcgatggcatcaatcattatacctgtgactgcaagagtgggttttttggaacacactgtgaaacaaacgccaatgattgcctttcaaatccttgtctacatggaaggtgcacagaacttattaatgaatatccatgttcatgtgatgcagatgggactagcacacaatgtaagatcaaaattaatgactgcacatcaatcccttgtatgaatgaaggcttctgtcagaagtcagcacatggatttacttgcatttgcccacgtggatacactggtgcatactgtgaaaaaagcattgataattgtgctgagcctgaacttaattcagtcatctgtcttaatggagggatctgtgttgatgggcctggacatacttttgactgcagatgtcttcctggattttctggtcaattttgtgaaattaatataaatgaatgctcttcatcaccatgtctacatggtgcagactgtgaagatcacatcaatggatatgtttgcaaatgccaaccaggatggtctggacaccactgtgagaatgagcttgagtgcattcccaactcatgtgttcatgaactctgcatggagaatgaacctggctcgacatgtttatgcacacctggatttatgacctgctccattgggcttctttgtggtgatgaaataaggagaattacctgtttaactcccatctttcaaagaacagatcccatttccacacagacatatacaattcccccttctgagactttggtcagcagctttccatctataaaggctactagaataccagccataatggacacttacccagttgatcaaggtccaaaacagacaggcattgtcaagcacgacattctcccaaccactggtttggcaacattaagaattagcacacccttggaaagctacttactccaagaactgattgtcactagagagctttcagcaaaacacagtcttctttcttccgcagatgtttcctcttctcgattcctgaattttggtattcgtgacccagcacaaattgtccaggacaaaacatcggtatcacatatgcctattcgaacttcagcagccacactaggtttcttttttcctgataggagagcaaggaccccatttatcatgtcttccttaatgtcagattttatttttcctacacaatctttattatttgagaactgtcagactgttgctttatctgctaccccaacgacttcagtaattagaagcattccaggggctgatattgagctaaacaggcagtcattactctcccgtggattcctgcttatagctgcctccataagtgcaactccagttgtctctaggggggctcaagaggatattgaagaatattcagctgattctttaatttcaagaagagagcactggagattgctcagcccctcgatgtctcccatttttcctgctaaggtaattatatctaaacaggtaaccatcttaaactcatcagctctgcaccggttcagtacaaaagccttcaatcccagtgaatatcaggctattactgaggcttcaagcaaccagagactcacaaacatcaaatcacaggctgctgattctttaagagaattaagccaaacatgtgcaacatgttctatgactgaaataaaatcctctcgtgaattctcagatcaagttttgcatagcaaacagtcccacttttatgagacattctggatgaactcagcgatattagccagctggtatgcactaatgggagctcaaactatcacttctgggcattcattttcttctgctactgaaataacaccatcagtggcattcacagaagtgccatctttatttccttctaaaaagagtgcaaaaagaacaattttatcctcatccttggaagaatccattaccctatcaagtaatttggatgttaatttatgtttggataagacttgtttatccattgtcccttcacaaactatctcttcagacttgatgaattctgatttgacttcaaaaatgactactgatgaactgtcagtatcagaaaacattttaaaactattgaaaataagacaatatggcataactatgggacccactgaggtactaaatcaagagagcttattggacatggaaaaaagtaaaggatctcatacactgttcaaacttcacccaagtgatagttctctggattttgagttaaacttacaaatttatccggatgttactttaaagacatattcagaaattacacatgcaaatgacttcaaaaataatctgccaccattgacaggctcagtgcctgatttttcagaagtcaccaccaatgttgcattttatacagtttcagcaactccagcactttcaatacagacgtcttcctccatgtctgtaattaggccagattggccatattttacagattatatgacctctcttaaaaaagaggtcaagacttcttcagaatggtccaaatgggaacttcagcctagtgtgcaatatcaggaatttcccactgcaagccggcatcttcccttcactagatctcttactttgtcttcactggaatccattctggcacctcaacggctgatgatttctgatttcagttgtgttcgttattatggagattcttatctagaatttcagaatgtggctttaaatccacaaaataacatctccctagaatttcagaccttcagctcctatggacttctgctgtatgtcaagcaagactcaaatttagtagatggattttttattcaattgtttattgaaaatggtactttaaagtaccacttttactgtcctggtgaagcaaaatttaaaagcattaatactactgttagagtggacaacgggcaaaagtatacactgcttatcaggcaagaattggatccatgtaacgctgagctgactattttagggaggaatacacaaatatgcgaatctatcaatcatgtactcggaaaacccctgccaaaatcaggatctgtcttcattggtggatttccagaccttcatgggaaaatccagatgcctgtaccagtcaagaattttactggctgcatagaagttatagaaataaataactggagatctttcattccatccaaggcagtgaaaaactatcacattaacaattgcagatcccagggatttatgctgtctccaacagcctcctttgttgatgcttctgatgtgacacaaggggttgataccatgtggacttctgtcagcccctctgttgcagcaccctctgtgtgccagcaggatgtatgccacaatggaggcacatgccatgccatcttcctctccagtggcatagtgtcattccaatgtgactgtccactacatttcactggccgcttctgtgaaaaagatgcaggtttattctttccatctttcaatgggaattcctatttagaactgccctttttgaagtttgtcctggagaaggaacataacagaactgttaccatctacttgactataaaaacaaacagtttaaatggaactattctttacagtaatgggaataattgtggaaagcagtttcttcatttatttcttgtggaaggaaggccatcagttaaatatgggtgtggaaattctcaaaatattttgactgtttctgctaattacagcattaacacaaatgcattcacccctatcacaatacgctacacaacgcctgttggcagccctggagttgtttgtatgattgaaatgactgcagatggaaaacctccagtacagaagaaagacacagagatttcccatgcctctcaggcatattttgaatcaatgttccttggccatattcctgcaaatgttcaaattcataagaaagcaggtcctgtttatgggttcaggggctgcattctagaccttcaagtaaacaacaaagaattcttcatcatcgatgaagcacgacatggaaagaatattgagaactgccacgtcccttggtgtgctcatcatctgtgccgcaacaatggcacctgcatcagtgataatgaaaatctgttttgtgagtgtccaaggctgtattcaggcaagctgtgccagtttgcaagttgtgaaaacaacccatgtggaaatggtgccacctgtgttccaaaatccggaacagatattgtctgcctctgcccatatgggaggtctggacccctctgcactgatgctattaatattactcagccaaggttcagtggcacagatgcctttggatacacctcattcctggcttattcacggatctcagacatcagcttccattatgaattccacctgaagtttcagctggcaaacaaccactcagcactgcaaaataacttgatattttttactggacagaaaggccatgggttgaatggcgatgacttcctggctgtgggcctgctcaatggcagtgtggtttatagttataacctggggtctggcatagcaagcatcaggagcgagcccctcaatctgagccttggagtccacactgttcatctgggcaagttcttccaagagggctggctgaaggtagatgatcataaaaataaatccattatcgccccaggaagactggttggtctcaatgtcttcagtcagttttatgtaggtggctacagtgaatacactccagatctcttaccaaatggagcagattttaaaaatggttttcaaggctgtattttcactcttcaagttcgcactgagaaggatggccatttcagaggactgggaaatcctgagggccacccaaatgctggacgcagtgttggccagtgtcatgcttctccctgcagtttaatgaaatgtggcaatggtgggacatgcatagagagtggaactagtgtttactgcaattgtaccactgggtggaaaggatcattctgcacagagacagtttctacctgtgatcctgaacatgaccctccacaccactgtagcagaggagcaacctgcatttcattacctcatggatacacctgtttctgtcctctaggaaccactggaatctactgtgaacaagcacttatcctcattgtgatcttggaaaagccaaaaccagcagaacggaaagtgaagaaggaggctttatccataagtgatccatctttcagaagcaatgagttatcctggatgtcttttgcttcctttcatgttcgaaaaaagacacatattcaattgcagtttcagcctctcgctgcagatggtatcctattttatgctgcacaacacttaaaagcccaatcaggtgattttttatgcatctctttagtaaatagttccgttcaacttcgctacaaccttggcgacagaactatcattctagaaactctccaaaaagtaactataaacggaagtacttggcatataataaaagcaggaagagttggtgcagaaggctacctggatctagatgggataaatgtaacagaaaaggcctccactaaaatgagttctctggacacaaatacagacttctatattggaggagtatcttctttaaatcttgtaaatcccatggcaatagaaaatgaacctgtaggttttcaaggctgtatccgacaagttatcataaataatcaagaattacaattaactgaatttggagcaaaaggtggctcaaatgtaggtgactgtgatgggacagcctgtgggtacaacacatgcagaaatggaggtgaatgtacagtaaatggcacaactttttcttgcagatgtttgccagattgggctggaaatacatgtaaccagtctgtgtcctgtttgaataatctttgcctccaccaatctttatgtatacctgaccaatcattttcttacagttgcctgtgtactttgggttgggtgggaaggtattgtgaaaacaaaacttcattttcaactgcaaaatttatgggtaattcttacattaaatacattgatccaaattatagaatgagaaacctccagttcactactatatccttaaatttcagtaccactaaaacagaaggtctaattgtatggatgggaatagctcaaaatgaagaaaatgattttctggcaattggtctccataatcagaccttgaaaatagcagttaacttgggagaaagaatctctgtgcctatgagctataacaatggcacattctgttgtaataaatggcaccatgtagttgtaattcaaaatcagactcttatcaaggcctacataaataacagtctaattctttccgaggatattgatccacataaaaactttgtggctctaaactatgatggcatttgttatctagggggctttgaatatggtagaaaggtaaatatcgttactcaagagatttttaaaaccaattttgttggcaaaattaaagatgttgtattttttcaggaaccaaaaaacattgaactaattaaattagaaggatacaatgtttatgatggagatgaacaaaatgaggttacataagttaacactagagattttagtacacactatacataaatgcagttattttgatagttatttctttgatacattgcttacggggaatcaactgtttactatattacctgaaatagtctaaatgctaacatatctttttgataagattgtaaaatgtcactgaaggttctgattgtttttcctacatctaatttatctgtatatattttgattcatgttttaactccattagttcagtgcttattcacagaatgtgcttattcactttgcttattcactttttacctatccctaatgcttacattttaaaatcaacgtgtaaacacaattttaaaaatcaatgtgtaagctgaactttaaaatgtttaaaattcagttgggaatgaattagggataggtacaaataagaaaaaaatcaagttattaatcaaaggaaaaataaaaattatacaaagcaatgtaa

SEQ ID NO: 131740 - DNA, 5450 bp, Homo sapiens
  Payload ID: 5712
  Gene Symbol: EYS
  Gene Name: eyes shut homolog (Drosophila)
  Uniprot ID: Q5T1H1
  ENST ID: ENST00000393380
  CDS Start-End: 539-2398
agaaacaaagtgatacacgctaggcatgtccagacattaaccgtaatcagaagcctcctagggttgcaagcctccttggctaatggttgggctttgtgcctcactcttctcttacacctggggagtcaagtctggatcctctgctccatatttatttagcaaataaaacactgatctcaaacagcaacggaacctgtgtacttgaggtgttttttgaaaactaatcagaagaggaatgcttatctcccaagaaaattgaaaccatctgtaaaagaatcttggctgtgctgtgttttgattagattgaagcttggtgtaaagagaaaacacaaaagaccgcagaatatttacaacatttgaattcctgtttctccatcaaagcacattgtcatcaaagctactttgggtatagaaaaaaggtcaattccaattcccaggaatccttaaccacaactttacttggaaatttccggtaatacttaaaacaccattttgcagcaattctttatgataaactgtaaaatacagctacccgaaaatgactgacaaatcaatcgtcattctgagcctgatggtttttcacagctctttcataaatggaaaaacatgtagacggcaattggtggaagaatggcatccacaaccctcatcatatgtggtaaattggacactaacagaaaacatctgcttggacttctacagagattgctggtttttgggtgtaaacactaaaatagatacttcaggcaatcaagctgttccccagatttgccctttgcaaattcaattaggagatatccttgtaatttcttctgaaccatctcttcaatttccagaaataaatttgatgaatgtttctgaaacatctttcgttggctgtgtgcaaaataccacaacggaagatcagttactttttggctgcagactaaaaggaatgcacactgttaattctaagtggctgagtgttgggacacattattttatcacagttatggcaagtggtccatcaccttgtccactgggacttcgactaaatgtgacagtgaaacagcagttctgccaggaatctctgagttcagaattttgctctggtcatggtaaatgtcttagtgaagcttggagcaagacatatagctgccattgccagcctccattttctggaaaatactgccaggaacttgatgcatgttcttttaaaccatgtaaaaataatggcagttgcattaataaaagagaaaattgggatgagcaagcatatgaatgtgtctgtcacccaccatttacaggaaagaattgctcagaaataattggccagtgtcaaccacatgtctgtttccatggaaactgcagcaatattacttcaaatagtttcatttgtgaatgtgatgagcaattttcaggtccattctgtgaggtgtcagcaaaaccttgtgtttctctgcttttttggaaaagaggaatttgcccaaatagcagttctgcttatacttatgaatgcccaaaaggatcttccagccaaaatggtgaaactgatgtcagtgagttttcattagtaccatgtcagaatggtactgactgcatcaaaatatcaaatgatgttatgtgcatctgttcaccaatatttacagatttgctttgtaagagcattcaaacatcatgtgagtcatttcctttgaggaataatgctacatgtaagaaatgtgagaaagattatccttgcagctgtatatcaggatttactgaaaaaaactgtgagaaagcaattgaccactgtaaactgctcagcatcaactgtctgaatgaagaatggtgtttcaatataattggaagattcaaatatgtatgcattccagggtgcacaaaaaatccatgttggtttttgaagaatgtttacctaattcatcaacacctctgctactgtggagtcaccttccatggtatttgccaagataaaggtcctgctcaatttgaatatgtgtggcaattgggatttgcaggatctgaaggcgaaaagtgccaaggggttattgatgcctatttctttctggctgcaaactgcactgaagatgcaacctatgtgaacgatcctgaagataataattcttcatgttggttcccacatgaaggcacaaaagagatttgtgcaaatggatgcagttgtttgagtgaagaagacagtcaggaatatcggtatctatgttttctcagatgggctggcaacatgtatctggaaaatacaactgatgatcaagaaaatgagtgtcaacatgaagctgtttgtaaagatgaaattaatagacccagaagaatcctcaacacggtgataccacaccaaattcagcaacatatagaaaggtttatacagcatgaccaggtgggatttatcgtaagaatataagtttgatttagtggcttaaaatcaattaatgtaatttaatgtatcaatagaataaataaagaagaaaatgcatgataatgtagatggagaaaaaaattgtattacagaatctcacaacactttatgaaacaaacactcaacaaataaagaataaaagggaacttccacaatctgataagagaagttaaaaaaaaataagaagaatgaagaaacataactaacattatactttacggtgaaaggctgaaagactggaattttaaatcaaaacaatgagataacactttacacccagcaattctacttctagtatatactcaaaaaattgaaaatatatgttctttacaaaaatttatatgtgaatgtttacagttttgttcgaaagagtcaaaaagttgaaacaacccaaatgaccatcaactgatgaatggatatataaaatttgttatatccatacaatgaaatgttattcagcaatagacaaagatgaattactgatatgtgcttcaatacgaataaacattgaaaacattttgataaggaaaagtagtaagccacaaaagacacatagaatagtgctcaacaaatacttgtttaatgaaacaatgattttcagaagcttttttatttactaagaaaattatccttcgttttgtgatgttatttccttttttctgattttgtgattctcttttgtttgccattattttttgatatccagagaatcttggataaattacaaaatttttgtaatttatcaacactttaatgagttcttgatattgtctcataattaatactaacaatggagcccaacaaatgttgcagatacaagtattttatataaaattaagtttctctatatcagttgcaatatctagaaattatatgtgtgataccacctgttataatgtcaaaagatatgcaaaatgtttagaattaaaaaaaagatgctctaattctccattaaaaagaccctctatataccactaagctcaatgaaaaagagaaaattatatatacactgaataaatggaaatataatgcatggagttaaatattaggccttaaattagctaaaatattaattcttcccaaattaattcacacatttaatgcaatagtaaaaatattgcaagttattttagaaactaattatcatgttatatatatttatgaataatattttctaaattatgaagtcatctttgaaaaggaagactaatggggtgggatctgatgaaccatatgacatgacagactacataacacatatgggtgcctttaaaggaaaaaaaataataatgggtcaacagagagctctgacaacaacccgagtatatacgggaactcaatatatgagaaatttggctataatctcatttgaacatacagggttctttagtaaatggtattgaggaaatggctcataataagaccttaaatgaaactggattacaaccttataccttatatagaagtagactctaaatgtgtatagggatctaaaagtttaaggtaaaatgacgatataaatgaaagaaatgtagaaaaatatctttgtgatttcgggatggagaaatttttcaattaaactcaatttataaggcaaaataatgatagtattataatgatagacactaataatgttgatgatgttaacggacacaaagttaatgaatagcgtataaacattttcttttaaagtgtattttaaatgggtgcagattaaaattcattatataaatgatgtattgcaaacaggtctgcatattaccacatttttttgccctgaaatcttcaaaaaatttttctgggggtttataaaatgtttaatgagccaaagactaaatcataccagccatattgttacttaagaccaggaaagatttgctaagtctgggatgttaatttcttaataccatgcccagactgtgaagtgttcatgactcccacctgtttttgaagcctcaaatttatgtctaagtcaccaatccctacttgctaccagaaatatcataacagaatgaaatatattcattcatacatttattatttattgaatctcctctaactggaagatatttttcaaaatgttatgacaatgagacatgatacctgtccccaggtaatgtactatacataggtaagattatacactcttcagaacacatctcatggttcttctgtttcatttagaaagtgaacacatttttaaagtactaaagtaattatttttttcactttctgaacatacaagttgcttgattatagcagtgtgtcttctggctttctttctggaagttttaaatttaacctgtttcctttacaggctattttaggagattcacattttctgtgtaatgttaaatatatccaaaacataattttcagttataagtaagagttctgtttcaaagtgtagaatctaaaagtccataagaaaatcaggtgaagtttcaaaaactatttctgtagagtcaggaggcttgtaaaaatagagctttatgtgaatatggcacaaaagtatagtataatttgaccaggattttcttaaattatttctgatcccaaaagtctaataattatttattctaagactattgtaatttctgccgtgatgtccgtgattttattaacaagttgaatagttggttttaggtttatttatttattttggctatactatgcaaacttttctgccttcaagtaaaagttttatgtgggtatatttttacctttaaagcaaaaaagatatcgaactgcatatgaaagtgtcatattgaatgtatttttgggttggggccagtcttgaaaccactagatcaagtgtctaaatctttttgtctaaggcacttacatacactgatatattttctctctttattatgctctagaaaaccaaataatcttggttcttaaatccttatagtaaaatgatatagaaatcattcatttaagcaattctagagtacatatcattgtattacccatacacataccaaaattattataacaaacttcattaaatgaagcatttttgaataataaa

SEQ ID NO: 131741 - DNA, 2295 bp, Homo sapiens
  Payload ID: 5712
  Gene Symbol: EYS
  Gene Name: eyes shut homolog (Drosophila)
  ENST ID: ENST00000398580
  CDS Start-End: 1-1420
cagcattaacacaaatgcattcacccctatcacaatacgctacacaacgcctgttggcagccctggagttgtttgtatgattgaaatgactgcagatggaaaacctccagtacagaagaaagacacagagatttcccatgcctctcaggcatattttgaatcaatgttccttggccatattcctgcaaatgttcaaattcataagaaagcaggtcctgtttatgggttcaggggctgcattctagaccttcaagtaaacaacaaagaattcttcatcatcgatgaagcacgacatggaaagaatattgagaactgccacgtcccttggtgtgctcatcatctgtgccgcaacaatggcacctgcatcagtgataatgaaaatctgttttgtgagtgtccaaggctgtattcaggcaagctgtgccagtttgcaagttgtgaaaacaacccatgtggaaatggtgccacctgtgttccaaaatccggaacagatattgtctgcctctgcccatatgggaggtctggacccctctgcactgatgctattaatattactcagccaaggttcagtggcacagatgcctttggatacacctcattcctggcttattcacggatctcagacatcagcttccattatgaattccacctgaagtttcagctggcaaacaaccactcagcactgcaaaataacttgatattttttactggacagaaaggccatgggttgaatggcgatgacttcctggctgtgggcctgctcaatggcagtgtggtttatagttataacctggggtctggcatagcaagcatcaggagcgagcccctcaatctgagccttggagtccacactgttcatctgggcaagttcttccaagagggctggctgaaggtagatgatcataaaaataaatccattatcgccccaggaagactggttggtctcaatgtcttcagtcagttttatgtaggtggctacagtgaatacactccagatctcttaccaaatggagcagattttaaaaatggttttcaaggctgtattttcactcttcaagttcgcactgagaaggatggccatttcagaggactgggaaatcctgagggccacccaaatgctggacgcagtgttggccagtgtcatgcttctccctgcagtttaatgaaatgtggcaatggtgggacatgcatagagagtggaactagtgtttactgcaattgtaccactgggtggaaaggatcattctgcacagagacagtttctacctgtgatcctgaacatgaccctccacaccactgtagcagaggagcaacctgcatttcattacctcatggatacacctgtttctgtcctctaggaaccactggaatctactgtgaacaaggtcatcaatttattggaaaagatgttttcaaataatttatccaacatttttggtggttttcatgatggagatgaggtaaatcatgttatctaatctactatactgctggaaacaaaagtcaactattggatttattttaaaagaagcccatctggccgggcgcagtggctcatgcctgtaatctcagcactttgggaggccaaggcgggcaaatcacctgaggtcaggagttcgagaccagcttggccaacatggggaaaccccgtctctactaaaaacacaaaaattagccgggtgtagtggtgggcgcccgtaatcccagctactcgggaggctgaggcaggagaatcgcttgaacccaggaggcagaggttgcagtgagccaagattgcgccactgcactccaacatgggtgacagagcagaactctgtctcagaaaaaaaaaaaaaagaaagaaagaagcccttctgaccagtattgcataaagcattaaaaactatagaagaaagttaaaagtgctatgagaggacattgcaagtgggaacaccatcacttggtcccaagttttgaggagcagatactgctagaccctgatcagtgattttaagggtagggaagggacactgataaagaaaaaggtccttccatagtagtacatttaatgtgccagcctgtaacttatccctccatcctcattaaagcagcaagaaagaagataaaacagtgtcctttttcctttttaaaatgcatttggtgtaaaaaataatgaggtatgcccaatatcatggtaactcaaagacagcttaactgatgaattaaaaattaaagtatgcttgaacacaagcaagatatggagtatgcatgagaaaaaaatacattataataaaaagaaaagagaagccactaaaa

SEQ ID NO: 131742 - DNA, 1253 bp, Homo sapiens
  Payload ID: 5712
  Gene Symbol: EYS
  Gene Name: eyes shut homolog (Drosophila)
  ENST ID: ENST00000471279
  CDS Start-End: 534-992
taaaggtgttttttgaaaactaatcagaagaggaatgcttatctcccaagaaaattgaaaccatctgtaaaagaatcttggctgtgctgtgttttgattagattgaagcttggtgtaaagagaaaacacaaaagaccgcagaatatttacaacatttgaattcctgtttctccatcaaagcacattgtcatcaaagctactttgggtatagaaaaaaggtcaattccaattcccaggaatccttaaccacaactttacttggaaatttccgctctttcataaatggaaaaacatgtagacggcaattggtggaagaatggcatccacaaccctcatcatatgtggtaaattggacactaacagaaaacatctgcttggacttctacagagattgctggtttttgggtgtaaacactaaaatagatacttcaggcaatcaagctgttccccagatttgccctttgcaaattcaattaggagatatccttgtaatttcttctgaaccatctcttcaatttccagaaataaatttgatgaatgtttctgaaacatctttcgttggctgtgtgcaaaataccacaacggaagatcagttactttttggctgcagactaaaaggaatgcacactgttaattctaagtggctgagtgttgggacacattattttatcacagttatggcaagtggtccatcaccttgtccactgggacttcgactaaatgtgacagtgaaacagcagttctgccaggaatctctgagttcagaattttgctctggtcatggtaaatgtcttagtgaagcttggagcaagacatatagctgccattgccagcctccattttctggaaaatactgccaggaacttgatgcatgttcttttaaaccatgtaaaaataatggcagttgcattaataaaagagaaaattgggatgagcaagcatatgaatgtgtctgtcacccaccatttacagggttgcttggaggcaaatgaagaaaaaagttctgcattagtgaggcagggatgtcagtatataaggaatttgaaagacatcaatgataatggcaaaaactgctcataaattaaattaagagcttaattaaactggggaaaaaaacatattgccaaattacatgcagttggtttgtaacagcatttgtccacttgctatgccctgggattttcaaggcacattcctctactaaggaaagaattgctcagaaataattggccagtgtcaaccacatgtctgtt

SEQ ID NO: 131743 - DNA, 10589 bp, Homo sapiens
  Payload ID: 5712
  Gene Symbol: EYS
  Gene Name: eyes shut homolog (Drosophila)
  Uniprot ID: Q5T1H1
  ENST ID: ENST00000503581
  CDS Start-End: 539-9973
agaaacaaagtgatacacgctaggcatgtccagacattaaccgtaatcagaagcctcctagggttgcaagcctccttggctaatggttgggctttgtgcctcactcttctcttacacctggggagtcaagtctggatcctctgctccatatttatttagcaaataaaacactgatctcaaacagcaacggaacctgtgtacttgaggtgttttttgaaaactaatcagaagaggaatgcttatctcccaagaaaattgaaaccatctgtaaaagaatcttggctgtgctgtgttttgattagattgaagcttggtgtaaagagaaaacacaaaagaccgcagaatatttacaacatttgaattcctgtttctccatcaaagcacattgtcatcaaagctactttgggtatagaaaaaaggtcaattccaattcccaggaatccttaaccacaactttacttggaaatttccggtaatacttaaaacaccattttgcagcaattctttatgataaactgtaaaatacagctacccgaaaatgactgacaaatcaatcgtcattctgagcctgatggtttttcacagctctttcataaatggaaaaacatgtagacggcaattggtggaagaatggcatccacaaccctcatcatatgtggtaaattggacactaacagaaaacatctgcttggacttctacagagattgctggtttttgggtgtaaacactaaaatagatacttcaggcaatcaagctgttccccagatttgccctttgcaaattcaattaggagatatccttgtaatttcttctgaaccatctcttcaatttccagaaataaatttgatgaatgtttctgaaacatctttcgttggctgtgtgcaaaataccacaacggaagatcagttactttttggctgcagactaaaaggaatgcacactgttaattctaagtggctgagtgttgggacacattattttatcacagttatggcaagtggtccatcaccttgtccactgggacttcgactaaatgtgacagtgaaacagcagttctgccaggaatctctgagttcagaattttgctctggtcatggtaaatgtcttagtgaagcttggagcaagacatatagctgccattgccagcctccattttctggaaaatactgccaggaacttgatgcatgttcttttaaaccatgtaaaaataatggcagttgcattaataaaagagaaaattgggatgagcaagcatatgaatgtgtctgtcacccaccatttacaggaaagaattgctcagaaataattggccagtgtcaaccacatgtctgtttccatggaaactgcagcaatattacttcaaatagtttcatttgtgaatgtgatgagcaattttcaggtccattctgtgaggtgtcagcaaaaccttgtgtttctctgcttttttggaaaagaggaatttgcccaaatagcagttctgcttatacttatgaatgcccaaaaggatcttccagccaaaatggtgaaactgatgtcagtgagttttcattagtaccatgtcagaatggtactgactgcatcaaaatatcaaatgatgttatgtgcatctgttcaccaatatttacagatttgctttgtaagagcattcaaacatcatgtgagtcatttcctttgaggaataatgctacatgtaagaaatgtgagaaagattatccttgcagctgtatatcaggatttactgaaaaaaactgtgagaaagcaattgaccactgtaaactgctcagcatcaactgtctgaatgaagaatggtgtttcaatataattggaagattcaaatatgtatgcattccagggtgcacaaaaaatccatgttggtttttgaagaatgtttacctaattcatcaacacctctgctactgtggagtcaccttccatggtatttgccaagataaaggtcctgctcaatttgaatatgtgtggcaattgggatttgcaggatctgaaggcgaaaagtgccaaggggttattgatgcctatttctttctggctgcaaactgcactgaagatgcaacctatgtgaacgatcctgaagataataattcttcatgttggttcccacatgaaggcacaaaagagatttgtgcaaatggatgcagttgtttgagtgaagaagacagtcaggaatatcggtatctatgttttctcagatgggctggcaacatgtatctggaaaatacaactgatgatcaagaaaatgagtgtcaacatgaagctgtttgtaaagatgaaattaatagacccagatgcagctgttctcttagttacattggcagattgtgtgttgtcaatgttgactattgcttagggaaccacagtatatcagtgcatggcctctgcctggccctttcgcacaattgtaactgtagcggtctgcaaagatatgaaaggaacatctgtgagatagatactgaagactgcaaatctgcgtcctgcaaaaatggaacaactagtacacatttaaggggatatttcttccgcaagtgtgtcccaggatttaaaggtacgcaatgtgaaattgatatagatgagtgtgcttcacatccctgcaaaaatggagccacctgcattgaccaacctggtaattacttctgccagtgtgtgcctccatttaaagtggttgatggcttttcctgcttatgcaatccaggctatgttgggataagatgtgaacaggacattgatgactgcatcctgaatgcctgtgagcacaattctacctgcaaagacctgcatctcagctaccagtgtgtgtgcctatctgattgggaaggaaatttttgtgaacaagaatccaatgagtgtaaaatgaatccttgcaagaacaattccacctgtactgacctttacaaaagctatcgatgtgagtgtacatctggatggactggacagaactgtagtgaagaaataaatgaatgcgactctgatccatgcatgaatggaggtctttgtcatgaatctaccatccctggacaatttgtatgtctgtgcccacccctttatactggacaattttgccaccaacgctataacctttgtgacctacttcataacccttgcagaaacaactcaacatgcttagctttggtagacgcaaatcagcattgtatttgtagagaagaatttgaaggtaaaaactgtgaaattgatgtgaaagactgcctcttcctttcctgccaggattatggtgactgtgaagatatggtcaacaatttcaggtgtatttgcagacctgggttttctggatctctgtgtgaaattgaaattaatgaatgttcctctgaaccttgcaaaaataatggaacatgtgtggatctgacaaacagatttttttgtaattgtgaacctgagtaccatgggcccttctgtgaacttgatgtaaataaatgtaaaatctcaccttgtctagatgaagaaaattgtgtctacaggactgatggatacaactgcctctgtgcccctggttatacaggcatcaactgtgaaataaatctagatgaatgcctatcagagccctgtctccatgatggagtttgtatcgatggcatcaatcattatacctgtgactgcaagagtgggttttttggaacacactgtgaaacaaacgccaatgattgcctttcaaatccttgtctacatggaaggtgcacagaacttattaatgaatatccatgttcatgtgatgcagatgggactagcacacaatgtaagatcaaaattaatgactgcacatcaatcccttgtatgaatgaaggcttctgtcagaagtcagcacatggatttacttgcatttgcccacgtggatacactggtgcatactgtgaaaaaagcattgataattgtgctgagcctgaacttaattcagtcatctgtcttaatggagggatctgtgttgatgggcctggacatacttttgactgcagatgtcttcctggattttctggtcaattttgtgaaattaatataaatgaatgctcttcatcaccatgtctacatggtgcagactgtgaagatcacatcaatggatatgtttgcaaatgccaaccaggatggtctggacaccactgtgagaatgagcttgagtgcattcccaactcatgtgttcatgaactctgcatggagaatgaacctggctcgacatgtttatgcacacctggatttatgacctgctccattgggcttctttgtggtgatgaaataaggagaattacctgtttaactcccatctttcaaagaacagatcccatttccacacagacatatacaattcccccttctgagactttggtcagcagctttccatctataaaggctactagaataccagccataatggacacttacccagttgatcaaggtccaaaacagacaggcattgtcaagcacgacattctcccaaccactggtttggcaacattaagaattagcacacccttggaaagctacttactccaagaactgattgtcactagagagctttcagcaaaacacagtcttctttcttccgcagatgtttcctcttctcgattcctgaattttggtattcgtgacccagcacaaattgtccaggacaaaacatcggtatcacatatgcctattcgaacttcagcagccacactaggtttcttttttcctgataggagagcaaggaccccatttatcatgtcttccttaatgtcagattttatttttcctacacaatctttattatttgagaactgtcagactgttgctttatctgctaccccaacgacttcagtaattagaagcattccaggggctgatattgagctaaacaggcagtcattactctcccgtggattcctgcttatagctgcctccataagtgcaactccagttgtctctaggggggctcaagaggatattgaagaatattcagctgattctttaatttcaagaagagagcactggagattgctcagcccctcgatgtctcccatttttcctgctaaggtaattatatctaaacaggtaaccatcttaaactcatcagctctgcaccggttcagtacaaaagccttcaatcccagtgaatatcaggctattactgaggcttcaagcaaccagagactcacaaacatcaaatcacaggctgctgattctttaagagaattaagccaaacatgtgcaacatgttctatgactgaaataaaatcctctcgtgaattctcagatcaagttttgcatagcaaacagtcccacttttatgagacattctggatgaactcagcgatattagccagctggtatgcactaatgggagctcaaactatcacttctgggcattcattttcttctgctactgaaataacaccatcagtggcattcacagaagtgccatctttatttccttctaaaaagagtgcaaaaagaacaattttatcctcatccttggaagaatccattaccctatcaagtaatttggatgttaatttatgtttggataagacttgtttatccattgtcccttcacaaactatctcttcagacttgatgaattctgatttgacttcaaaaatgactactgatgaactgtcagtatcagaaaacattttaaaactattgaaaataagacaatatggcataactatgggacccactgaggtactaaatcaagagagcttattggacatggaaaaaagtaaaggatctcatacactgttcaaacttcacccaagtgatagttctctggattttgagttaaacttacaaatttatccggatgttactttaaagacatattcagaaattacacatgcaaatgacttcaaaaataatctgccaccattgacaggctcagtgcctgatttttcagaagtcaccaccaatgttgcattttatacagtttcagcaactccagcactttcaatacagacgtcttcctccatgtctgtaattaggccagattggccatattttacagattatatgacctctcttaaaaaagaggtcaagacttcttcagaatggtccaaatgggaacttcagcctagtgtgcaatatcaggaatttcccactgcaagccggcatcttcccttcactagatctcttactttgtcttcactggaatccattctggcacctcaacggctgatgatttctgatttcagttgtgttcgttattatggagattcttatctagaatttcagaatgtggctttaaatccacaaaataacatctccctagaatttcagaccttcagctcctatggacttctgctgtatgtcaagcaagactcaaatttagtagatggattttttattcaattgtttattgaaaatggtactttaaagtaccacttttactgtcctggtgaagcaaaatttaaaagcattaatactactgttagagtggacaacgggcaaaagtatacactgcttatcaggcaagaattggatccatgtaacgctgagctgactattttagggaggaatacacaaatatgcgaatctatcaatcatgtactcggaaaacccctgccaaaatcaggatctgtcttcattggtggatttccagaccttcatgggaaaatccagatgcctgtaccagtcaagaattttactggctgcatagaagttatagaaataaataactggagatctttcattccatccaaggcagtgaaaaactatcacattaacaattgcagatcccagggatttatgctgtctccaacagcctcctttgttgatgcttctgatgtgacacaaggggttgataccatgtggacttctgtcagcccctctgttgcagcaccctctgtgtgccagcaggatgtatgccacaatggaggcacatgccatgccatcttcctctccagtggcatagtgtcattccaatgtgactgtccactacatttcactggccgcttctgtgaaaaagatgcaggtttattctttccatctttcaatgggaattcctatttagaactgccctttttgaagtttgtcctggagaaggaacataacagaactgttaccatctacttgactataaaaacaaacagtttaaatggaactattctttacagtaatgggaataattgtggaaagcagtttcttcatttatttcttgtggaaggaaggccatcagttaaatatgggtgtggaaattctcaaaatattttgactgtttctgctaattacagcattaacacaaatgcattcacccctatcacaatacgctacacaacgcctgttggcagccctggagttgtttgtatgattgaaatgactgcagatggaaaacctccagtacagaagaaagacacagagatttcccatgcctctcaggcatattttgaatcaatgttccttggccatattcctgcaaatgttcaaattcataagaaagcaggtcctgtttatgggttcaggggctgcattctagaccttcaagtaaacaacaaagaattcttcatcatcgatgaagcacgacatggaaagaatattgagaactgccacgtcccttggtgtgctcatcatctgtgccgcaacaatggcacctgcatcagtgataatgaaaatctgttttgtgagtgtccaaggctgtattcaggcaagctgtgccagtttgcaagttgtgaaaacaacccatgtggaaatggtgccacctgtgttccaaaatccggaacagatattgtctgcctctgcccatatgggaggtctggacccctctgcactgatgctattaatattactcagccaaggttcagtggcacagatgcctttggatacacctcattcctggcttattcacggatctcagacatcagcttccattatgaattccacctgaagtttcagctggcaaacaaccactcagcactgcaaaataacttgatattttttactggacagaaaggccatgggttgaatggcgatgacttcctggctgtgggcctgctcaatggcagtgtggtttatagttataacctggggtctggcatagcaagcatcaggagcgagcccctcaatctgagccttggagtccacactgttcatctgggcaagttcttccaagagggctggctgaaggtagatgatcataaaaataaatccattatcgccccaggaagactggttggtctcaatgtcttcagtcagttttatgtaggtggctacagtgaatacactccagatctcttaccaaatggagcagattttaaaaatggttttcaaggctgtattttcactcttcaagttcgcactgagaaggatggccatttcagaggactgggaaatcctgagggccacccaaatgctggacgcagtgttggccagtgtcatgcttctccctgcagtttaatgaaatgtggcaatggtgggacatgcatagagagtggaactagtgtttactgcaattgtaccactgggtggaaaggatcattctgcacagagacagtttctacctgtgatcctgaacatgaccctccacaccactgtagcagaggagcaacctgcatttcattacctcatggatacacctgtttctgtcctctaggaaccactggaatctactgtgaacaagctttatccataagtgatccatctttcagaagcaatgagttatcctggatgtcttttgcttcctttcatgttcgaaaaaagacacatattcaattgcagtttcagcctctcgctgcagatggtatcctattttatgctgcacaacacttaaaagcccaatcaggtgattttttatgcatctctttagtaaatagttccgttcaacttcgctacaaccttggcgacagaactatcattctagaaactctccaaaaagtaactataaacggaagtacttggcatataataaaagcaggaagagttggtgcagaaggctacctggatctagatgggataaatgtaacagaaaaggcctccactaaaatgagttctctggacacaaatacagacttctatattggaggagtatcttctttaaatcttgtaaatcccatggcaatagaaaatgaacctgtaggttttcaaggctgtatccgacaagttatcataaataatcaagaattacaattaactgaatttggagcaaaaggtggctcaaatgtaggtgactgtgatgggacagcctgtgggtacaacacatgcagaaatggaggtgaatgtacagtaaatggcacaactttttcttgcagatgtttgccagattgggctggaaatacatgtaaccagtctgtgtcctgtttgaataatctttgcctccaccaatctttatgtatacctgaccaatcattttcttacagttgcctgtgtactttgggttgggtgggaaggtattgtgaaaacaaaacttcattttcaactgcaaaatttatgggtaattcttacattaaatacattgatccaaattatagaatgagaaacctccagttcactactatatccttaaatttcagtaccactaaaacagaaggtctaattgtatggatgggaatagctcaaaatgaagaaaatgattttctggcaattggtctccataatcagaccttgaaaatagcagttaacttgggagaaagaatctctgtgcctatgagctataacaatggcacattctgttgtaataaatggcaccatgtagttgtaattcaaaatcagactcttatcaaggcctacataaataacagtctaattctttccgaggatattgatccacataaaaactttgtggctctaaactatgatggcatttgttatctagggggctttgaatatggtagaaaggtaaatatcgttactcaagagatttttaaaaccaattttgttggcaaaattaaagatgttgtattttttcaggaaccaaaaaacattgaactaattaaattagaaggatacaatgtttatgatggagatgaacaaaatgaggttacataagttaacactagagattttagtacacactatacataaatgcagttattttgatagttatttctttgatacattgcttacggggaatcaactgtttactatattacctgaaatagtctaaatgctaacatatctttttgataagattgtaaaatgtcactgaaggttctgattgtttttcctacatctaatttatctgtatatattttgattcatgttttaactccattagttcagtgcttattcacagaatgtgcttattcactttgcttattcactttttacctatccctaatgcttacattttaaaatcaacgtgtaaacacaattttaaaaatcaatgtgtaagctgaactttaaaatgtttaaaattcagttgggaatgaattagggataggtacaaataagaaaaaaatcaagttattaatcaaaggaaaaataaaaattatacaaagcaatgtaaccatattgtattacatggcttagctacaacttatttatatgattcaacaatgtaaaacttgaacatagatttaaaccaaaaattattgcatgaatgtagaaagagaaggtgagaggagaggagaacaggctggtaagagctaaatccttatctttt

SEQ ID NO: 131744 - DNA, 3068 bp, Homo sapiens
  Payload ID: 5713
  Gene Symbol: EZR
  Gene Name: ezrin
  Uniprot ID: P15311
  ENST ID: ENST00000337147
  CDS Start-End: 135-1895
ggcgcggcaggaggacgaggcagggcgggcgggcgctctaagggttctgctctgactccaggttgggacagcgtcttcgctgctgctggatagtcgtgttttcggggatcgaggatactcaccagaaaccgaaaatgccgaaaccaatcaatgtccgagttaccaccatggatgcagagctggagtttgcaatccagccaaatacaactggaaaacagctttttgatcaggtggtaaagactatcggcctccgggaagtgtggtactttggcctccactatgtggataataaaggatttcctacctggctgaagctggataagaaggtgtctgcccaggaggtcaggaaggagaatcccctccagttcaagttccgggccaagttctaccctgaagatgtggctgaggagctcatccaggacatcacccagaaacttttcttcctccaagtgaaggaaggaatccttagcgatgagatctactgcccccctgagactgccgtgctcttggggtcctacgctgtgcaggccaagtttggggactacaacaaagaagtgcacaagtctgggtacctcagctctgagcggctgatccctcaaagagtgatggaccagcacaaacttaccagggaccagtgggaggaccggatccaggtgtggcatgcggaacaccgtgggatgctcaaagataatgctatgttggaatacctgaagattgctcaggacctggaaatgtatggaatcaactatttcgagataaaaaacaagaaaggaacagacctttggcttggagttgatgcccttggactgaatatttatgagaaagatgataagttaaccccaaagattggctttccttggagtgaaatcaggaacatctctttcaatgacaaaaagtttgtcattaaacccatcgacaagaaggcacctgactttgtgttttatgccccacgtctgagaatcaacaagcggatcctgcagctctgcatgggcaaccatgagttgtatatgcgccgcaggaagcctgacaccatcgaggtgcagcagatgaaggcccaggcccgggaggagaagcatcagaagcagctggagcggcaacagctggaaacagagaagaaaaggagagaaaccgtggagagagagaaagagcagatgatgcgcgagaaggaggagttgatgctgcggctgcaggactatgaggagaagacaaagaaggcagagagagagctctcggagcagattcagagggccctgcagctggaggaggagaggaagcgggcacaggaggaggccgagcgcctagaggctgaccgtatggctgcactgcgggctaaggaggagctggagagacaggcggtggatcagataaagagccaggagcagctggctgcggagcttgcagaatacactgccaagattgccctcctggaagaggcgcggaggcgcaaggaggatgaagttgaagagtggcagcacagggccaaagaagcccaggatgacctggtgaagaccaaggaggagctgcacctggtgatgacagcacccccgcccccaccaccccccgtgtacgagccggtgagctaccatgtccaggagagcttgcaggatgagggcgcagagcccacgggctacagcgcggagctgtctagtgagggcatccgggatgaccgcaatgaggagaagcgcatcactgaggcagagaagaacgagcgtgtgcagcggcagctgctgacgctgagcagcgagctgtcccaggcccgagatgagaataagaggacccacaatgacatcatccacaacgagaacatgaggcaaggccgggacaagtacaagacgctgcggcagatccggcagggcaacaccaagcagcgcatcgacgagttcgaggccctgtaacagccaggccaggaccaagggcagaggggtgctcatagcgggcgctgccagccccgccacgcttgtgtctttagtgctccaagtctaggaactccctcagatcccagttcctttagaaagcagttacccaacagaaacattctgggctgggaaccagggaggcgccctggtttgttttccccagttgtaatagtgccaagcaggcctgattctcgcgattattctcgaatcacctcctgtgttgtgctgggagcaggactgattgaattacggaaaatgcctgtaaagtctgagtaagaaacttcatgctggcctgtgtgatacaagagtcagcatcattaaaggaaacgtggcaggacttccatctgtgccatacttgttctgtattcgaaatgagctcaaattgattttttaatttctatgaaggatccatctttgtatatttacatgcttagaggggtgaaaattattttggaaattgagtctgaagcactctcgcacacacagtgattccctcctcccgtcactccacgcagctggcagagagcacagtgatcaccagcgtgagtggtggaggaggacacttggatttttttttttgttttttttttttttgcttaacagttttagaatacattgtacttatacaccttattaatgatcagctatatactatttatatacaagtgataatacagatttgtaacattagttttaaaaagggaaagttttgttctgtatattttgttaccttttacagaataaaagaattacatatgaaaaaccctctaaaccatggcacttgatgtgatgtggcaggagggcagtggtggagctggacctgcctgctgcagtcacgtgtaaacaggattattattagtgttttatgcatgtaatggactatgcacacttttaattttgtcagattcacacatgccactatgagctttcagactccagctgtgaagagactctgtttgcttgtgtttgtttgtttgcagtctctctctgccatggccttggcaggctgctggaaggcagcttgtggaggccgttggttccgcccactcattccttctcgtgcactgctttctccttcacagctaagatgccatgtgcaggtggattccatgccgcagacatgaaataaaagctttgcaaaggcacgaagca

SEQ ID NO: 131745 - DNA, 3096 bp, Homo sapiens
  Payload ID: 5713
  Gene Symbol: EZR
  Gene Name: ezrin
  Uniprot ID: P15311
  ENST ID: ENST00000367075
  CDS Start-End: 170-1930
ggacccgccccgccggggcttttgggagcgcgggcagcgagcgcactcggcggacgcaagggcggcggggagcacacggagcactgcaggcgccgggttgggacagcgtcttcgctgctgctggatagtcgtgttttcggggatcgaggatactcaccagaaaccgaaaatgccgaaaccaatcaatgtccgagttaccaccatggatgcagagctggagtttgcaatccagccaaatacaactggaaaacagctttttgatcaggtggtaaagactatcggcctccgggaagtgtggtactttggcctccactatgtggataataaaggatttcctacctggctgaagctggataagaaggtgtctgcccaggaggtcaggaaggagaatcccctccagttcaagttccgggccaagttctaccctgaagatgtggctgaggagctcatccaggacatcacccagaaacttttcttcctccaagtgaaggaaggaatccttagcgatgagatctactgcccccctgagactgccgtgctcttggggtcctacgctgtgcaggccaagtttggggactacaacaaagaagtgcacaagtctgggtacctcagctctgagcggctgatccctcaaagagtgatggaccagcacaaacttaccagggaccagtgggaggaccggatccaggtgtggcatgcggaacaccgtgggatgctcaaagataatgctatgttggaatacctgaagattgctcaggacctggaaatgtatggaatcaactatttcgagataaaaaacaagaaaggaacagacctttggcttggagttgatgcccttggactgaatatttatgagaaagatgataagttaaccccaaagattggctttccttggagtgaaatcaggaacatctctttcaatgacaaaaagtttgtcattaaacccatcgacaagaaggcacctgactttgtgttttatgccccacgtctgagaatcaacaagcggatcctgcagctctgcatgggcaaccatgagttgtatatgcgccgcaggaagcctgacaccatcgaggtgcagcagatgaaggcccaggcccgggaggagaagcatcagaagcagctggagcggcaacagctggaaacagagaagaaaaggagagaaaccgtggagagagagaaagagcagatgatgcgcgagaaggaggagttgatgctgcggctgcaggactatgaggagaagacaaagaaggcagagagagagctctcggagcagattcagagggccctgcagctggaggaggagaggaagcgggcacaggaggaggccgagcgcctagaggctgaccgtatggctgcactgcgggctaaggaggagctggagagacaggcggtggatcagataaagagccaggagcagctggctgcggagcttgcagaatacactgccaagattgccctcctggaagaggcgcggaggcgcaaggaggatgaagttgaagagtggcagcacagggccaaagaagcccaggatgacctggtgaagaccaaggaggagctgcacctggtgatgacagcacccccgcccccaccaccccccgtgtacgagccggtgagctaccatgtccaggagagcttgcaggatgagggcgcagagcccacgggctacagcgcggagctgtctagtgagggcatccgggatgaccgcaatgaggagaagcgcatcactgaggcagagaagaacgagcgtgtgcagcggcagctgctgacgctgagcagcgagctgtcccaggcccgagatgagaataagaggacccacaatgacatcatccacaacgagaacatgaggcaaggccgggacaagtacaagacgctgcggcagatccggcagggcaacaccaagcagcgcatcgacgagttcgaggccctgtaacagccaggccaggaccaagggcagaggggtgctcatagcgggcgctgccagccccgccacgcttgtgtctttagtgctccaagtctaggaactccctcagatcccagttcctttagaaagcagttacccaacagaaacattctgggctgggaaccagggaggcgccctggtttgttttccccagttgtaatagtgccaagcaggcctgattctcgcgattattctcgaatcacctcctgtgttgtgctgggagcaggactgattgaattacggaaaatgcctgtaaagtctgagtaagaaacttcatgctggcctgtgtgatacaagagtcagcatcattaaaggaaacgtggcaggacttccatctgtgccatacttgttctgtattcgaaatgagctcaaattgattttttaatttctatgaaggatccatctttgtatatttacatgcttagaggggtgaaaattattttggaaattgagtctgaagcactctcgcacacacagtgattccctcctcccgtcactccacgcagctggcagagagcacagtgatcaccagcgtgagtggtggaggaggacacttggatttttttttttgttttttttttttttgcttaacagttttagaatacattgtacttatacaccttattaatgatcagctatatactatttatatacaagtgataatacagatttgtaacattagttttaaaaagggaaagttttgttctgtatattttgttaccttttacagaataaaagaattacatatgaaaaaccctctaaaccatggcacttgatgtgatgtggcaggagggcagtggtggagctggacctgcctgctgcagtcacgtgtaaacaggattattattagtgttttatgcatgtaatggactatgcacacttttaattttgtcagattcacacatgccactatgagctttcagactccagctgtgaagagactctgtttgcttgtgtttgtttgtttgcagtctctctctgccatggccttggcaggctgctggaaggcagcttgtggaggccgttggttccgcccactcattccttctcgtgcactgctttctccttcacagctaagatgccatgtgcaggtggattccatgccgcagacatgaaataaaagctttgcaaaggca

SEQ ID NO: 131746 - DNA, 2933 bp, Homo sapiens
  Payload ID: 5713
  Gene Symbol: EZR
  Gene Name: ezrin
  ENST ID: ENST00000392177
  CDS Start-End: 1-1761
atgccgtcgccaatcaatgtccgagttaccaccatggatgcagagctggagtttgcaatccagccaaatacaactggaaaacagctttttgatcaggtggtaaagactatcggcctccgggaagtgtggtactttggcctccactatgtggataataaaggatttcctacctggctgaagctggataagaaggtgtctgcccaggaggtcaggaaggagaatcccctccagttcaagttccgggccaagttctaccctgaagatgtggctgaggagctcatccaggacatcacccagaaacttttcttcctccaagtgaaggaaggaatccttagcgatgagatctactgcccccctgagactgccgtgctcttggggtcctacgctgtgcaggccaagtttggggactacaacaaagaagtgcacaagtctgggtacctcagctctgagcggctgatccctcaaagagtgatggaccagcacaaacttaccagggaccagtgggaggaccggatccaggtgtggcatgcggaacaccgtgggatgctcaaagataatgctatgttggaatacctgaagattgctcaggacctggaaatgtatggaatcaactatttcgagataaaaaacaagaaaggaacagacctttggcttggagttgatgcccttggactgaatatttatgagaaagatgataagttaaccccaaagattggctttccttggagtgaaatcaggaacatctctttcaatgacaaaaagtttgtcattaaacccatcgacaagaaggcacctgactttgtgttttatgccccacgtctgagaatcaacaagcggatcctgcagctctgcatgggcaaccatgagttgtatatgcgccgcaggaagcctgacaccatcgaggtgcagcagatgaaggcccaggcccgggaggagaagcatcagaagcagctggagcggcaacagctggaaacagagaagaaaaggagagaaaccgtggagagagagaaagagcagatgatgcgcgagaaggaggagttgatgctgcggctgcaggactatgaggagaagacaaagaaggcagagagagagctctcggagcagattcagagggccctgcagctggaggaggagaggaagcgggcacaggaggaggccgagcgcctagaggctgaccgtatggctgcactgcgggctaaggaggagctggagagacaggcggtggatcagataaagagccaggagcagctggctgcggagcttgcagaatacactgccaagattgccctcctggaagaggcgcggaggcgcaaggaggatgaagttgaagagtggcagcacagggccaaagaagcccaggatgacctggtgaagaccaaggaggagctgcacctggtgatgacagcacccccgcccccaccaccccccgtgtacgagccggtgagctaccatgtccaggagagcttgcaggatgagggcgcagagcccacgggctacagcgcggagctgtctagtgagggcatccgggatgaccgcaatgaggagaagcgcatcactgaggcagagaagaacgagcgtgtgcagcggcagctgctgacgctgagcagcgagctgtcccaggcccgagatgagaataagaggacccacaatgacatcatccacaacgagaacatgaggcaaggccgggacaagtacaagacgctgcggcagatccggcagggcaacaccaagcagcgcatcgacgagttcgaggccctgtaacagccaggccaggaccaagggcagaggggtgctcatagcgggcgctgccagccccgccacgcttgtgtctttagtgctccaagtctaggaactccctcagatcccagttcctttagaaagcagttacccaacagaaacattctgggctgggaaccagggaggcgccctggtttgttttccccagttgtaatagtgccaagcaggcctgattctcgcgattattctcgaatcacctcctgtgttgtgctgggagcaggactgattgaattacggaaaatgcctgtaaagtctgagtaagaaacttcatgctggcctgtgtgatacaagagtcagcatcattaaaggaaacgtggcaggacttccatctgtgccatacttgttctgtattcgaaatgagctcaaattgattttttaatttctatgaaggatccatctttgtatatttacatgcttagaggggtgaaaattattttggaaattgagtctgaagcactctcgcacacacagtgattccctcctcccgtcactccacgcagctggcagagagcacagtgatcaccagcgtgagtggtggaggaggacacttggatttttttttttgttttttttttttttgcttaacagttttagaatacattgtacttatacaccttattaatgatcagctatatactatttatatacaagtgataatacagatttgtaacattagttttaaaaagggaaagttttgttctgtatattttgttaccttttacagaataaaagaattacatatgaaaaaccctctaaaccatggcacttgatgtgatgtggcaggagggcagtggtggagctggacctgcctgctgcagtcacgtgtaaacaggattattattagtgttttatgcatgtaatggactatgcacacttttaattttgtcagattcacacatgccactatgagctttcagactccagctgtgaagagactctgtttgcttgtgtttgtttgtttgcagtctctctctgccatggccttggcaggctgctggaaggcagcttgtggaggccgttggttccgcccactcattccttctcgtgcactgctttctccttcacagctaagatgccatgtgcaggtggattccatgccgcagacatgaaataaaagctttgcaaaggcacgaagc

SEQ ID NO: 131747 - DNA, 4835 bp, Homo sapiens
  Payload ID: 5714
  Gene Symbol: F11R
  Gene Name: F11 receptor
  Uniprot ID: Q9Y624
  ENST ID: ENST00000368026
  CDS Start-End: 276-1175
aatctgaggcagctcctgtggggaaaggcgccagtgcgccgaggcggggagtggcggcggggtaacacctggccgaggtgactcgttctgaagagcagcggttccttacaccaatcggaacgtgcaggggtggggagctggccaatcaggcgcggagggcggggccgggcggggttccacctggcggctggctctcagtcccctcgctgtagtcgcggagctgtgtctgttcccaggagtccttcggcggctgttgtgtcgggagcctgatcgcgatggggacaaaggcgcaagtcgagaggaaactgttgtgcctcttcatattggcgatcctgttgtgctccctggcattgggcagtgttacagtgcactcttctgaacctgaagtcagaattcctgagaataatcctgtgaagttgtcctgtgcctactcgggcttttcttctccccgtgtggagtggaagtttgaccaaggagacaccaccagactcgtttgctataataacaagatcacagcttcctatgaggaccgggtgaccttcttgccaactggtatcaccttcaagtccgtgacacgggaagacactgggacatacacttgtatggtctctgaggaaggcggcaacagctatggggaggtcaaggtcaagctcatcgtgcttgtgcctccatccaagcctacagttaacatcccctcctctgccaccattgggaaccgggcagtgctgacatgctcagaacaagatggttccccaccttctgaatacacctggttcaaagatgggatagtgatgcctacgaatcccaaaagcacccgtgccttcagcaactcttcctatgtcctgaatcccacaacaggagagctggtctttgatcccctgtcagcctctgatactggagaatacagctgtgaggcacggaatgggtatgggacacccatgacttcaaatgctgtgcgcatggaagctgtggagcggaatgtgggggtcatcgtggcagccgtccttgtaaccctgattctcctgggaatcttggtttttggcatctggtttgcctatagccgaggccactttgacagaacaaagaaagggacttcgagtaagaaggtgatttacagccagcctagtgcccgaagtgaaggagaattcaaacagacctcgtcattcctggtgtgagcctggtcggctcaccgcctatcatctgcatttgccttactcaggtgctaccggactctggcccctgatgtctgtagtttcacaggatgccttatttgtcttctacaccccacagggccccctacttcttcggatgtgtttttaataatgtcagctatgtgccccatcctccttcatgccctccctccctttcctaccactgctgagtggcctggaacttgtttaaagtgtttattccccatttctttgagggatcaggaaggaatcctgggtatgccattgacttcccttctaagtagacagcaaaaatggcgggggtcgcaggaatctgcactcaactgcccacctggctggcagggatctttgaataggtatcttgagcttggttctgggctctttccttgtgtactgacgaccagggccagctgttctagagcgggaattagaggctagagcggctgaaatggttgtttggtgatgacactggggtccttccatctctggggcccactctcttctgtcttcccatgggaagtgccactgggatccctctgccctgtcctcctgaatacaagctgactgacattgactgtgtctgtggaaaatgggagctcttgttgtggagagcatagtaaattttcagagaacttgaagccaaaaggatttaaaaccgctgctctaaagaaaagaaaactggaggctgggcgcagtggctcacgcctataatcccagaggctgaggcaggcggatcacctgaggtcaggagttcaagatcagcctgaccaacatggagaaaccctactaaaaatacaaagttagccaggcatagtggtgcatgcctgtaatcccagctgctcaggagcctggcaacaagagcaaaactccagctcaaaaaaaaaaagaaagaaaagaaagctggagctggtggcttaggccatcacccttcccttggctggaactactggacagacccttttgagatgtgcctgtggtgctgtggagatgtgtgtagtggtcttagctctttgttgagcttgtgtgtgtgttgtgtagtcttagctgtatgctgaaattgggcgtgtgttggagggcttcttagctctttggtgagattgtatttctatgtgtttgtatcagctgaatgttgctggaaataaaaccttggtttgtcaaggctcttttttgtgggaagtaagtaggggaaaaggtctttgagggttcctaggctcctttgtacaacaggaaaatgcctcaaagccttgcttcccagcaacctggggctggttcccagtgcctggtcctgccccttcctggttcttatctcaaggcagagcttctgaatttcaggccttcattccagagccctcttgtggccaggccttcctttgctggaggaaggtacacagggtgaagctgatgctgtacttgggggatctccttggcctgttccaccaagtgagagaaggtacttactcttgtacctcctgttcagccaggtgcattaacagacctccctacagctgtaggaactactgtcccagagctgaggcaaggggatttctcaggtcatttggagaacaagtgctttagtagtagtttaaagtagtaactgctactgtatttagtggggtggaattcagaagaaatttgaagaccagatcatgggtggtctgcatgtgaatgaacaggaatgagccggacagcctggctgtcattgctttcttcctccccatttggacccttctctgcccttacatttttgtttctccatctaccaccatccaccagtctatttattaacttagcaagaggacaagtaaagggccctcttggcttgattttgcttctttctttctgtggaggatatactaagtgcgactttgccctatcctatttggaaatccctaacagaattgagttttctattaaggatccaaaaagaaaaacaaaatgctaatgaagccatcagtcaagggtcacatgccaataaacaataaattttccagaagaaatgaaatccaactagacaaataaagtagagcttatgaaatggttcagtaaagatgagtttgttgttttttgttttgttttgttttgtttttttaaagacggagtctcgctctgtcacccaggctggagtgcagtggtatgatcttggctcactgtaacctccgcctcccgggttcaagccattctcctgcctcagtctcctgagtagctgggattacgggtgcgtgccaccatgcctggctaatttttgtgtttttagtagagacagggtttcaccatgttggtcgggctggtctcaaactcctgacctcttgatccgcctgccttggcctcccaaagtgatgggattacagatgtgagccaccgtgcctagccaaggatgagatttttaaagtatgtttcagttctgtgtcatggttggaagacagagtaggaaggatatggaaaaggtcatggggaagcagaggtgattcatggctctgtgaatttgaggtgaatggttccttattgtctaggccacttgtgaagaatatgagtcagttattgccagccttggaatttacttctctagcttacaatggaccttttgaactggaaaacaccttgtctgcattcactttaaaatgtcaaaactaatttttataataaatgtttattttcacattgagtttgtttaaatcctgaagttcttaccttaagagaattgggactcctagagtgattggacattcaaaatattcctgatagtcttgttaattaagagattaggatatctttccattaccttgataattacgttttaatttagcttttttcattggcctgtgtttaaatgcaaataaccccacaatggacatttcctatgttaaagtgacatttaggggataaaaaatgagagcagttccatggattttggtgtttcccctgagacatgaactcagcataatctgggataaaatgattgagtgttaaggatgtgtttgttgttcctgtcgtttttttattttcttcaaagtatacaacatggtttgatatgcacatacatttgtgtaatgattgccatggtcaattaacacatcaccatttttgtgtgtgtgtgtgtgtgtgtgtgtgagggagtcttgctccgttgccaggctggagtgcaatggtacaaccttggctcactgcaacctccacctcctgggttcaagcaattctcttgcctcagcctcctaagtagctgggactataggcgtgtgccaccatgcccagctaatttttgtatttttagtagagacggggtttcaccatgttggccaggatgatctcgatcccttgacctcatgatccgcccacctcggcctcccaaagtgctgggattacaggcgtgagtcactgcacccggccacatcacctcccatgttctatcttacgtattcagaacttgttcatcttgtaactgaaagcgtgtaccctttgaccaacactgtttttcctgtcttaacaggatctacagatcaaggacaggggaggggatagtggaggaaaacggagttagtctgtttctaaatgaggggacagtatgtttcttggggcctgaggacagcttaataaagtagacaaatgaagaaaaacaacaatttgcattaaaaaatatccaattcttta

SEQ ID NO: 131748 - DNA, 1245 bp, Homo sapiens
  Payload ID: 5714
  Gene Symbol: F11R
  Gene Name: F11 receptor
  Uniprot ID: Q9Y624
  ENST ID: ENST00000537746
  CDS Start-End: 24-776
gttgtgtcgggagcctgatcgcgatggggacaaaggcgcaagtcgagaggaaactgttgtgcctcttcatattggcgatcctgttgtgctccctggcattgggcagtgttacagtgcactcttctgaacctgaagtcagaattcctgagaataatcctgtgaagttgtcctgtgcctactcgggcttttcttctccccgtgtggagtggaagtttgaccaaggagacaccaccagactcgtttgctataataacaagatcacagtgcctccatccaagcctacagttaacatcccctcctctgccaccattgggaaccgggcagtgctgacatgctcagaacaagatggttccccaccttctgaatacacctggttcaaagatgggatagtgatgcctacgaatcccaaaagcacccgtgccttcagcaactcttcctatgtcctgaatcccacaacaggagagctggtctttgatcccctgtcagcctctgatactggagaatacagctgtgaggcacggaatgggtatgggacacccatgacttcaaatgctgtgcgcatggaagctgtggagcggaatgtgggggtcatcgtggcagccgtccttgtaaccctgattctcctgggaatcttggtttttggcatctggtttgcctatagccgaggccactttgacagaacaaagaaagggacttcgagtaagaaggtgatttacagccagcctagtgcccgaagtgaaggagaattcaaacagacctcgtcattcctggtgtgagcctggtcggctcaccgcctatcatctgcatttgccttactcaggtgctaccggactctggcccctgatgtctgtagtttcacaggatgccttatttgtcttctacaccccacagggccccctacttcttcggatgtgtttttaataatgtcagctatgtgccccatcctccttcatgccctccctccctttcctaccactgctgagtggcctggaacttgtttaaagtgtttattccccatttctttgagggatcaggaaggaatcctgggtatgccattgacttcccttctaagtagacagcaaaaatggcgggggtcgcaggaatctgcactcaactgcccacctggctggcagggatctttgaataggtatcttgagcttggttctgggctctttccttgtgtactgacgaccagggccagctgttctagagcgggaattagaggctagagcggctgaaatggtt

SEQ ID NO: 131749 - DNA, 4770 bp, Homo sapiens
  Payload ID: 5714
  Gene Symbol: F11R
  Gene Name: F11 receptor
  ENST ID: ENST00000621309
  CDS Start-End: 271-1110
gaggcagctcctgtggggaaaggcgccagtgcgccgaggcggggagtggcggcggggtaacacctggccgaggtgactcgttctgaagagcagcggttccttacaccaatcggaacgtgcaggggtggggagctggccaatcaggcgcggagggcggggccgggcggggttccacctggcggctggctctcagtcccctcgctgtagtcgcggagctgtgtctgttcccaggagtccttcggcggctgttgtgtcgggagcctgatcgcgatggggacaaaggcgcaagtcgagaggaaactgttgtgcctcttcatattggcgatcctgttgtgctccctggcattgggcagtgttacagtgcactcttctgaacctgaagtcagaattcctgagaataatcctgtgaagttgtcctgtgcctactcgggcttttcttctccccgtactccttcctatgaggaccgggtgaccttcttgccaactggtatcaccttcaagtccgtgacacgggaagacactgggacatacacttgtatggtctctgaggaaggcggcaacagctatggggaggtcaaggtcaagctcatcgtgcttgtgcctccatccaagcctacagttaacatcccctcctctgccaccattgggaaccgggcagtgctgacatgctcagaacaagatggttccccaccttctgaatacacctggttcaaagatgggatagtgatgcctacgaatcccaaaagcacccgtgccttcagcaactcttcctatgtcctgaatcccacaacaggagagctggtctttgatcccctgtcagcctctgatactggagaatacagctgtgaggcacggaatgggtatgggacacccatgacttcaaatgctgtgcgcatggaagctgtggagcggaatgtgggggtcatcgtggcagccgtccttgtaaccctgattctcctgggaatcttggtttttggcatctggtttgcctatagccgaggccactttgacagaacaaagaaagggacttcgagtaagaaggtgatttacagccagcctagtgcccgaagtgaaggagaattcaaacagacctcgtcattcctggtgtgagcctggtcggctcaccgcctatcatctgcatttgccttactcaggtgctaccggactctggcccctgatgtctgtagtttcacaggatgccttatttgtcttctacaccccacagggccccctacttcttcggatgtgtttttaataatgtcagctatgtgccccatcctccttcatgccctccctccctttcctaccactgctgagtggcctggaacttgtttaaagtgtttattccccatttctttgagggatcaggaaggaatcctgggtatgccattgacttcccttctaagtagacagcaaaaatggcgggggtcgcaggaatctgcactcaactgcccacctggctggcagggatctttgaataggtatcttgagcttggttctgggctctttccttgtgtactgacgaccagggccagctgttctagagcgggaattagaggctagagcggctgaaatggttgtttggtgatgacactggggtccttccatctctggggcccactctcttctgtcttcccatgggaagtgccactgggatccctctgccctgtcctcctgaatacaagctgactgacattgactgtgtctgtggaaaatgggagctcttgttgtggagagcatagtaaattttcagagaacttgaagccaaaaggatttaaaaccgctgctctaaagaaaagaaaactggaggctgggcgcagtggctcacgcctataatcccagaggctgaggcaggcggatcacctgaggtcaggagttcaagatcagcctgaccaacatggagaaaccctactaaaaatacaaagttagccaggcatagtggtgcatgcctgtaatcccagctgctcaggagcctggcaacaagagcaaaactccagctcaaaaaaaaaaagaaagaaaagaaagctggagctggtggcttaggccatcacccttcccttggctggaactactggacagacccttttgagatgtgcctgtggtgctgtggagatgtgtgtagtggtcttagctctttgttgagcttgtgtgtgtgttgtgtagtcttagctgtatgctgaaattgggcgtgtgttggagggcttcttagctctttggtgagattgtatttctatgtgtttgtatcagctgaatgttgctggaaataaaaccttggtttgtcaaggctcttttttgtgggaagtaagtaggggaaaaggtctttgagggttcctaggctcctttgtacaacaggaaaatgcctcaaagccttgcttcccagcaacctggggctggttcccagtgcctggtcctgccccttcctggttcttatctcaaggcagagcttctgaatttcaggccttcattccagagccctcttgtggccaggccttcctttgctggaggaaggtacacagggtgaagctgatgctgtacttgggggatctccttggcctgttccaccaagtgagagaaggtacttactcttgtacctcctgttcagccaggtgcattaacagacctccctacagctgtaggaactactgtcccagagctgaggcaaggggatttctcaggtcatttggagaacaagtgctttagtagtagtttaaagtagtaactgctactgtatttagtggggtggaattcagaagaaatttgaagaccagatcatgggtggtctgcatgtgaatgaacaggaatgagccggacagcctggctgtcattgctttcttcctccccatttggacccttctctgcccttacatttttgtttctccatctaccaccatccaccagtctatttattaacttagcaagaggacaagtaaagggccctcttggcttgattttgcttctttctttctgtggaggatatactaagtgcgactttgccctatcctatttggaaatccctaacagaattgagttttctattaaggatccaaaaagaaaaacaaaatgctaatgaagccatcagtcaagggtcacatgccaataaacaataaattttccagaagaaatgaaatccaactagacaaataaagtagagcttatgaaatggttcagtaaagatgagtttgttgttttttgttttgttttgttttgtttttttaaagacggagtctcgctctgtcacccaggctggagtgcagtggtatgatcttggctcactgtaacctccgcctcccgggttcaagccattctcctgcctcagtctcctgagtagctgggattacgggtgcgtgccaccatgcctggctaatttttgtgtttttagtagagacagggtttcaccatgttggtcgggctggtctcaaactcctgacctcttgatccgcctgccttggcctcccaaagtgatgggattacagatgtgagccaccgtgcctagccaaggatgagatttttaaagtatgtttcagttctgtgtcatggttggaagacagagtaggaaggatatggaaaaggtcatggggaagcagaggtgattcatggctctgtgaatttgaggtgaatggttccttattgtctaggccacttgtgaagaatatgagtcagttattgccagccttggaatttacttctctagcttacaatggaccttttgaactggaaaacaccttgtctgcattcactttaaaatgtcaaaactaatttttataataaatgtttattttcacattgagtttgtttaaatcctgaagttcttaccttaagagaattgggactcctagagtgattggacattcaaaatattcctgatagtcttgttaattaagagattaggatatctttccattaccttgataattacgttttaatttagcttttttcattggcctgtgtttaaatgcaaataaccccacaatggacatttcctatgttaaagtgacatttaggggataaaaaatgagagcagttccatggattttggtgtttcccctgagacatgaactcagcataatctgggataaaatgattgagtgttaaggatgtgtttgttgttcctgtcgtttttttattttcttcaaagtatacaacatggtttgatatgcacatacatttgtgtaatgattgccatggtcaattaacacatcaccatttttgtgtgtgtgtgtgtgtgtgtgtgtgagggagtcttgctccgttgccaggctggagtgcaatggtacaaccttggctcactgcaacctccacctcctgggttcaagcaattctcttgcctcagcctcctaagtagctgggactataggcgtgtgccaccatgcccagctaatttttgtatttttagtagagacggggtttcaccatgttggccaggatgatctcgatcccttgacctcatgatccgcccacctcggcctcccaaagtgctgggattacaggcgtgagtcactgcacccggccacatcacctcccatgttctatcttacgtattcagaacttgttcatcttgtaactgaaagcgtgtaccctttgaccaacactgtttttcctgtcttaacaggatctacagatcaaggacaggggaggggatagtggaggaaaacggagttagtctgtttctaaatgaggggacagtatgtttcttggggcctgaggacagcttaataaagtagacaaatgaagaaaaacaacaatttgcattaaaaaatatccaattcttta

SEQ ID NO: 131750 - DNA, 1878 bp, Homo sapiens
  Payload ID: 5715
  Gene Symbol: FIP1L1
  Gene Name: factor interacting with PAPOLA and CPSF1
  Uniprot ID: Q6UN15
  ENST ID: ENST00000306932
  CDS Start-End: 144-1706
gccttcctgggattggagtctcgagctttcttcgttcgttcgtcggcgggttcgcgcccttctcgcgcctcggggctgcgaggctggggaaggggttggagggggctgttgatcgccgcgtttaagttgcgctcggggcggccatgtcggccggcgaggtcgagcgcctagtgtcggagctgagcggcgggaccggaggggatgaggaggaagagtggctctatggcgatgaaaatgaagttgaaaggccagaagaagaaaatgccagtgctaatcctccatctggaattgaagatgaaactgctgaaaatggtgtaccaaaaccgaaagtgactgagaccgaagatgatagtgatagtgacagcgatgatgatgaagatgatgttcatgtcactataggagacattaaaacgggagcaccacagtatgggagttatggtacagcacctgtaaatcttaacatcaagacagggggaagagtttatggaactacagggacaaaagtcaaaggagtagaccttgatgcacctggaagcattaatggagttccactcttagaggtagatttggattcttttgaagataaaccatggcgtaaacctggtgctgatctttctgattattttaattatgggtttaatgaagatacctggaaagcttactgtgaaaaacaaaagaggatacgaatgggacttgaagttataccagtaacctctactacaaataaaattacggtacagcagggaagaactggaaactcagagaaagaaactgcccttccatctacaaaagctgagtttacttctcctccttctttgttcaagactgggcttccaccgagcaggagattacctggggcaattgatgttatcggtcagactataactatcagccgagtagaaggcaggcgacgggcaaatgagaacagcaacatacaggtcctttctgaaagatctgctactgaagtagacaacaattttagcaaaccacctccgtttttccctccaggagctcctcccactcaccttccacctcctccatttcttccacctcctccgactgtcagcactgctccacctctgattccaccaccgggttttcctcctccaccaggcgctccacctccatctcttataccaacaatagaaagtggacattcctctggttatgatagtcgttctgcacgtgcatttccatatggcaatgttgcctttccccatcttcctggttctgctccttcgtggcctagtcttgtggacaccagcaagcagtgggactattatgccagaagagagaaagaccgagatagagagagagacagagacagagagcgagaccgtgatcgggacagagaaagagaacgcaccagagagagagagagggagcgtgatcacagtcctacaccaagtgttttcaacagcgatgaagaacgatacagatacagggaatatgcagaaagaggttatgagcgtcacagagcaagtcgagaaaaagaagaacgacatagagaaagacgacacagggagaaagaggaaaccagacataagtcttctcgaagtaatagtagacgtcgccatgaaagtgaagaaggagatagtcacaggagacacaaacacaaaaaatctaaaagaagcaaagaaggaaaagaagcgggcagtgagcctgcccctgaacaggagagcaccgaagctacacctgcagaataggcatggttttggccttttgtgtatattagtaccagaagtagatactataaatcttgttatttttctggataatgtttaagaaatttaccttaaatcttgttctgtttgttagtatgaaaagttaactttttttccaaaataaaagagtgaatttttcatgttaagttaaaaa

SEQ ID NO: 131751 - DNA, 2198 bp, Homo sapiens
  Payload ID: 5715
  Gene Symbol: FIP1L1
  Gene Name: factor interacting with PAPOLA and CPSF1
  Uniprot ID: Q6UN15
  ENST ID: ENST00000337488
  CDS Start-End: 195-1979
atgcgcagacggacctgcgctggaggcttcatctttgccgccgctgccgtcgccttcctgggattggagtctcgagctttcttcgttcgttcgtcggcgggttcgcgcccttctcgcgcctcggggctgcgaggctggggaaggggttggagggggctgttgatcgccgcgtttaagttgcgctcggggcggccatgtcggccggcgaggtcgagcgcctagtgtcggagctgagcggcgggaccggaggggatgaggaggaagagtggctctatggcggcccatgggacgtgcatgtgcacagtgatttggcaaaggacctagatgaaaatgaagttgaaaggccagaagaagaaaatgccagtgctaatcctccatctggaattgaagatgaaactgctgaaaatggtgtaccaaaaccgaaagtgactgagaccgaagatgatagtgatagtgacagcgatgatgatgaagatgatgttcatgtcactataggagacattaaaacgggagcaccacagtatgggagttatggtacagcacctgtaaatcttaacatcaagacagggggaagagtttatggaactacagggacaaaagtcaaaggagtagaccttgatgcacctggaagcattaatggagttccactcttagaggtagatttggattcttttgaagataaaccatggcgtaaacctggtgctgatctttctgattattttaattatgggtttaatgaagatacctggaaagcttactgtgaaaaacaaaagaggatacgaatgggacttgaagttataccagtaacctctactacaaataaaattacggccgaagactgtactatggaagttacaccaggtgcagagatccaagatggcagattcaatctttttaaggtacagcagggaagaactggaaactcagagaaagaaactgcccttccatctacaaaagctgagtttacttctcctccttctttgttcaagactgggcttccaccgagcagaaacagcacttcttctcagtctcagacaagtactgcctccagaaaagccaattcaagcgttgggaagtggcaggatcgatatgggagggccgaatcacctgatctaaggagattacctggggcaattgatgttatcggtcagactataactatcagccgagtagaaggcaggcgacgggcaaatgagaacagcaacatacaggtcctttctgaaagatctgctactgaagtagacaacaattttagcaaaccacctccgtttttccctccaggagctcctcccactcaccttccacctcctccatttcttccacctcctccgactgtcagcactgctccacctctgattccaccaccgggttttcctcctccaccaggcgctccacctccatctcttataccaacaatagaaagtggacattcctctggttatgatagtcgttctgcacgtgcatttccatatggcaatgttgcctttccccatcttcctggttctgctccttcgtggcctagtcttgtggacaccagcaagcagtgggactattatgccagaagagagaaagaccgagatagagagagagacagagacagagagcgagaccgtgatcgggacagagaaagagaacgcaccagagagagagagagggagcgtgatcacagtcctacaccaagtgttttcaacagcgatgaagaacgatacagatacagggaatatgcagaaagaggttatgagcgtcacagagcaagtcgagaaaaagaagaacgacatagagaaagacgacacagggagaaagaggaaaccagacataagtcttctcgaagtaatagtagacgtcgccatgaaagtgaagaaggagatagtcacaggagacacaaacacaaaaaatctaaaagaagcaaagaaggaaaagaagcgggcagtgagcctgcccctgaacaggagagcaccgaagctacacctgcagaataggcatggttttggccttttgtgtatattagtaccagaagtagatactataaatcttgttatttttctggataatgtttaagaaatttaccttaaatcttgttctgtttgttagtatgaaaagttaactttttttccaaaataaaagagtgaatttttcatgttaagttaaaaatctttgtcttgtactatttcaaaaataaaaagacagcaatgacttta

SEQ ID NO: 131752 - DNA, 2180 bp, Homo sapiens
  Payload ID: 5715
  Gene Symbol: FIP1L1
  Gene Name: factor interacting with PAPOLA and CPSF1
  Uniprot ID: Q6UN15
  ENST ID: ENST00000358575
  CDS Start-End: 195-1961
atgcgcagacggacctgcgctggaggcttcatctttgccgccgctgccgtcgccttcctgggattggagtctcgagctttcttcgttcgttcgtcggcgggttcgcgcccttctcgcgcctcggggctgcgaggctggggaaggggttggagggggctgttgatcgccgcgtttaagttgcgctcggggcggccatgtcggccggcgaggtcgagcgcctagtgtcggagctgagcggcgggaccggaggggatgaggaggaagagtggctctatggcgatgaaaatgaagttgaaaggccagaagaagaaaatgccagtgctaatcctccatctggaattgaagatgaaactgctgaaaatggtgtaccaaaaccgaaagtgactgagaccgaagatgatagtgatagtgacagcgatgatgatgaagatgatgttcatgtcactataggagacattaaaacgggagcaccacagtatgggagttatggtacagcacctgtaaatcttaacatcaagacagggggaagagtttatggaactacagggacaaaagtcaaaggagtagaccttgatgcacctggaagcattaatggagttccactcttagaggtagatttggattcttttgaagataaaccatggcgtaaacctggtgctgatctttctgattattttaattatgggtttaatgaagatacctggaaagcttactgtgaaaaacaaaagaggatacgaatgggacttgaagttataccagtaacctctactacaaataaaattacggccgaagactgtactatggaagttacaccaggtgcagagatccaagatggcagattcaatctttttaaggtacagcagggaagaactggaaactcagagaaagaaactgcccttccatctacaaaagctgagtttacttctcctccttctttgttcaagactgggcttccaccgagcagaaacagcacttcttctcagtctcagacaagtactgcctccagaaaagccaattcaagcgttgggaagtggcaggatcgatatgggagggccgaatcacctgatctaaggagattacctggggcaattgatgttatcggtcagactataactatcagccgagtagaaggcaggcgacgggcaaatgagaacagcaacatacaggtcctttctgaaagatctgctactgaagtagacaacaattttagcaaaccacctccgtttttccctccaggagctcctcccactcaccttccacctcctccatttcttccacctcctccgactgtcagcactgctccacctctgattccaccaccgggtattccaataactgtaccacctccaggttttcctcctccaccaggcgctccacctccatctcttataccaacaatagaaagtggacattcctctggttatgatagtcgttctgcacgtgcatttccatatggcaatgttgcctttccccatcttcctggttctgctccttcgtggcctagtcttgtggacaccagcaagcagtgggactattatgccagaagagagaaagaccgagatagagagagagacagagacagagagcgagaccgtgatcgggacagagaaagagaacgcaccagagagagagagagggagcgtgatcacagtcctacaccaagtgttttcaacagcgatgaagaacgatacagatacagggaatatgcagaaagaggttatgagcgtcacagagcaagtcgagaaaaagaagaacgacatagagaaagacgacacagggagaaagaggaaaccagacataagtcttctcgaagtaatagtagacgtcgccatgaaagtgaagaaggagatagtcacaggagacacaaacacaaaaaatctaaaagaagcaaagaaggaaaagaagcgggcagtgagcctgcccctgaacaggagagcaccgaagctacacctgcagaataggcatggttttggccttttgtgtatattagtaccagaagtagatactataaatcttgttatttttctggataatgtttaagaaatttaccttaaatcttgttctgtttgttagtatgaaaagttaactttttttccaaaataaaagagtgaatttttcatgttaagttaaaaatctttgtcttgtactatttcaaaaataaaaagacagcaatgacttta

SEQ ID NO: 131753 - DNA, 1465 bp, Homo sapiens
  Payload ID: 5715
  Gene Symbol: FIP1L1
  Gene Name: factor interacting with PAPOLA and CPSF1
  ENST ID: ENST00000514543
  CDS Start-End: 1-79
tgctaatcctccatctggaattgaagatgaaactgctgaaaatggtgtaccaaaaccgggacaaaagtcaaaggagtagaccttgatgcacctggaagcattaatggagttccactcttagaggtagatttggattcttttgaagataaaccatggcgtaaacctggtgctgatctttctgattattttaattatgggtttaatgaagatacctggaaagcttactgtgaaaaacaaaagaggatacgaatgggacttgaagttataccagtaacctctactacaaataaaattacggtacagcagggaagaactggaaactcagagaaagaaactgcccttccatctacaaaagctgagtttacttctcctccttctttgttcaagactgggcttccaccgagcaggagattacctggggcaattgatgttatcggtcagactataactatcagccgagtagaaggcaggcgacgggcaaatgagaacagcaacatacaggtcctttctgaaagatctgctactgaagtagacaacaattttagcaaaccacctccgtttttccctccaggagctcctcccactcaccttccacctcctccatttcttccacctcctccgactgtcagcactgctccacctctgattccaccaccgggtattccaataactgtaccacctccaggttttcctcctccaccaggcgctccacctccatctcttataccaacaatagaaagtggacattcctctggttatgatagtcgttctgcacgtgcatttccatatggcaatgttgcctttccccatcttcctggttctgctccttcgtggcctagtcttgtggacaccagcaagcagtgggactattatgccagaagagagaaagaccgagatagagagagagacagagacagagagcgagaccgtgatcgggacagagaaagagaacgcaccagagagagagagagggagcgtgatcacagtcctacaccaagtgttttcaacagcgatgaagaacgatacagatacagggaatatgcagaaagaggttatgagcgtcacagagcaagtcgagaaaaagaagaacgacatagagaaagacgacacagggagaaagaggaaaccagacataagtcttctcgaagtaatagtagacgtcgccatgaaagtgaagaaggagatagtcacaggagacacaaacacaaaaaatctaaaagaagcaaagaaggaaaagaagcgggcagtgagcctgcccctgaacaggagagcaccgaagctacacctgcagaataggcatggttttggccttttgtgtatattagtaccagaagtagatactataaatcttgttatttttctggataatgtttaagaaatttaccttaaatcttgttctgtttgttagtatgaaaagttaactttttttccaaaataaaagagtgaatttttcatgttaagttaa

SEQ ID NO: 131754 - DNA, 2177 bp, Homo sapiens
  Payload ID: 5715
  Gene Symbol: FIP1L1
  Gene Name: factor interacting with PAPOLA and CPSF1
  ENST ID: ENST00000504094
  CDS Start-End: 1-765
tttagcaaaccacctccgtttttccctccaggagctcctcccactcaccttccacctcctccatttcttccacctcctccgactgtcagcactgctccacctctgattccaccaccgggtattccaataactgtaccacctccaggttttcctcctccaccaggcgctccacctccatctcttataccaacaatagaaagtggacattcctctggttatgatagtcgttctgcacgtgcatttccatatggcaatgttgcctttccccatcttcctggttctgctccttcgtggcctagtcttgtggacaccagcaagcagtgggactattatgccagaagagagaaagaccgagatagagagagagacagagacagagagcgagaccgtgatcgggacagagaaagagaacgcaccagagagagagagagggagcgtgatcacagtcctacaccaagtgttttcaacaggtttgttggcgatgaagaacgatacagatacagggaatatgcagaaagaggttatgagcgtcacagagcaagtcgagaaaaagaagaacgacatagagaaagacgacacagggagaaagaggaaaccagacataagtcttctcgaagtaatagtagacgtcgccatgaaagtgaagaaggagatagtcacaggagacacaaacacaaaaaatctaaaagaagcaaagaaggaaaagaagcgggcagtgagcctgcccctgaacaggagagcaccgaagctacacctgcagaataggcatggttttggccttttgtgtatattagtaccagaagtagatactataaatcttgttatttttctggataatgtttaagaaatttaccttaaatcttgttctgtttgttagtatgaaaagttaactttttttccaaaataaaagagtgaatttttcatgttaagttaaaaatctttgtcttgtactatttcaaaaataaaaagacagcaatgactttatatccaagaaaggaatgtgaatgagtcacttaacagggaatctaaagagctgtgttagctgtgtacatacacagattatctgagaaaaggtcaagggttccacttgggccacagtttttttgttaatcaaacaccactctcttaagaggctgcatcacaaaaggcaacaaagggcccctctaaggcttgagattaaaactagtctttatcattactgctgtgacactcttgcttagtatattaagagactcatacatttttgatatcacaactttttgatggcttttcaatattctaaatttgggttcctggtgaaaccaaatggggtacactttcatatccaaattaataaaacctataaggcatctgggtggcctctatgaaataaattaattaattacccatagtgtagtttctaggaggcatgtgtacacacactcttcattgtggcacaaatttaaatcgcctcatgaccatgtctgtgagccagggtcaagctggtttggccttcttgatgcattttccaaggcccactggtggagcagcatgagtttttatacagttactaacgattgtggaaaaaaagagctttagccatttcttactaaaaacaaaacaagtttataattaattctctgagcgagcatttttagggataagcctaggaggtattcatcggtgatggtaacaaataacatggtatttgaaagaataaattactaggatcttttaaatagtgataatacaaaagtaatcttaattagtatcacatactaaaagacaactataacttctgaaaaatatttattcttgtttgatgaaagcaacgtttctcagcaatgcattttaaaaaatattttagctgtaaattaaaaatggccataatgtacccttggcagacttcagcatataccaaattttaaatttaaatcagcttgaattcagtggggtatacaaatcattttagttgttttagggctttttattgaatagaaaaaatataaacaatgttgtagagtaatgagaaatcctccacactgaaaaaaaactagtagttttaatttttttggaatcatattttctgaggtgtaactggctttcattagatgatcatacttttcctgacatttttacaatgtattctttctttaaatataaaaactgacaagataaatatagtgtttcaacttctt

SEQ ID NO: 131755 - DNA, 1335 bp, Homo sapiens
  Payload ID: 5715
  Gene Symbol: FIP1L1
  Gene Name: factor interacting with PAPOLA and CPSF1
  Uniprot ID: Q6UN15
  ENST ID: ENST00000507922
  CDS Start-End: 169-1305
cttcatctttgccgccgctgccgtcgccttcctgggattggagtctcgagctttcttcgttcgttcgtcggcgggttcgcgcccttctcgcgcctcggggctgcgaggctggggaaggggttggagggggctgttgatcgccgcgtttaagttgcgctcggggcggccatgtcggccggcgaggtcgagcgcctagtgtcggagctgagcggcgggaccggaggggatgaggaggaagagtggctctatggcgatgaaaatgaagttgaaaggccagaagaagaaaatgccagtgctaatcctccatctggaattgaagatgaaactgctgaaaatggtgtaccaaaaccgaaagtgactgagaccgaagatgatagtgatagtgacagcgatgatgatgaagatgatgttcatgtcactataggagacattaaaacgggagcaccacagtatgggagttatggtacagcacctgtaaatcttaacatcaagacagggggaagagtttatggaactacagggacaaaagtcaaaggagtagaccttgatgcacctggaagcattaatggagttccactcttagaggtagatttggattcttttgaagataaaccatggcgtaaacctggtgctgatctttctgattattttaattatgggtttaatgaagatacctggaaagcttactgtgaaaaacaaaagaggatacgaatgggacttgaagttataccagtaacctctactacaaataaaattacggccgaagactgtactatggaagttacaccaggtgcagagatccaagatggcagattcaatctttttaaggtacagcagggaagaactggaaactcagagaaagaaactgcccttccatctacaaaagctgagtttacttctcctccttctttgttcaagactgggcttccaccgagcagaaacagcacttcttctcagtctcagacaagtactgcctccagaaaagccaattcaagcgttgggaagtggcaggatcgatatgggagggccgaatcacctgatctaaggagattacctggggcaattgatgttatcggtcagactataactatcagccgagtagaaggcaggcgacgggcaaatgagaacagcaacatacaggtcctttctgaaagatctgctactgaagtagacaacaattttagcaaaccacctccgtttttccctccaggagctcctcccactcaccttccacctcctccatttcttccacctcctccgactgtcagcactgctccacctctgattccaccaccgggtaaatagtaaataagacatttgactttgaaagaaaaa

SEQ ID NO: 131756 - DNA, 1970 bp, Homo sapiens
  Payload ID: 5716
  Gene Symbol: FOXRED1
  Gene Name: FAD-dependent oxidoreductase domain containing 1
  Uniprot ID: Q96CU9
  ENST ID: ENST00000263578
  CDS Start-End: 75-1535
gcgcggagcagtgacggctgcgataatagcgaggcagcagtgcagctttcagagggtccgggctcagaggggttatgattcggagggttctgccgcacggcatgggccggggcctcttgacccggaggccaggcacgcgcagaggaggcttttctctggactgggatggaaaggtgtctgagattaagaagaagatcaagtcgatcctgcctggaaggtcctgtgatctactgcaagacaccagccacctgcctcccgagcactcggatgtggtgatcgtgggaggtggggtgcttggcttgtctgtggcctattggctgaagaagctggagagcagacgaggtgctattcgagtgctagtggtggaacgggaccacacgtattcacaggcctccactgggctctcagtaggtgggatttgtcagcagttctcattgcctgagaacatccagctctccctcttttcagccagctttctacggaacatcaatgagtacctggccgtagtcgatgctcctcccctggacctccggttcaacccctcgggctacctcttgctggcttcagaaaaggatgctgcagccatggagagcaacgtgaaagtgcagaggcaggagggagccaaagtttctctgatgtctcctgatcagcttcggaacaagtttccctggataaacacagagggagtggctttggcgtcttatgggatggaggacgaaggttggtttgacccctggtgtctgctccaggggcttcggcgaaaggtccagtccttgggagtccttttctgccagggagaggtgacacgttttgtctcttcatctcaacgcatgttgaccacagatgacaaagcggtggtcttgaaaaggatccatgaagtccatgtgaagatggaccgcagcctggagtaccagcctgtggaatgcgccattgtgatcaacgcagccggagcctggtctgcgcaaatcgcagcactggctggtgttggagaggggccgcctggcaccctgcagggcaccaagctacctgtggagccgaggaaaaggtatgtgtatgtgtggcactgcccccagggaccaggcctagagactccgcttgttgcagacaccagtggagcctattttcgccgggaaggattaggtagcaactacctaggtggtcgtagccccactgagcaggaagaaccggacccggcgaacctggaagtggaccatgatttcttccaggacaaggtgtggccccatttggccctgagggtcccagcttttgagactctgaaggttcagagcgcctgggccggctattacgactacaacacctttgaccagaatggcgtggtgggcccccacccgctagttgtcaacatgtactttgctactggcttcagtggtcacgggctccagcaggcccctggcattgggcgagctgtagcagagatggtactgaagggcaggttccagaccatcgacctgagccccttcctctttacccgcttttacttgggagagaagatccaggagaacaacatcatctgagcatgtgtgctctgcactggctccactggcttgcatcctggctgtgttcacagccttgtttgctgcttccatcttccccagtactgtgccaggccttctccccctccccagtgtcctctcctctcaggcaggccattgcacccatatggctgggcaggcacaggcagtgaggccgaggccaatagcgagtgatgagcgggatcctaggactgatctgtagcccatgctgatgtcacccaccagggcaatccatctggaggcctgagcaccctggcccaggactggcttcatcctggcactgaccaggaaagactgcctctgaccctcttagcagacagagcccaggcatgggagcactctggggcagcctggctcaggtttattgattttcgtctgtttaccctatccattaatcaatacatgtaattaactcct

SEQ ID NO: 131757 - DNA, 1825 bp, Homo sapiens
  Payload ID: 5716
  Gene Symbol: FOXRED1
  Gene Name: FAD-dependent oxidoreductase domain containing 1
  Uniprot ID: Q96CU9
  ENST ID: ENST00000532125
  CDS Start-End: 165-1583
gattcggagggttctgccgcacggcatgggccggggcctcttgacccggaggccaggcacgcgcagaggaggcttttctctgggtaaagttgaggacgacagagggtattgtggttctgggttgtccccaacctccgactgtgtgtccttcaggacccgaaaccatggcccacactggcaggacagtgggtcggcttggggaaggggactgggatggaaaggtgtctgagattaagaagaagatcaagtcgatcctgcctggaaggtcctgtgatctactgcaagacaccagccacctgcctcccgagcactcggatgtggtgatcgtgggaggtggggtgcttggcttgtctgtggcctattggctgaagaagctggagagcagacgaggtgctattcgagtgctagtggtggaacgggaccacacgtattcacaggcctccactgggctctcagtaggtgggatttgtcagcagttctcattgcctgagaacatccagctctccctcttttcagccagctttctacggaacatcaatgagtacctggccgtagtcgatgctcctcccctggacctccggttcaacccctcgggctacctcttgctggcttcagaaaaggatgctgcagccatggagagcaacgtgaaagtgcagaggcaggagggagccaaagtttctctgatgtctcctgatcagcttcggaacaagtttccctggataaacacagagggagtggctttggcgtcttatgggatggaggacgaaggttggtttgacccctggtgtctgctccaggggcttcggcgaaaggtccagtccttgggagtccttttctgccagggagaggtgacacgttttgtctcttcatctcaacgcatgttgaccacagatgacaaagcggtggtcttgaaaaggatccatgaagtccatgtgaagatggaccgcagcctggagtaccagcctgtggaatgcgccattgtgatcaacgcagccggagcctggtctgcgcaaatcgcagcactggctggtgttggagaggggccgcctggcaccctgcagggcaccaagctacctgtggagccgaggaaaaggtatgtgtatgtgtggcactgcccccagggaccaggcctagagactccgcttgttgcagacaccagtggagcctattttcgccgggaaggattaggtagcaactacctaggtggtcgtagccccactgagcaggaagaaccggacccggcgaacctggaagtggaccatgatttcttccaggacaaggtgtggccccatttggccctgagggtcccagcttttgagactctgaaggttcagagcgcctgggccggctattacgactacaacacctttgaccagaatggcgtggtgggcccccacccgctagttgtcaacatgtactttgctactggcttcagtggtcacgggctccagcaggcccctggcattgggcgagctgtagcagagatggtactgaagggcaggttccagaccatcgacctgagccccttcctctttacccgcttttacttgggagagaagatccaggagaacaacatcatctgagcatgtgtgctctgcactggctccactggcttgcatcctggctgtgttcacagccttgtttgctgcttccatcttccccagtactgtgccaggccttctccccctccccagtgtcctctcctctcaggcaggccattgcacccatatggctgggcaggcacaggcagtgaggccgaggccaatagcgagtgatgagcgggatcctaggactgatctgtagcccatgctgatgtcacccacca

SEQ ID NO: 131758 - DNA, 1427 bp, Homo sapiens
  Payload ID: 5716
  Gene Symbol: FOXRED1
  Gene Name: FAD-dependent oxidoreductase domain containing 1
  ENST ID: ENST00000525770
  CDS Start-End: 37-183
agtgcagctttcagagggtccgggctcagaggggttatgattcggagggttctgccgcacggcatgggccggggcctcttgacccggaggccaggcacgcgcagaggaggcttttctctggtattcacaggcctccactgggctctcagtaggtgggatttgtcagcagttctcattgcctgagaacatccagctctccctcttttcagccagctttctacggaacatcaatgagtacctggccgtagtcgatgctcctcccctggacctccggttcaacccctcgggctacctcttgctggcttcagaaaaggatgctgcagccatggagagcaacgtgaaagtgcagaggcaggagggagccaaagtttctctgatgtctcctgatcagcttcggaacaagtttccctggataaacacagagggagtggctttggcgtcttatgggatggaggacgaaggttggtttgacccctggtgtctgctccaggggcttcggcgaaaggtccagtccttgggagtccttttctgccagggagaggtgacacgttttgtctcttcatctcaacgcatgttgaccacagatgacaaagcggtggtcttgaaaaggatccatgaagtccatgtgaagatggaccgcagcctggagtaccagcctgtggaatgcgccattgtgatcaacgcagccggagcctggtctgcgcaaatcgcagcactggctggtgttggagaggggccgcctggcaccctgcagggcaccaagctacctgtggagccgaggaaaaggtatgtgtatgtgtggcactgcccccagggaccaggcctagagactccgcttgttgcagacaccagtggagcctattttcgccgggaaggattaggtagcaactacctaggtggtcgtagccccactgagcaggaagaaccggacccggcgaacctggaagtggaccatgatttcttccaggacaaggtgtggccccatttggccctgagggtcccagcttttgagactctgaaggttcagagcgcctgggccggctattacgactacaacacctttgaccagaatggcgtggtgggcccccacccgctagttgtcaacatgtactttgctactggcttcagtggtcacgggctccagcaggcccctggcattgggcgagctgtagcagagatggtactgaagggcaggttccagaccatcgacctgagccccttcctctttacccgcttttacttgggagagaagatccaggagaacaacatcatctgagcatgtgtgctctgcactggctccactggcttgcatcctggctgtgttcacagccttgtttgctgcttccatcttccccagtactgtgccaggccttctccccctccccagtgtcctctcctctcaggcaggccattgcacccatatggct

SEQ ID NO: 131759 - DNA, 1760 bp, Homo sapiens
  Payload ID: 5716
  Gene Symbol: FOXRED1
  Gene Name: FAD-dependent oxidoreductase domain containing 1
  ENST ID: ENST00000527004
  CDS Start-End: 18-575
ccgggctcagaggggttatgattcggagggttctgccgcacggcatgggccggggcctcttgacccggaggccaggcacgcgcagaggaggcttttctctggactgggatggaaaggtgtctgagattaagaagaagatcaagtcgatcctgcctggaaggtcctgtgatctactgcaagacaccagccacctgcctcccgagcactcggatgtggtgatcgtgggaggtggggtgcttggcttgtctgtggcctattggctgaagaagctggagagcagacgaggtgctattcgagtgctagtggtggaacgggaccacacgtattcacaggcctccactgggctctcagtaggtgggatttgtcagcagttctcattgcctgagaacatccagctctccctcttttcagccagctttctacggaacatcaattacctggccgtagtcgatgctcctcccctggacctccggttcaacccctcgggctacctcttgctggcttcagaaaaggatgctgcagccatggagagcaacgtgaaagtgcagagggatggaggacgaaggttggtttgacccctggtgtctgctccaggggcttcggcgaaaggtccagtccttgggagtccttttctgccagggagaggtgacacgttttgtctcttcatctcaacgcatgttgaccacagatgacaaagcggtggtcttgaaaaggatccatgaagtccatgtgaagatggaccgcagcctggagtaccagcctgtggaatgcgccattgtgatcaacgcagccggagcctggtctgcgcaaatcgcagcactggctggtgttggagaggggccgcctggcaccctgcagggcaccaagctacctgtggagccgaggaaaaggtatgtgtatgtgtggcactgcccccagggaccaggcctagagactccgcttgttgcagacaccagtggagcctattttcgccgggaaggattaggtagcaactacctaggtggtcgtagccccactgagcaggaagaaccggacccggcgaacctggaagtggaccatgatttcttccaggacaaggtgtggccccatttggccctgagggtcccagcttttgagactctgaaggttcagagcgcctgggccggctattacgactacaacacctttgaccagaatggcgtggtgggcccccacccgctagttgtcaacatgtactttgctactggcttcagtggtcacgggctccagcaggcccctggcattgggcgagctgtagcagagatggtactgaagggcaggttccagaccatcgacctgagccccttcctctttacccgcttttacttgggagagaagatccaggagaacaacatcatctgagcatgtgtgctctgcactggctccactggcttgcatcctggctgtgttcacagccttgtttgctgcttccatcttccccagtactgtgccaggccttctccccctccccagtgtcctctcctctcaggcaggccattgcacccatatggctgggcaggcacaggcagtgaggccgaggccaatagcgagtgatgagcgggatcctaggactgatctgtagcccatgctgatgtcacccaccagggcaatccatctggaggcctgagcaccctggcccaggactggcttcatcctggcactgaccaggaaagactgcctctgaccctcttagcagacagagcccaggcatgggagcactctggggcagcctggctcaggtt

SEQ ID NO: 131760 - DNA, 3933 bp, Homo sapiens
  Payload ID: 5717
  Gene Symbol: FOXRED2
  Gene Name: FAD-dependent oxidoreductase domain containing 2
  Uniprot ID: Q8IWF2
  ENST ID: ENST00000216187
  CDS Start-End: 113-2167
ggagcggctgggaggttcgcgcgtttctcagggttcggtcggaggcggggaggccggagctgcgggcgtagggacctggcggctcctgaagcgcacgcgggcgggcggcaggatgggcctctccgctgcggccccgttgtggggtcccccggggctgctcctggccatcgccctgcacccagcgctgtcggtgcccccgcgccgggactactgcgtgctgggcgctgggcccgcgggcctgcagatggcctacttcctgcagcgcgctggacgcgactacgcagtgttcgagcgggccccgcggcccggcagcttcttcacacgctacccgcggcaccgcaagctcatcagcatcaacaagcggtacacgggcaaggctaacgccgagttcaacctccgccacgactggaactctctgctcagccacgacccccggctgctcttcagacactactcgcgtgcctacttccccgacgcccgcgacatggtgcgctacctgggtgacttcgcggacacgctggggctccgtgtccagtacaacaccaccatcgcccacgtcactctggacaaggaccgacaggcctggaatggccactacttcatcctaactgaccagaagggccaggtgcatcagtgcagcgtcctctttgtagccactggtttatcagtccccaaccaggttgacttccctggctccgaatatgcagagggttacgagtccgtgtccgtggaccctgaggactttgtaggccagaatgtgctgatcctgggtcgtgggaactcggcctttgagacagcagagaacatcttgggtgtcacaaactttatccatatgctcagccgctcccgggtccgtctgtcctgggccacccactacgttggagacctcagagccatcaacaatggcctgctggatacctaccagctcaagtccctggacgggctgctcgagtctgacctgacggatctggccatcctgaaggacagcaaaggcaagttccatgtcaccccgaaattcttcctggaagaagccaacaccaaccagagtgccgactccatcaccctcccccaggacgacaatgacaactttgccatgcgcgtgccctatgaccgggtaatccgctgcctgggctggaactttgacttctccattttcaataagtccctcagacttaactcgggaaatgcattcggcaagaagtacccgctgattcgagctagctacgaatccaaaggaagccggggtctgtttatcctgggtactgccagccactcggtggactaccggaaatctgctgggggcttcatccacggattccgatacacagtgcgtgctgttcaccggctcctggagcaccgccaccacagcgtcacctggcccgccactgagctccccatcacacagctgaccagctccatcgtgcggcgcgtgaatgaggcttctgggctctaccagatgttcggtgtgctggccgatgtcatcctgttgaaggagaattccacggcctttgagtacctggaggagttccccatacagatgctggcccagctggagacactcacagggaggaaggcaaagcacgggctcttcgtcatcaacatggaatatggcagaaatttctctggccccgacaaggacgtcttctttgatgaccggtctgtggggcacacagaagatgcctggcagtctaactttcttcatcctgtcatctactactatagatacctccccaccgaacaggaggtgaggttccgccctgcacactggcccctgcctcggcccacggccatccatcacatcgtggaagacttcttaacagactggactgccccgatcgggcacatcctacctctgaggcgcttcctggagaactgtttggacaccgatttgcgaagcttctatgcagagtcctgcttcctgttcgccctcacgcgccagaagttgccacccttttgccagcaggggtacctgaggatgcagggactcgtgagtaccgagagcctttggcagcacagagtggagagcaggctcctgcgggactatgcccccacaggcaggcgcctggaggacagcagccagcagcttggcgaccaagagccactaggttcccccctggctccagggcctctggctcagtccgtcgatagcaacaaagaggagctctgactgtcccttcctaagctgtgggcacagtggccaggcctccccacctaggcccatggtcagtccctctttccccgcaacctcacactcccgccaatgcgtgattgccaaagaccactcagatcatggcagtgtctgcagcaaagccaccagatggcacgtgagggctgaaagtcggggatgcggtggtctcctccctcctgtcagggggcagaagggcatcctctgccaggtgggagctgccttccccagcccagtttgtctgcaatggagctgtcgctgagccccaggccagcccagttctgccccgtctcaagtgctcctcttccttccaagcccctcctcagatgggcctgcatcccgcctgtggagtgcttcacaggggaaacccatccgcatcttaagagtttgtggcaagcgctttaaaacaaaagctctgatatcctcaacaaccacaatgggcaggtgggattgttgccccagatgactgctgaagacaccagctgtgggatgtcaagtaattccagggacccccagctgggagtccccgtctgtgtcacttgccacacactgcctcaacctccccgccccattttcagcagggtttgggcttagctacagagcccaagagggtcagccctgcttatcatcataggcccagcaggctgatctcgagcagcgataggacagctccctgcaaagccatcttagcaactttctcactgagaagcaggattcagagctgctctccccagttgcaccccctgactcatcttccagctggctcttctctcccatcctactcccttctgtctccctgccctctgccatcctgaaccatgccttgcttctaacctgcctggtcaagttttgtgaaacttatcctgctgtctcgggctggcacccatatgtgctcaccatgtgtaaggtgacatttccaaatgcctttgtgtgataatgatgatgaatttggttcctagtctcttcttcattgcccttcctcaccagcaatctgcactttcccatcaggcgtcttagtctcatttgtaagtgcataagataatcacagtgatttttcaaagcccaggatcataagtgattgctttttcactggttcttactaactcttcatgtatccactcagaattccaaggacaatcccagcactctgggaggcccaggcaggtggatcacctgaggtcaggagtttgagaccagcctgaccaacatggagaaaccctatctctactaaaaatacaaaactagccaggcgtggtagcacatgtctataatcccagctactggagaggctgaggcaggagaatcacttaaacccgggaggcagaggttgcagtgagccgagattgcgccattgcactccagcctaggtaacaagagggaaactccatctcaaaaaataagttaattaaattaaattaaaataaaacatgcgctgggtacagttgcttacacctgtaatcccagcactttgggaggccaaagtgggccgatcacctgagctcaggaattcgagaccagcctggccaacatagcaaaaccttgtctctactaacggtaaaaaaaattagctgggcatggtggagcatgcctgtcatcccagctacttgggaagctgaggcaggagaattgcttgaacctgggaggtggaggttgcagtgagcagagaccgagccactgtactccagcctaggtgacaaagcaagacccacagtaaagcccccacaccccatctcaaaaaaataaaaaat

SEQ ID NO: 131761 - DNA, 2184 bp, Homo sapiens
  Payload ID: 5717
  Gene Symbol: FOXRED2
  Gene Name: FAD-dependent oxidoreductase domain containing 2
  Uniprot ID: Q8IWF2
  ENST ID: ENST00000397223
  CDS Start-End: 109-2163
tgacccagattgcagtgagagttcccgcaggccccgcctctttctgggcctcgtgtctcccagccgccgggccgggtgcgaggccttacccctctgatctgctgcaggatgggcctctccgctgcggccccgttgtggggtcccccggggctgctcctggccatcgccctgcacccagcgctgtcggtgcccccgcgccgggactactgcgtgctgggcgctgggcccgcgggcctgcagatggcctacttcctgcagcgcgctggacgcgactacgcagtgttcgagcgggccccgcggcccggcagcttcttcacacgctacccgcggcaccgcaagctcatcagcatcaacaagcggtacacgggcaaggctaacgccgagttcaacctccgccacgactggaactctctgctcagccacgacccccggctgctcttcagacactactcgcgtgcctacttccccgacgcccgcgacatggtgcgctacctgggtgacttcgcggacacgctggggctccgtgtccagtacaacaccaccatcgcccacgtcactctggacaaggaccgacaggcctggaatggccactacttcatcctaactgaccagaagggccaggtgcatcagtgcagcgtcctctttgtagccactggtttatcagtccccaaccaggttgacttccctggctccgaatatgcagagggttacgagtccgtgtccgtggaccctgaggactttgtaggccagaatgtgctgatcctgggtcgtgggaactcggcctttgagacagcagagaacatcttgggtgtcacaaactttatccatatgctcagccgctcccgggtccgtctgtcctgggccacccactacgttggagacctcagagccatcaacaatggcctgctggatacctaccagctcaagtccctggacgggctgctcgagtctgacctgacggatctggccatcctgaaggacagcaaaggcaagttccatgtcaccccgaaattcttcctggaagaagccaacaccaaccagagtgccgactccatcaccctcccccaggacgacaatgacaactttgccatgcgcgtgccctatgaccgggtaatccgctgcctgggctggaactttgacttctccattttcaataagtccctcagacttaactcgggaaatgcattcggcaagaagtacccgctgattcgagctagctacgaatccaaaggaagccggggtctgtttatcctgggtactgccagccactcggtggactaccggaaatctgctgggggcttcatccacggattccgatacacagtgcgtgctgttcaccggctcctggagcaccgccaccacagcgtcacctggcccgccactgagctccccatcacacagctgaccagctccatcgtgcggcgcgtgaatgaggcttctgggctctaccagatgttcggtgtgctggccgatgtcatcctgttgaaggagaattccacggcctttgagtacctggaggagttccccatacagatgctggcccagctggagacactcacagggaggaaggcaaagcacgggctcttcgtcatcaacatggaatatggcagaaatttctctggccccgacaaggacgtcttctttgatgaccggtctgtggggcacacagaagatgcctggcagtctaactttcttcatcctgtcatctactactatagatacctccccaccgaacaggaggtgaggttccgccctgcacactggcccctgcctcggcccacggccatccatcacatcgtggaagacttcttaacagactggactgccccgatcgggcacatcctacctctgaggcgcttcctggagaactgtttggacaccgatttgcgaagcttctatgcagagtcctgcttcctgttcgccctcacgcgccagaagttgccacccttttgccagcaggggtacctgaggatgcagggactcgtgagtaccgagagcctttggcagcacagagtggagagcaggctcctgcgggactatgcccccacaggcaggcgcctggaggacagcagccagcagcttggcgaccaagagccactaggttcccccctggctccagggcctctggctcagtccgtcgatagcaacaaagaggagctctgactgtcccttcctaagctgtgg

SEQ ID NO: 131762 - DNA, 4967 bp, Homo sapiens
  Payload ID: 5717
  Gene Symbol: FOXRED2
  Gene Name: FAD-dependent oxidoreductase domain containing 2
  Uniprot ID: Q8IWF2
  ENST ID: ENST00000397224
  CDS Start-End: 95-2149
attggtccgggcgcgaggggcggagccgccgcggagcaagcgagccaagcgcggcctcattagaccacgggttgcagccggagcggctgggaggatgggcctctccgctgcggccccgttgtggggtcccccggggctgctcctggccatcgccctgcacccagcgctgtcggtgcccccgcgccgggactactgcgtgctgggcgctgggcccgcgggcctgcagatggcctacttcctgcagcgcgctggacgcgactacgcagtgttcgagcgggccccgcggcccggcagcttcttcacacgctacccgcggcaccgcaagctcatcagcatcaacaagcggtacacgggcaaggctaacgccgagttcaacctccgccacgactggaactctctgctcagccacgacccccggctgctcttcagacactactcgcgtgcctacttccccgacgcccgcgacatggtgcgctacctgggtgacttcgcggacacgctggggctccgtgtccagtacaacaccaccatcgcccacgtcactctggacaaggaccgacaggcctggaatggccactacttcatcctaactgaccagaagggccaggtgcatcagtgcagcgtcctctttgtagccactggtttatcagtccccaaccaggttgacttccctggctccgaatatgcagagggttacgagtccgtgtccgtggaccctgaggactttgtaggccagaatgtgctgatcctgggtcgtgggaactcggcctttgagacagcagagaacatcttgggtgtcacaaactttatccatatgctcagccgctcccgggtccgtctgtcctgggccacccactacgttggagacctcagagccatcaacaatggcctgctggatacctaccagctcaagtccctggacgggctgctcgagtctgacctgacggatctggccatcctgaaggacagcaaaggcaagttccatgtcaccccgaaattcttcctggaagaagccaacaccaaccagagtgccgactccatcaccctcccccaggacgacaatgacaactttgccatgcgcgtgccctatgaccgggtaatccgctgcctgggctggaactttgacttctccattttcaataagtccctcagacttaactcgggaaatgcattcggcaagaagtacccgctgattcgagctagctacgaatccaaaggaagccggggtctgtttatcctgggtactgccagccactcggtggactaccggaaatctgctgggggcttcatccacggattccgatacacagtgcgtgctgttcaccggctcctggagcaccgccaccacagcgtcacctggcccgccactgagctccccatcacacagctgaccagctccatcgtgcggcgcgtgaatgaggcttctgggctctaccagatgttcggtgtgctggccgatgtcatcctgttgaaggagaattccacggcctttgagtacctggaggagttccccatacagatgctggcccagctggagacactcacagggaggaaggcaaagcacgggctcttcgtcatcaacatggaatatggcagaaatttctctggccccgacaaggacgtcttctttgatgaccggtctgtggggcacacagaagatgcctggcagtctaactttcttcatcctgtcatctactactatagatacctccccaccgaacaggaggtgaggttccgccctgcacactggcccctgcctcggcccacggccatccatcacatcgtggaagacttcttaacagactggactgccccgatcgggcacatcctacctctgaggcgcttcctggagaactgtttggacaccgatttgcgaagcttctatgcagagtcctgcttcctgttcgccctcacgcgccagaagttgccacccttttgccagcaggggtacctgaggatgcagggactcgtgagtaccgagagcctttggcagcacagagtggagagcaggctcctgcgggactatgcccccacaggcaggcgcctggaggacagcagccagcagcttggcgaccaagagccactaggttcccccctggctccagggcctctggctcagtccgtcgatagcaacaaagaggagctctgactgtcccttcctaagctgtgggcacagtggccaggcctccccacctaggcccatggtcagtccctctttccccgcaacctcacactcccgccaatgcgtgattgccaaagaccactcagatcatggcagtgtctgcagcaaagccaccagatggcacgtgagggctgaaagtcggggatgcggtggtctcctccctcctgtcagggggcagaagggcatcctctgccaggtgggagctgccttccccagcccagtttgtctgcaatggagctgtcgctgagccccaggccagcccagttctgccccgtctcaagtgctcctcttccttccaagcccctcctcagatgggcctgcatcccgcctgtggagtgcttcacaggggaaacccatccgcatcttaagagtttgtggcaagcgctttaaaacaaaagctctgatatcctcaacaaccacaatgggcaggtgggattgttgccccagatgactgctgaagacaccagctgtgggatgtcaagtaattccagggacccccagctgggagtccccgtctgtgtcacttgccacacactgcctcaacctccccgccccattttcagcagggtttgggcttagctacagagcccaagagggtcagccctgcttatcatcataggcccagcaggctgatctcgagcagcgataggacagctccctgcaaagccatcttagcaactttctcactgagaagcaggattcagagctgctctccccagttgcaccccctgactcatcttccagctggctcttctctcccatcctactcccttctgtctccctgccctctgccatcctgaaccatgccttgcttctaacctgcctggtcaagttttgtgaaacttatcctgctgtctcgggctggcacccatatgtgctcaccatgtgtaaggtgacatttccaaatgcctttgtgtgataatgatgatgaatttggttcctagtctcttcttcattgcccttcctcaccagcaatctgcactttcccatcaggcgtcttagtctcatttgtaagtgcataagataatcacagtgatttttcaaagcccaggatcataagtgattgctttttcactggttcttactaactcttcatgtatccactcagaattccaaggacaatcccagcactctgggaggcccaggcaggtggatcacctgaggtcaggagtttgagaccagcctgaccaacatggagaaaccctatctctactaaaaatacaaaactagccaggcgtggtagcacatgtctataatcccagctactggagaggctgaggcaggagaatcacttaaacccgggaggcagaggttgcagtgagccgagattgcgccattgcactccagcctaggtaacaagagggaaactccatctcaaaaaataagttaattaaattaaattaaaataaaacatgcgctgggtacagttgcttacacctgtaatcccagcactttgggaggccaaagtgggccgatcacctgagctcaggaattcgagaccagcctggccaacatagcaaaaccttgtctctactaacggtaaaaaaaattagctgggcatggtggagcatgcctgtcatcccagctacttgggaagctgaggcaggagaattgcttgaacctgggaggtggaggttgcagtgagcagagaccgagccactgtactccagcctaggtgacaaagcaagacccacagtaaagcccccacaccccatctcaaaaaaataaaaaataaaaaagaacaaagtatgctacaacaaaagtgaaaagagaaaaagaattccaagaacccgggctttctggatccaaagctctttcatggggacgtcctcttcccctcttggcttggtccagactttttctttttctttttttttttttttgcaatggatttcgctcttgtcacccaggctggagtgcaatggcacgatgtcggctcactgcaacttctgcctcccgggtctaaacaattctcttccctcaacctcccaagtagctgggattacaagcgcctgccaccacgcccagctaatttttgtatttttagtagagacagggtttcaccacattggccaggctggtctcgaactcctgacctcaggtgatccacctgtcttggcctcctaaagtgttgggattacaggcatgagccaccacgctcggcccagtccagactttttaactacctggccccactgcagacacagttccctctagtccttcccagagttacaagaagagaactccagtagccttattctgtcagggacgaattgtttaccccatgataatgtaggatatcataaattcttcttcaaaggttttagcctgtaatttgttaagtacattgagttctgagatcctctccaaagaaccaatgtatcagtatgttcagctcacctgttctttgttcttcattttaacttttaatttcctcattctttatgtctccttgcccctagtttcagtaaacaatcccctcctagcctctgtcacctgctctgacctgagtcacctttagtcacctggtccgtaaccatctttcctgtctaaacttctcaccccaccactctggcttatacccctgctctctttaaaatagccagtcagaattagcttagattgtgcggtccaaccctagcccataggggaacaacacagcagtagggggtacctgcatcagggataagaacccattcccctcccttgttccggtgtgctctcgccattgcaccatccatgagacgcactcttgtatagaagtaaaattgccttgctgagaaaa

SEQ ID NO: 131763 - DNA, 567 bp, Homo sapiens
  Payload ID: 5717
  Gene Symbol: FOXRED2
  Gene Name: FAD-dependent oxidoreductase domain containing 2
  ENST ID: ENST00000423980
  CDS Start-End: 309-567
attagaccacgggttgcagccggagcggctgggagggtggaggttactacaatcataagcggggagccggtgcccctgaggaaggagaccctgagggagataagatggaggggctcgggattccggggagccccaagtcccagcttgaaacggtggagtccgggcaaatgagctctgaggacggcttctgggcctggccgtgacccagattgcagtgagagttcccgcaggccccgcctctttctgggcctcgtgtctcccagccgccgggccgggtgcgaggccttacccctctgatctgctgcaggatgggcctctccgctgcggccccgttgtggggtcccccggggctgctcctggccatcgccctgcacccagcgctgtcggtgcccccgcgccgggactactgcgtgctgggcgctgggcccgcgggcctgcagatggcctacttcctgcagcgcgctggacgcgactacgcagtgttcgagcgggccccgcggcccggcagcttcttcacacgctacccgcggcaccgcaagctcatcagcatcaacaagcggtacacgg

SEQ ID NO: 131764 - DNA, 11508 bp, Homo sapiens
  Payload ID: 5718
  Gene Symbol: FAXC
  Gene Name: failed axon connections homolog
  Uniprot ID: Q5TGI0
  ENST ID: ENST00000389677
  CDS Start-End: 284-1513
cacaaagagcggggcggagaggcagctgcggggggagccggcggccgctgctgccgcccagggctctggggccccgccggccaggcccgccgtccgcggccagtgcccttcctcctcctcctcctctgccgccgcctcctcagtcgccgccgcctcctcagtcgccgccgcccgcgccgcccgcgccctccgcgcgcctctgagcccgcgccgggccgcgccggccccttcccatgcgggcggcgcgggccctgggaggggcgcccggagccagccgcgcagcatgcactggggggttggctttgcttcgtccaggccgtgcgtggtggatctgagctggaaccagagcatctccttcttcggctggtgggccgggtccgaggagcccttctccttttatggggacatcatcgctttccctttgcaggattacggtgggatcatggcagggctgggctccgatccctggtggaagaaaaccctttacttgaccgggggagctttgctggccgcagctgcgtatctgctccacgaactcctggtcattaggaaacagcaagagattgactctaaagatgctattattttgcatcagtttgcaagacctaacaatggtgttccaagtttatctcctttctgtttaaagatggaaacttatttaaggatggctgacttaccgtatcagaactattttggtggaaaactctctgctcaagggaaaatgccttggattgaatataatcatgaaaaagtttctggcacagaattcataattgactttctggaagagaagcttggagtgaatttaaacaaaaaccttggccctcatgaaagagccatctccagagcggtgaccaagatggtggaggagcacttctactggacattagcttattgccagtgggtggacaatctcaatgagacccggaagatgctctctcttagtggtggtggtcccttcagcaacctgctgaggtgggttgtgtgccacataacgaaaggaattgtgaaacgcgagatgcacggccacggcattggccgcttctccgaggaagagatttacatgctgatggagaaggacatgcggtctttagcagggcttttgggtgataagaagtacatcatggggcccaagctttccactcttgacgccactgtctttggacacttggcacaggcaatgtggaccttaccagggacaagacccgaacggctgatcaaaggtgagctgatcaaccttgccatgtactgtgagaggataaggaggaaattttggccagagtggcaccacgatgatgacaataccatctatgagtctgaggagagcagcgaaggcagcaaaacccacaccccgctgctggattttagcttttactcaaggacagagacctttgaagatgagggagcagaaaacagtttttccagaaccccagacacagattttactggacactcactctttgattcggatgtggacatggatgactatacagaccacgaacagtgcaagtgacgtccagcctcactgaccctcttccttgggacctgccactccctgggtcggtccattttcccaggtagcaatccatccgagctgggaggagatcttcgtgcttggcagagttttcacatgctaactggactatagcagccttatttcttttttgtacaaacaaaacacagaaccattcagatgactccattgaaaacaaacaggcaaaaaataatgtcagcatggttcctgaaatccatttttgttttcattagaaaactattaataatattgtgtggtagagcaggtgtaagagctggttgtcagctgatagtttttatgatgatcctcttcaaccctgaggtcttaattgtgagatggattcttgaacctccttcctccaccaggatttgaagtaatgagagatatcatcagaaaaatgttttacggtggctgcttgtactttatgtgtgtatattgtatgttgagacataagtcaaataaaatccacagatattaaacgaacacctactatgtgcaaagcactgtgctaggtgctaatcagtatacattttattctaagccctgccagtgactagctgtgtgattttgagcaaatctcttattaactattgggtgcctcatttctcccacctgtaaagtggggatgacaatactctccacctacctacctcacaggggtgttgtggggattcatgtggtaacattcgtacggcgctttaaacctcttagaagtggtgcgacataaacacagcattttattctttattgcacttcatgcatgtgaagatttgagggcaaaggaattccatatccaggcaaccaccaccacagtcacctgcaaaagctgagcagatgaaatacacacaaaggtacacttaggactttgtcatgattcctttctgtaatcttggctgaatcaaaatcttttgttcaaagaacattggaaatgtttttacaaattatcgacagctacaaacagtcttcaattctaccatgtatttgcagaaaagtggttctttcattgcctgaactcaccctggcatgttctgtgttgactccagagtgttacgttgcctatgtttgatttatttgagaagaataaatctcaggtatatggcaggtttcatagagttgaagggaaagtatttcattgatttttataagcagaagcctgccaacttgtaatgtctttttgaaaacaaaccttgcaaagatgtattgaaaagatgaagtagcaagaggatacttgtatcaaagcactctgtgcagtgttagactatatgcagttttattaatgcaacttttctggtgttttcagccactgcccagtgagaggagagcaatgctgagaacaagtcttaatgtttttgctgtctcatccccgttctctctctctttccctatagtattcgatgaactgttggcttacccatatttgtgaaggcaccctatttctaaagatgaagttgttgttgttgttgttgttttgacttaggacattttccagggaaatatggggcagagatcctgggtgatggctgtgagatttgggctaggagagccaagatttacaattgcaaacaaaactgctttgcttctgaccaacataaggattgctcattatggggttaaagaggcacttcttaaaatacagcaacttctgagaaatccatgcactttacttgaaaaaaaaaaaacctctttttgaatatagcatttgcaaaacaatcttaaaagactgctgtagattcacaaagaggtaaagggaggagagtttttcagactgcttaccacttaagcaattgtgtagggcatatgtaactgggaatacgtgctgagataccctaagttagaaattcttattccatgggaaacttagttgttaatatcttattaaaaccattcttatttaaagggactgtttgatgcctaataagaatgtggtggagaagatatgaatggataagcctgtttgaggctgcagcatcatttgggaggactgtttgcctcccctctctctagcaagtgtgttttaaggccaactggtggcatttctgtgtgactagggagactcctggactgaaaatatgaatataatgaacaggtggactgcagacctgtctccacaaagcatgggttgtccttttcccaccacattttagtagaaaagaaatgtatttgaatttttttctatgaacaatctatcttactgtacagtaccaagtgtgatgtattttctctcaaaggatgattaagttatgagaatgtagattaatatatgtttttaattttatattacttggaatacaagtatgtggagaaccaactttgaaaatgaagttgtaaaataagtcattccatccaggtacctcttacaggggcatgaatggacattgctatctggagtcttgggcaattgcctgacagcatataactgggcatcaacattttgtaggtgttaatttgatttagagccctagaatatgcccctgctttactttcccaaggcgggttatgcaaacaaaataaccaagacaaagtcaccatagtgtgagtctttatccggaaggatttaattttatgtgcttcattcttaagctacccagatttgaaatgttctccaatttcatgaacaggtgctaattataggaaaaaactataagaagttaagggacattttggtcatctggcttcttgttcaagttctgtgtttcctttttgctggaaggtaacttgaagtatgtgatctttaatgttaacagatgcttttggttggacaacagacccataggctattcgttctttttttcctgtcattgtaaaagtaaatcaagctcttgcatccacctctctttgcccatctgtacccccactcaacaagattaatgagcagaatcattgagctttactctccatcagaacagatataaggacaatctatatttatgcaatgatgaactatattgtcagcatttaccaatttgttgttgttacataatgaattgtagaaagtgacactaccaaggctgtgggctacccaggagactaatcacggacctggaacaacttggacttgaatcagactgcagtctactcctcaagtgagccctgcccatgtatactgtggtgttagggtatatttttgtgaaatagctaaggttcaaggaacagacatactaaggattttggccttgtgggtcttgcttagatttgtttgagagataatgtagagtcatagaaatgtatagctgtgctaaaaattagctgtagaaagcaccttattggctcagtgtcacatacatacttatttgaagggcaggaccaaaaactgaggtcaatatggttctttccattacaccacgttgcccttgatggtttctttctattataccaccttgcccttgatggttctttccattataccactgtggctttgttgtcttataaaatgcatgttacctgagaagtcaccctgtgttcagacaaccagcacatctccagccattccctggttggaatcctacttcgcttttgtccatgtcctgtcagcctggtcaagaccaatacaagagacctctcatcagtgcagggtattgctagactctgaagaatagcaagatggattcccaaatcaccaagactcctcatacttccttatgtatcttttaaagaacccatgtccattccctcacttgctgaatatttacagagcacctaccctgtgcctggccctgggatctacactggttgtagagtggcaaatagaacagcatagaactctgatttcagggcatcctcttttgcctagacttctctagcctcttttacgtacttggccatttccctgttccattccatccactacaaatggattaatctttctaaaaagctctttggccctgatggggtgtggcattgcctcagggtgaggggctactccttagggtctggtgttttcacctttgttcaccttgtctccatagctcctccatgggagccatccagtgcagccaggttgatccatttgccattgcctaaaaaagcctcatgtggcccacctctgtgcctctgctcatgccagtccttctcctgaaatgttctattctctgctccactggcccaagtcatgcccatctctcaaggtctgacttcgtcagcttcacatgaaggcttcccagctgattataatctcttcctttgaaaatgaagcactcatcacttccttccctgaaggttgcatgggaaagatgctcagagagtgagtcacataccattaaatagtgaattttcactttttgtttgtcaggaactccactgataatccaacgaaagttctataccctattcccagaaaaacacatatatgcaaatacataaaatgttacatataaattcaggaaatttagagacctcctgaaattatccatggtttcctcagggggttaatggaccccagttaaagagtcttgttcccaagagtctttaaatgttatcattgtgtttgttcttgtttttaacacagccagagagaagaaaaattagtacaggctatgcaagcaaaagtaatctctattatccatgttcagtatgtcttgagtgacagaaaagaagaaagaagtgctcttaggttatttgagaaaattttgttttagaggtttggaattttgaaagtcataggattttgttgttgtccttgtcatttatcttttaaccacccccaaaattgatttatcaaaatgagttcagggccaagtgcgcttcctttcagccctgaaacccaccgcttctgcatggatagggcaaccagcctgggctgaaggtgggagagaagaggctggatttttcttccttaaagaagaaaggtctgcacaatcaggttttcctgtattcatttattcattcattcatagaacaattgttgagtgtattttcaataaaaggttggtggcttttgttgatagggaacaactcaggttattcttctttctttcttttagggttttttttttttttaaacagagtatgttattttattgttcctgactatgacccaggatcctttgttctcctttatatgcagtgctatttaagtcaaactagaactgataaaagtacactcaatgacgaatacttcccaggctaaatgctgggctctgggaacccatctttaacaggtccagggatcaattgcatgtgattgtgaagtgcttgacctttattcagttgcttccagtggtctggatataacttgggaagttcaaaaggattcccttgttgggtgaggagggacgggcctcttacctgtaagactcttgctactgtcaggcgtggatgcgaacatctgtggcatgttttcctcatctgaattccttacccagaaactcagatttttggtccctgactttcaagaatatcttaaggatatttaagtttccttaatctttgagatgagactgctggaaccagcaacgttagccttgccagttagagatgattacagagggcactgaagcatagatttaaaaaaaaggggttcagctgttttggagctgacagggtgacctcctcaaccattctgctttcgccgaagcaaggaacttgtccccagacctagaccctctaaaactcctgctattggctggaccatgacaaactaggatgctcaaatttcataaggatgattgccttaaattgtaaaattggtagacaaataaaggggaccattgcaataataaaacgaataacctacagatatggtctagcagcaccaaactgaccatttcagtaggaaaacaagtaatctggagtaaaagatggatacggtactttggtgttctgtacacaataattttagcaaagaatttaatggccatcatgcatttttgaaacaatccactaaccataaagcaatatatgtgtatcataatcagttaactttataaaaagttgtgctactaaatgtgactaattcacctcccaccccccattggcatgcatttatttttatttatttgtttttatttgtggctctggaatagagtaactttcacttattagtaatgcttaagcttttttccttatttaataccttttttgtttttagttaccccatggcttctaaaaaaataagatccaacttctgaattgccatgttagttaatggtggctaaacagatagcaaagggaatataatataattgttcattgagggctaaaaaagaggaatgctctgaatatttactgtcttcctcctctttaaaaaataatcaatgactttcctcttccattgttcagaatcagaaatgttctttcgtatttgcttctcttctacaagagattatatttggcttattaaaatataaaccatgtccaaatgattgtatttttatctttaacaaattatgcctgggatttgttttttacagaaataaggctaaaggcttctgcttcagtaggggtgacatgtttactcctgtaaaatgattttaatgttactcctgtcaaaatgattttattgcaagtaataagtcttgtgggatcagaacaagcttattgtaaacacatgtttttttcccagtgatctacatcatgccaaatgtctgacaactcaaatgttgatgacagcgatggtttttccatggtgaagtttggaaaactgagggtctgagtccctcatttggtggtattagaatttaactgagtaggaggagagaagaaaacagtaacaaatgtcaaaatttcaagcaaccatgtggtatggctgtggtagagatgtatcaggcaattgaaagttttctaggtggtgccatcttgctaaaataataaaaagtacaggtttataaatcaaaaacaagtgcaatctatgtagggaaggattgtctatggatatacaagtggccagtgcaggaagtgaagtaacatttatctttatcttaatttctatgctcatgtcccccattccccttctgaagccaggcctgggaccttagatagcagcttagagggtctggccctgatacatttactcctttaattttggaatttccttctagtctctcaagagtgtttgtggcatatatttttcattttataaatataaaattgtacaaagtaatgtacattttgttttagagaagtcttttaaatgtttgcagacagcccagatcgtccatccctatttaggcagtggtctccaaacgtttatgtttattcaccctattagtaaaactttctgagcatgcccctccatgtatttatttatgatatatatgtatatatgtatacactgctatatatgtatatactgttttactgatgtaaacattaaaaaccatagcaaacatagacattttaaaagtatattttctggtcctcaatggagtttagagaatgggacaaggagtctttaggcgtagcacccagatgcctgtaattgattagagaatgtgtatataccatttgtggcaaagcagatataaaacaggcatggacgcatgattttaggtcaaggtatttaattatttttacttaaaataggcatttttggttgggaaagagaaggatgaacaatttgatgtcacctttaagactgatgtttttaattctgcttttgggaccacttgatctagaatgccttgaaaattccagaaagatttaacaacacactgaggtaagcaaaacaagaaaagaaagtaggggtgaggtgatacccagataatgcaaatgcaggatgtattgtctgtgaatttcagcatcaatctgaaaaacatgttttgataatgcctgataattcatcatctcactgattacatgtctttttttctatttgtttataatcttgtgtcttcaaatgtgtggaagatgtgcagacttatttttaggtatctgagataggaagggccaatgttggcataatttgaacccacatttcggggctaatgggcggacaccacctggaaacacttacctgcaccctctgttttgcaatcacaatgattagcatcttgctgaatgatgaccccaatgtgaagatggcatttcagtgtttatttctggatctatgagttactttagcagagttattagtagtttataaagccatatttaaacttgtacacttgattgtaagatagatttgaattgtgcactatgttgactactgtatataaatgtggaaattctgtatatttggtcttaatgctatatgtatttgatgtgtaaatgataactaatggatatgaaatagttttctgtgaatgtctttcttccaatttacttctcttttgcaaatttgaatgtttaaacttcaggctcatggggaaaatctgaaatgtttgcatctaatatactgttaagtggtggtctcttagatgactgggagagtattttagttgtaaggctcttgtataattaaaacagaggtaatgaattttttaggcatataactttgatagaatttcaagtgagtggcttttaagaagaaaaacagatctctggaatatgctgtcccatcctctcctgcttttatttcatgcccagtgtgcctcagagtgttacgaagtgtgagaaccactggtagagagaagacaaggaggagagggagagctgggagcacatgttgagacctttactatggctaggccttataatagaccaatttccccttgtataaatattgtctcaattaggcagggtgcagtggctcatgcctgtaatcccaggactttgggaggccaaggtgggcagatcacctgaggttgggagtttgagaccagcctgaccaacatggagaaaccctgtctctactaaaaatacaaaattagccgggcatggtggtgcatgcctgtaatcccagctacttgggaggctgaggcaggagaatcgcttgaacccaggaggtggaggctgcagtgagctgactttgtgccattgactccagcctgggcaacaagagcaaaactccatctcaaacacacacacacacacacacacacacacacacacacacacacacatatagtctcaattagttttcatacctcttcaataaagtaattattgttcccaaattacagatgaagaaagacgtttgggatgataaactggcatatggtaatatggccatgatatgctcaagtctttagggtcagagattcacagcaagattttggaaattcaaatcttactatgaagtgattcacacatgtgtatggtaatgaaccttaaaggatagctgggcctataggcatgtcaagatctatagagacatgcaggatgtttcaaattctatcttaaaatttgaccaaatctttggtcaaataataatactgttactcaaatattagctttttaccatttagagcaaattacaatcaggtaacattcaaaattctaaccctcccttcccaacatgggaatatctattaagtaggaaatgagagaaccccctaatttcccatttcagtgataatactgattgagtatctcttatctgaagtgcttgggaccagaagtgttttggatctgggtttttctcagattttgaaatatttgcattataccagttgagtatcccaaaatcaaaactggaaatctgaaatgatccaatgtccgtttcctttgagtgtcatgttagtgctcaaaaagttttggattttggagcgtttcagattttggatttttggatttgggatgctcgacctgtagtttggttttcatctttttagactccatttctcttgacctataaatcctatcagccctgtttattaacatagaccctagtcagaaatactttgaaatagatctacatctacttcaacgtcagttggttccacacccttctagaacttgtgtggggtcctggacttcccgtctgtcctgttagggaagctttgctgtcctagctttcaggactcatcagagggaagagggtcatttacctttccaatgtgctgtgatctcagagtcgttaaaatacatgttttgctgcc

SEQ ID NO: 131765 - DNA, 941 bp, Homo sapiens
  Payload ID: 5718
  Gene Symbol: FAXC
  Gene Name: failed axon connections homolog
  Uniprot ID: Q5TGI0
  ENST ID: ENST00000538471
  CDS Start-End: 55-444
ggaaacttatttaaggatggctgacttaccgtatcaggtgataagaagtacatcatggggcccaagctttccactcttgacgccactgtctttggacacttggcacaggcaatgtggaccttaccagggacaagacccgaacggctgatcaaaggtgagctgatcaaccttgccatgtactgtgagaggataaggaggaaattttggccagagtggcaccacgatgatgacaataccatctatgagtctgaggagagcagcgaaggcagcaaaacccacaccccgctgctggattttagcttttactcaaggacagagacctttgaagatgagggagcagaaaacagtttttccagaaccccagacacagattttactggacactcactctttgattcggatgtggacatggatgactatacagaccacgaacagtgcaagtgacgtccagcctcactgaccctcttccttgggacctgccactccctgggtcggtccattttcccaggtagcaatccatccgagctgggaggagatcttcgtgcttggcagagttttcacatgctaactggactatagcagccttatttcttttttgtacaaacaaaacacagaaccattcagatgactccattgaaaacaaacaggcaaaaaataatgtcagcatggttcctgaaatccatttttgttttcattagaaaactattaataatattgtgtggtagagcaggtgtaagagctggttgtcagctgatagtttttatgatgatcctcttcaaccctgaggtcttaattgtgagatggattcttgaacctccttcctccaccaggatttgaagtaatgagagatatcatcagaaaaatgttttacggtggctgcttgtactttatgtgtgtatattgtatgttgagacataagtcaaataaaatccacagatatt

SEQ ID NO: 131766 - DNA, 3029 bp, Homo sapiens
  Payload ID: 5719
  Gene Symbol: FAM47E-STBD1
  Gene Name: FAM47E-STBD1 readthrough
  ENST ID: ENST00000515604
  CDS Start-End: 27-1082
acggtggccgcgaagctagggccaccatggcggaccgcaggcggcggctccggccggggacgttggccccggtgcgcgagggcgtgaactgcaggtccagatgtttcacaaagcacaagaacgggctgaagttccccacctctctgcacagccggcagttggtatttccaagaaaggggctggacgacttcaggaagggctgcccgccttgcactggtctggtgactcaggtccctgtggagggctttctgccccagatttatcacagagctccccaactggccccaaagaagaggcagatcaagctgctcaaggaagcagacgtgctttccaagctctcgccagcccagcaggctcggaaggcattcctggaggacgtggaggcccacctgaccccacatcccttagcgctctacctgaatctggaagaagctatgcccatagagctcttatcaaaggtgctggaagtgcttgatcctgaccggaagctggaggacacatgggcttattgtcaggacaccaggaaaggaatgaaggaacccacgaagcttttaaaaaaacattctacccaagtctacctgggaccttccaagaagacgtctgtgtcaaacgcaggccaatggctttatgaagaaaagccacataaaatggatttgctccatgaaaatggtcctcgtcctggtcttcatgaaaatggaatttcggacatcgatgaagagttcatcttgaaacagtttgacattgactatgagaccaaaccaagccatgatgcgctccacacgatgaagctaaatcaggttcctctggagctaaagcgtagtgtggggctcagtaaactgcaggagacagagttcttccagaaactaggctatgagaggaaactccagaaaccacagaatccttataagccaaagtgggtgaagatgaggtatggagcatggtatttgaaccccaagttgtggaaaaagcaaagagtagacgagcctctggttgaccctgaggtctcacataaggctcaagaggagaattttaaaaaggagctgcaggaacagagcatcttcaagaaagcaatggacatttgatttctaagaccaaagaccttggtaaactgcaagcagcatcatggagattgcagaatccttccagggaagtctgtgacaattcaagagaacatgttccttctggacagtttccagacacagaagctccagctacctctgagaccagtaactctaggagttactctgaagtttcaagaaatgaaagccttgaatctcctatgggagaatggggattccaaaaaggacaagagatatctgctaaagcagctacatgttttgcagagaagttgccttctagcaacctgctcaagaacagagctaaagaagaaatgagcctctctgatttgaacagtcaggaccgggttgaccacgaggagtgggaaatggtgcctaggcactcatcttggggggatgttggtgtgggtggcagtcttaaggctccagtgttaaacctaaaccagggaatggacaatggaagaagcactttggtggaagcaagaggtcagcaagtgcatgggaaaatggaaagggtagcagtgatgcctgcagggtctcagcaagttagtgtcaggttccaggtccattatgtcacaagcactgatgtgcaattcattgcagtaactggagaccatgagtgtcttgggagatggaacacttacatcccactccactataacaaggatgggttctggtctcattccattttcctgcctgcagatacagtggtggagtggaagtttgtgttggtagagaatgggggagttacccgctgggaagaatgcagcaatagattcctagaaactggccatgaggataaagtggttcacgcatggtgggggattcactgattcagtttgcaaagtaatggagaagctgtagaacaatgtggaagaggctgaggttgtggaacacactgaataaaataaaggcagtgtgactccaaattcagccatctgaattgtttaaatttgctagtggattttgtctaatgtgcagaaatatatatgtctaatgtgcagaaatatatatgtgtgtatgtgtgtatatatatgcacacacacacagataatgcttccagtgaatgtgaacttcttttccctgtggcactgattgacagacttgtgctgatccattattactttagggcttgattctcttggggagtgacttggctaagcttcaggtgtaaactgtggtcacggagcaaaaacattaaccagctgcccagggttcaagcttgagcctttaggtgatctttaaactatggtagtaaaataagcctcactcaaacatagctgacttcctattggtacagcttgaaaagcactttttactacatacacattttatgcttaaaaagttaacatgatacgaaactgtgattagaaaatatctggtctggatgtgattagtaaggatacaagataatgttctaagactgcctaatgctttttgtttgattttcatctgccaggcgttgttatgtgctatgagggtagcaagtacgtctttgtcttaatgatctaaggctggtgtagaaacaaagggcctaatgagaaccaatcatcatggaagtcagttgcgggggcagcccataaggaaagggaaagtgagtggggttgggcataggctgagtgaggtggcctgaatgacacctcttagaggactgtgaagtacaggcacagcccgactgcagggagggatgcacccatcatttacccatgggagcatctgtaggaccatctctctcccacttcttctcccctcccccaccgcatctggccagatggactgtcctacagcaatcgtttccatctgtcaccctcttccctctcctttcataccagtcactatcttgggtaacaaatttatacaggacagtggtacagaaatacatctttgctctgagaatacagcaaatattaacttaaattattataactgaacaaataataaaacctgaatttt

SEQ ID NO: 131767 - DNA, 2532 bp, Homo sapiens
  Payload ID: 5719
  Gene Symbol: FAM47E-STBD1
  Gene Name: FAM47E-STBD1 readthrough
  ENST ID: ENST00000514140
  CDS Start-End: 1-576
aaaaaacattctacccaagtctacctgggaccttccaagaagacgtctgtgtcaaacgcaggccaatggctttatgaagaaaagccacataaaatggatttgctccatgaaaatggtcctcgtcctggtcttcatgaaaatgtatgcaaagcagttagtgacttctgcaagtgggttactacttttggaatttcggacatcgatgaagagttcatcttgaaacagtttgacattgactatgagaccaaaccaagccatgatgcgctccacacgatgaagctaaatcaggttcctctggagctaaagcgtagtgtggggctcagtaaactgcaggagacagagttcttccagaaactaggctatgagaggaaactccagaaaccacaggtctgctggagtttgctggaggtccactccagaccctatttgcctgggtatcaccagtggagactgcagaacagcaaagattgctgcctgctccttcttctggaagcttcatcctggaggggccccagcctgatgccagccagagctctcctgtatgagagcatcttcaagaaagcaatggacatttgatttctaagaccaaagaccttggtaaactgcaagcagcatcatggagattgcagaatccttccagggaagtctgtgacaattcaagagaacatgttccttctggacagtttccagacacagaagctccagctacctctgagaccagtaactctaggagttactctgaagtttcaagaaatgaaagccttgaatctcctatgggagaatggggattccaaaaaggacaagagatatctgctaaagcagctacatgttttgcagagaagttgccttctagcaacctgctcaagaacagagctaaagaagaaatgagcctctctgatttgaacagtcaggaccgggttgaccacgaggagtgggaaatggtgcctaggcactcatcttggggggatgttggtgtgggtggcagtcttaaggctccagtgttaaacctaaaccagggaatggacaatggaagaagcactttggtggaagcaagaggtcagcaagtgcatgggaaaatggaaagggtagcagtgatgcctgcagggtctcagcaagttagtgtcaggttccaggtccattatgtcacaagcactgatgtgcaattcattgcagtaactggagaccatgagtgtcttgggagatggaacacttacatcccactccactataacaaggatgggttctggtctcattccattttcctgcctgcagatacagtggtggagtggaagtttgtgttggtagagaatgggggagttacccgctgggaagaatgcagcaatagattcctagaaactggccatgaggataaagtggttcacgcatggtgggggattcactgattcagtttgcaaagtaatggagaagctgtagaacaatgtggaagaggctgaggttgtggaacacactgaataaaataaaggcagtgtgactccaaattcagccatctgaattgtttaaatttgctagtggattttgtctaatgtgcagaaatatatatgtctaatgtgcagaaatatatatgtgtgtatgtgtgtatatatatgcacacacacacagataatgcttccagtgaatgtgaacttcttttccctgtggcactgattgacagacttgtgctgatccattattactttagggcttgattctcttggggagtgacttggctaagcttcaggtgtaaactgtggtcacggagcaaaaacattaaccagctgcccagggttcaagcttgagcctttaggtgatctttaaactatggtagtaaaataagcctcactcaaacatagctgacttcctattggtacagcttgaaaagcactttttactacatacacattttatgcttaaaaagttaacatgatacgaaactgtgattagaaaatatctggtctggatgtgattagtaaggatacaagataatgttctaagactgcctaatgctttttgtttgattttcatctgccaggcgttgttatgtgctatgagggtagcaagtacgtctttgtcttaatgatctaaggctggtgtagaaacaaagggcctaatgagaaccaatcatcatggaagtcagttgcgggggcagcccataaggaaagggaaagtgagtggggttgggcataggctgagtgaggtggcctgaatgacacctcttagaggactgtgaagtacaggcacagcccgactgcagggagggatgcacccatcatttacccatgggagcatctgtaggaccatctctctcccacttcttctcccctcccccaccgcatctggccagatggactgtcctacagcaatcgtttccatctgtcaccctcttccctctcctttcataccagtcactatcttgggtaacaaatttatacaggacagtggtacagaaatacatctttgctctgagaatacagcaaatattaacttaaattattataactgaacaaataataaaacctgaattttaatatcttc

SEQ ID NO: 131768 - DNA, 1465 bp, Homo sapiens
  Payload ID: 5719
  Gene Symbol: FAM47E-STBD1
  Gene Name: FAM47E-STBD1 readthrough
  ENST ID: ENST00000514365
  CDS Start-End: 16-177
gaagctagggccaccatggcggaccgcaggcggcggctccggccggggacgttggccccggtgcgcgagggcgtgaactgcaggtccagctcttatcaaaggtgctggaagtgcttgatcctgaccggaagctggaggacacatgggcttattgtcaggacaccaggaaaggaatgaaggaacccacgaagcttttaaaaaaacattctacccaagtctacctgggaccagcatcttcaagaaagcaatggacatttgatttctaagaccaaagaccttggtaaactgcaagcagcatcatggagattgcagaatccttccagggaagtctgtgacaattcaagagaacatgttccttctggacagtttccagacacagaagctccagctacctctgagaccagtaactctaggagttactctgaagtttcaagaaatgaaagccttgaatctcctatgggagaatggggattccaaaaaggacaagagatatctgctaaagcagctacatgttttgcagagaagttgccttctagcaacctgctcaagaacagagctaaagaagaaatgagcctctctgatttgaacagtcaggaccgggttgaccacgaggagtgggaaatggtgcctaggcactcatcttggggggatgttggtgtgggtggcagtcttaaggctccagtgttaaacctaaaccagggaatggacaatggaagaagcactttggtggaagcaagaggtcagcaagtgcatgggaaaatggaaagggtagcagtgatgcctgcagggtctcagcaagttagtgtcaggttccaggtccattatgtcacaagcactgatgtgcaattcattgcagtaactggagaccatgagtgtcttgggagatggaacacttacatcccactccactataacaaggatgggttctggtctcattccattttcctgcctgcagatacagtggtggagtggaagtttgtgttggtagagaatgggggagttacccgctgggaagaatgcagcaatagattcctagaaactggccatgaggataaagtggttcacgcatggtgggggattcactgattcagtttgcaaagtaatggagaagctgtagaacaatgtggaagaggctgaggttgtggaacacactgaataaaataaaggcagtgtgactccaaattcagccatctgaattgtttaaatttgctagtggattttgtctaatgtgcagaaatatatatgtctaatgtgcagaaatatatatgtgtgtatgtgtgtatatatatgcacacacacacagataatgcttccagtgaatgtgaacttcttttccctgtggcactgattgacagacttgtgctgatccattattactttagggcttgattctcttggggagtgacttggctaagcttcaggtgtaaactgtggtcacggagcaaaaacattaaccagctgccca

SEQ ID NO: 131769 - DNA, 1484 bp, Homo sapiens
  Payload ID: 5719
  Gene Symbol: FAM47E-STBD1
  Gene Name: FAM47E-STBD1 readthrough
  ENST ID: ENST00000509377
  CDS Start-End: 15-176
aagctagggccaccatggcggaccgcaggcggcggctccggccggggacgttggccccggtgcgcgagggcgtgaactgcaggtccagctcttatcaaaggtgctggaagtgcttgatcctgaccggaagctggaggacacatgggcttattgtcaggacaccaggaaaggaatgaaggaacccacgaagcttttaaaaaaacattctacccaagtctacctgggaccttccaagaagacgtctgtgtcaaacgcaggccaatggctttatgaagaaaagccacataaaatggatttgctccatgaaaatggtcctcgtcctggtcttcatgaaaatgtatgcaaagcagttagtgacttctgcaagtgggttactacttttggaatttcggacatcgatgaagagttcatcttgaaacagtttgacattgactatgagaccaaaccaagccatgatgcgctccacacgatgaagctaaatcaggttcctctggagctaaagcgtagtgtggggctcagtaaactgcaggagacagagttcttccagaaactaggctatgagaggaaactccagaaaccacagagcatcttcaagaaagcaatggacatttgatttctaagaccaaagaccttggtaaactgcaagcagcatcatggagattgcagaatccttccagggaagtctgtgacaattcaagagaacatgttccttctggacagtttccagacacagaagctccagctacctctgagaccagtaactctaggagttactctgaagtttcaagaaatgaaagccttgaatctcctatgggagaatggggattccaaaaaggacaagagatatctgctaaagcagctacatgttttgcagagaagttgccttctagcaacctgctcaagaacagagctaaagaagaaatgagcctctctgatttgaacagtcaggaccgggttgaccacgaggagtgggaaatggtgcctaggcactcatcttggggggatgttggtgtgggtggcagtcttaaggctccagtgttaaacctaaaccagggaatggacaatggaagaagcactttggtggaagcaagaggtcagcaagtgcatgggaaaatggaaagggtagcagtgatgcctgcagggtctcagcaagttagtgtcaggttccaggtccattatgtcacaagcactgatgtgcaattcattgcagtaactggagaccatgagtgtcttgggagatggaacacttacatcccactccactataacaaggatgggttctggtctcattccattttcctgcctgcagatacagtggtggagtggaagtttgtgttggtagagaatgggggagttacccgctgggaagaatgcagcaatagattcctagaaactggccatgaggataaagtggttcacgcatggtgggggattcactgattcagtttgcaaagtaatggagaagctgtagaacaatgtggaag

SEQ ID NO: 131770 - DNA, 2148 bp, Homo sapiens
  Payload ID: 5720
  Gene Symbol: FAM101A
  Gene Name: family with sequence similarity 101, member A
  Uniprot ID: Q6ZTI6
  ENST ID: ENST00000324038
  CDS Start-End: 244-651
acactcagtctctgattttatccctgccctggcttaattaagtgctctgaagacataaataggttttttgtttactcaagcttgggagaagctggcagaaaaggccttttcagctaaaagctccttacagccggaaggtgtgaagcggcaagtttccagccgggaagaagcctctcagccgtaggcgtctttgcccggagctgtgagcccccctcccaactcccaaatcccccggcgtcggagatgaggccccggatgctgccagtgttctttggggagagcatcaaggtgaacccggaacccacgcatgagatccgctgcaactctgaggtcaagtacgcctcggagaagcatttccaggacaaggtcttctatgcgcccgtacccaccgtcacggcctacagcgagaccatcgtggcagcacccaactgcacgtggcgcaactaccgcagccagctgaccctggagccacgcccgcgcgccctgcgcttccgcagcaccaccatcatcttccccaagcatgccaggagcactttccggaccaccctgcactgcagcctgggccggcccagccgctggttcaccgccagcgtgcagctgcagctttgccaggaccctgcccccagcctcctgggccctgccacgctctgacggggctggggccggcccggggtgctggaggagccgggagccctggggagaagccgggaggatggacacgatgagctcggcctggcactcgggcaggaggcgggaagggaggctgccagaccaaggacccgtgtggaaggaggcggctccccgctgcctgccctgacctacaggctaggtggtggtctccttgttttggtgtcaaggactcagtaaaagcatctatttttttagcacttaagctggcaaggcggtaggggcatgcactgttaggtggtggccacccccagggtcaggggaaaagaatgggtccatggagtgcccttgaagcagagaacagccccgagcagtgtgaggacagaggcatcccagcctcagccggtggggacggctgccactcccccagagccctgccaccccatgtgtcctaggctggtggccaaggccatgtgtgagggaagaggggtacctctcttccctgctgctggcctggggtatttccaaaacagccttttcgcacacatgcaggttgcaccgagaggtctggagctgtggctgagccacctctggcggatgttgagccaggaggttgggcaaaggccggatgctgatgccagcgctggaggtggtgatactgggggcggggaaggcctagaaatactttgagccatggccttgccagtgtcccgtgccctccagtgtcaaagatttggggcactgcccgtcgaaatggaaaggttggtgctcagcctctggagcctcacctgcagggcgtccccagctaacacccatccacgcaccacctccaggacgagaacccttgatgtcaaaaccaagtgcccagtggaggcggtgaagctctcggaaatgctgccacctgtgtgaggccgggtctgaactcgagggagtcggagctcagctgtcggtttaaagagacactgaggggaccgggctgccgccctcagcctgcattcctgtgcgcaatcgattccgcaatgacagcaccttactccttcctgcggcaggctcacccctgcctgtgggatgttgtgagaggaacatgagccagacaaagacttggctcagggctccgtggaacaagccaggatgcacggggagctgggggagcccccagcctggggcagcccagcaggccgctgaacaaacaccccagaagccagcactgtggcagggtgctggggagatgcccctctgagccttcctcccccctcagacctgaatgcactccacagttgggggctgcccctgccactcccctggtaatgcataaaaggggaggggaaggttccctggggcttgagctccctctgtggaggtgaggaggggagattccgttcacatccaggaggggcaaaatgactgatgtatttttatgtatctacacagagagtgcattttctctccagagatgctgtctggttaacaaaggaataacttaagaaattgattgattatcttaataaactgtgcaaaccc

SEQ ID NO: 131771 - DNA, 652 bp, Homo sapiens
  Payload ID: 5720
  Gene Symbol: FAM101A
  Gene Name: family with sequence similarity 101, member A
  Uniprot ID: Q6ZTI6
  ENST ID: ENST00000338359
  CDS Start-End: 147-554
cagaccaagccagggccagagggtgtcaggtggtcctgtgtgcccagcagggagctgaggccactgcaacaaggggctgcataaccccgtgtccctggctctccccacagcccccctcccaactcccaaatcccccggcgtcggagatgaggccccggatgctgccagtgttctttggggagagcatcaaggtgaacccggaacccacgcatgagatccgctgcaactctgaggtcaagtacgcctcggagaagcatttccaggacaaggtcttctatgcgcccgtacccaccgtcacggcctacagcgagaccatcgtggcagcacccaactgcacgtggcgcaactaccgcagccagctgaccctggagccacgcccgcgcgccctgcgcttccgcagcaccaccatcatcttccccaagcatgccaggagcactttccggaccaccctgcactgcagcctgggccggcccagccgctggttcaccgccagcgtgcagctgcagctttgccaggaccctgcccccagcctcctgggccctgccacgctctgacggggctggggccggcccggggtgctggaggagccgggagccctggggagaagccgggaggatggacacgatgagctcggcctggcactcgggcagga

SEQ ID NO: 131772 - DNA, 2385 bp, Homo sapiens
  Payload ID: 5720
  Gene Symbol: FAM101A
  Gene Name: family with sequence similarity 101, member A
  Uniprot ID: Q6ZTI6
  ENST ID: ENST00000389727
  CDS Start-End: 481-888
gtgcggagcgcgcgcgcgcgcggctcggaggcgcacctgtgaggtgtccctgaggagagggaggtgggtgcgcggcgcccgcggcctggggcgctgactcccctcacttggaggcgccctgcgtccggcagaggaggcgagcatcccgctcaggtgatgaggaacccctcgcgcacccagcgcagaaggctgctgccgccggacgcctccattgtttgaccacaacaagggccggattctcacccaggccgcacttggtgagagtcttcacggaccacagtgttgcacgaggtgattgtgtttgcagaggtttttttgtccttgaagagcacttagggctggagagcaagacacatgctgacgagcagaagctgacaggcttgctgccatgtgggaaagtccttggacgagttgtctgcttgcggagaggtgtctgcggctcagcccccctcccaactcccaaatcccccggcgtcggagatgaggccccggatgctgccagtgttctttggggagagcatcaaggtgaacccggaacccacgcatgagatccgctgcaactctgaggtcaagtacgcctcggagaagcatttccaggacaaggtcttctatgcgcccgtacccaccgtcacggcctacagcgagaccatcgtggcagcacccaactgcacgtggcgcaactaccgcagccagctgaccctggagccacgcccgcgcgccctgcgcttccgcagcaccaccatcatcttccccaagcatgccaggagcactttccggaccaccctgcactgcagcctgggccggcccagccgctggttcaccgccagcgtgcagctgcagctttgccaggaccctgcccccagcctcctgggccctgccacgctctgacggggctggggccggcccggggtgctggaggagccgggagccctggggagaagccgggaggatggacacgatgagctcggcctggcactcgggcaggaggcgggaagggaggctgccagaccaaggacccgtgtggaaggaggcggctccccgctgcctgccctgacctacaggctaggtggtggtctccttgttttggtgtcaaggactcagtaaaagcatctatttttttagcacttaagctggcaaggcggtaggggcatgcactgttaggtggtggccacccccagggtcaggggaaaagaatgggtccatggagtgcccttgaagcagagaacagccccgagcagtgtgaggacagaggcatcccagcctcagccggtggggacggctgccactcccccagagccctgccaccccatgtgtcctaggctggtggccaaggccatgtgtgagggaagaggggtacctctcttccctgctgctggcctggggtatttccaaaacagccttttcgcacacatgcaggttgcaccgagaggtctggagctgtggctgagccacctctggcggatgttgagccaggaggttgggcaaaggccggatgctgatgccagcgctggaggtggtgatactgggggcggggaaggcctagaaatactttgagccatggccttgccagtgtcccgtgccctccagtgtcaaagatttggggcactgcccgtcgaaatggaaaggttggtgctcagcctctggagcctcacctgcagggcgtccccagctaacacccatccacgcaccacctccaggacgagaacccttgatgtcaaaaccaagtgcccagtggaggcggtgaagctctcggaaatgctgccacctgtgtgaggccgggtctgaactcgagggagtcggagctcagctgtcggtttaaagagacactgaggggaccgggctgccgccctcagcctgcattcctgtgcgcaatcgattccgcaatgacagcaccttactccttcctgcggcaggctcacccctgcctgtgggatgttgtgagaggaacatgagccagacaaagacttggctcagggctccgtggaacaagccaggatgcacggggagctgggggagcccccagcctggggcagcccagcaggccgctgaacaaacaccccagaagccagcactgtggcagggtgctggggagatgcccctctgagccttcctcccccctcagacctgaatgcactccacagttgggggctgcccctgccactcccctggtaatgcataaaaggggaggggaaggttccctggggcttgagctccctctgtggaggtgaggaggggagattccgttcacatccaggaggggcaaaatgactgatgtatttttatgtatctacacagagagtgcattttctctccagagatgctgtctggttaacaaaggaataacttaagaaattgattgattatcttaataaactgtgcaaaccc

SEQ ID NO: 131773 - DNA, 2354 bp, Homo sapiens
  Payload ID: 5720
  Gene Symbol: FAM101A
  Gene Name: family with sequence similarity 101, member A
  Uniprot ID: Q6ZTI6
  ENST ID: ENST00000546355
  CDS Start-End: 205-855
ggagcgcggcccacggcggcgagcaggctgcaggcccgcggggatccggggcgcggggggcgccgggcctgatcgccgcctctcgcggtgcccgcaggtccccgggcgcgcagctctcgccccgccgccgcctgccccgggccccggagcgcggtggagaagcccccggaggagcggggggcccgcgccccgcgccccccagacatggtgggccacctgcatctgcagggcatggaggacagcctgaaggagcagggccgggagggcttgctggacagccccgactccgggctgccccccagccccagccccagcccgcccttctactccctggcgcccggcatcctcgacgcgcgcgcggggggcgccggcgcctcctcggagcccccgggacccagcgaggccagagcgcccccctcccaactcccaaatcccccggcgtcggagatgaggccccggatgctgccagtgttctttggggagagcatcaaggtgaacccggaacccacgcatgagatccgctgcaactctgaggtcaagtacgcctcggagaagcatttccaggacaaggtcttctatgcgcccgtacccaccgtcacggcctacagcgagaccatcgtggcagcacccaactgcacgtggcgcaactaccgcagccagctgaccctggagccacgcccgcgcgccctgcgcttccgcagcaccaccatcatcttccccaagcatgccaggagcactttccggaccaccctgcactgcagcctgggccggcccagccgctggttcaccgccagcgtgcagctgcagctttgccaggaccctgcccccagcctcctgggccctgccacgctctgacggggctggggccggcccggggtgctggaggagccgggagccctggggagaagccgggaggatggacacgatgagctcggcctggcactcgggcaggaggcgggaagggaggctgccagaccaaggacccgtgtggaaggaggcggctccccgctgcctgccctgacctacaggctaggtggtggtctccttgttttggtgtcaaggactcagtaaaagcatctatttttttagcacttaagctggcaaggcggtaggggcatgcactgttaggtggtggccacccccagggtcaggggaaaagaatgggtccatggagtgcccttgaagcagagaacagccccgagcagtgtgaggacagaggcatcccagcctcagccggtggggacggctgccactcccccagagccctgccaccccatgtgtcctaggctggtggccaaggccatgtgtgagggaagaggggtacctctcttccctgctgctggcctggggtatttccaaaacagccttttcgcacacatgcaggttgcaccgagaggtctggagctgtggctgagccacctctggcggatgttgagccaggaggttgggcaaaggccggatgctgatgccagcgctggaggtggtgatactgggggcggggaaggcctagaaatactttgagccatggccttgccagtgtcccgtgccctccagtgtcaaagatttggggcactgcccgtcgaaatggaaaggttggtgctcagcctctggagcctcacctgcagggcgtccccagctaacacccatccacgcaccacctccaggacgagaacccttgatgtcaaaaccaagtgcccagtggaggcggtgaagctctcggaaatgctgccacctgtgtgaggccgggtctgaactcgagggagtcggagctcagctgtcggtttaaagagacactgaggggaccgggctgccgccctcagcctgcattcctgtgcgcaatcgattccgcaatgacagcaccttactccttcctgcggcaggctcacccctgcctgtgggatgttgtgagaggaacatgagccagacaaagacttggctcagggctccgtggaacaagccaggatgcacggggagctgggggagcccccagcctggggcagcccagcaggccgctgaacaaacaccccagaagccagcactgtggcagggtgctggggagatgcccctctgagccttcctcccccctcagacctgaatgcactccacagttgggggctgcccctgccactcccctggtaatgcataaaaggggaggggaaggttccctggggcttgagctccctctgtggaggtgaggaggggagattccgttcacatccaggaggggcaaaatgactgatgtatttttatgtatctacacagagagtgcattttctctccagagatgctgtctggttaacaaaggaataacttaagaaattgattgattatcttaataaactgtgcaaacccaa

SEQ ID NO: 131774 - DNA, 3621 bp, Homo sapiens
  Payload ID: 5721
  Gene Symbol: FAM101B
  Gene Name: family with sequence similarity 101, member B
  Uniprot ID: Q8N5W9
  ENST ID: ENST00000329099
  CDS Start-End: 1-435
agtccagcgtctctccccctggctcccggctgtgcgctgaggctttgtcccctgtcctttggcgaaggagtggagtttgaccccttaccaccaaaggaagtaaggtacacctccttggtcaagtacgactccgagaggcacttcatcgacgacgtgcagctgcccctgggcctggcggtggcctcctgcagccagacggtcacctgtgtccccaatggcacgtggcgcaactacaaggccgaggtgcgcttcgagccacgccacaggcccacccgcttcctcagtaccaccatcgtgtaccccaagtaccccaaggccgtctacaccaccaccctggattacaactgccgcaagacgctgaggaggtttctgtccagcgtggagctcgaagccgcggagctcccgggcagcgacgacctctctgatgaatgctgacccagcaggctgggctggggtcggaccggctctcccgctgtcctgcccccgactgccctggccaagctgggcgaccttacccttcacgtcattccagccccagaggagtctaacctagagatacctccaagcgcggccgggggaagagaaaaaaaagaaaaaatcactgcatctcataattattgagatctttgtgttgtaattttcaagctgtttttagagggaatatatgtcctggtttgctgctgtgttgtttccccaaagtctcaatcagatgaggcaacaaaaagaccaccagaattgcaggaaagcagcagcagtctgggatagggaggggggaggagagctctccctccgtggtcagtttgtcagaagaaaagcatggaaaaagtgagatttaagaaatctcagccacgggtgtcttcactgcacaaaagtggtgctaattcagtaaacagtgacacctgtgtgggttcaatctgtggagagttgagttccattcctttgtttttaaatttccacctccatttgtgtttcctattaacctaaactcttgtaattctctaaatcttttttcatgatataaaaaaaaaagaaaatcccaaaccacaatttaagatgccttttttttttaaaaaaaaaggttctccgtgttgccacctgctccgggaaggccaggccgatgggcggccaggtttgggagcagcggcttcggctccgattgcttcctgacggtcagttccaagcacaggctctgagaaacgcctcgaacccttggtatctggtgaccgtctccgcaggcttccgtgagtctccgataggtgttttgggcttttggaatactttcagaatactttcccattttttcataaggcaaaacggagtggacggcctttttttgagagaaacagcattctaagagtgtgcttggaaaacacactttttgggagtccacgtggggagtggacactcaggacaggaagcggtggccctaagacctgcggccacccggaggaggcagacgcaggcgatgacctggttcatcatgagaggagctagagttgactcagtcttaggatctcgatggcgtcagaattgcagagggtttctgccagtgccttaggtctaattcagaaagcaaggaaggctgggcacggtggctggcgcctgtagtctcagctacttggaaactgaggcaggaggatctcttgagcccaagaattcgagaccggtctggcaacatagtgagcctccatctctaaaaaaaagtggcaaagctgaggaaatctgtgcccccatcccccgacaccagacaagctaaggtgcattcagagtagggaacgatgtcaaaacctggccgccgtggtggcgcgcattcctctcacaccaccgtacggaggcaggtgacagtcaactgaaatgtccccaaggaccgtgtgaattcggctggcgtggcccagcagcggggtggaccagggtgcggtggcttcagacctgcctcccgccaccccgtcctcccctaaccccttcttgggacctcctgccaatccctgtggtgtttgagtaaagaaagtggctgatggttttacttttttcttccaatattggaaagaacaaactagatattccccttgaacacatccaaattatttccagtgcctgagggttaccgagcactgtaagctcagctcggctgtagctccgggtttctgccgatggcctccatctgcgccgaaagctgaactgagccccgcggtgccccggagccacagcagcaggtgcagcgacaatcgccgtcgtgcgcagtcgctggagtcctggagagccacgctgtcctctgcagacaacagcatcagtccgctgtgccccaatgcatcgacgccctgtggacggggcctgcagtccacccgtggtctgagcttgccgggctgaagctcggctgggacccagggaggggccaccctgggacccacagtctcctcagtcacgtgcagagcaaaaaatgcttcctgtgtttggaagagcaagtgacgcagcatttattgataaaaatggatttttctgtctgatttcatgctgtggtcgtttaagtggtcaatgtcttttttttttttttttttgacatggagtctcgctctgttgcccaggctgagtggaatggcgccaactcagctcactgcaaccttcacctcccaggctcaagcgactctcctgcctcagcctcctgagcagctgggattacaggtgcccaccaccacgcccagctaatttttgtatttttagtagagacggggtttcaccatgttggccaggctggtctcgaacacctgaccttgtgatccacccgcctcggcctcccaataatttgtaagttatgttagcgggatcctcaaggccttgctttgccccgtggagacgcttgctcggatgagctcaggaaacagtaccggctgcgtggcaggtctgggtgttgtgtgcgaggacgtggcctttgaacaccgctgtgttctcagaggtccttaggagatatttttttttgtcttagggggactgtgttaagttcagacaaatcatgctgggtgtgtagagagtgtgaaatacgtcagtgaagtaagtagcagtgagcgattgtgaatgtgtaatgtaaatggaaaaccgggttttaccgtgttaagttattcactagggagccagtcgtagttctttgtaatcctctttcttccaaacctgctttgctgaaagttgcagaaaaggaagtgtgtggagagaaacagaacccttcagggtgggtcagaggacgccatccacagtggattcgtgttcgtttgcaggtggaagcagtgatttttaggacccactgattaaaaacaaacattcccaagtgtctctgagagatgctgtttatttgttaattaaaaagcttttttctctgtcttttaaattatggctttcatgtaataaggatatttttagtgaaaaattgttttcctttcaaattacagaccttttaaaaaaacttaatttgagcgagtaccttttcatttgacacttttcctgtttctaaccttaggaaaccagaatagcgtttggcagacacgacgttttcagtttacctttgacacctgccccactccattttgctttgtgatgtcttcatttaacaataaattatctgaaaaaacaaaa

SEQ ID NO: 131775 - DNA, 3352 bp, Homo sapiens
  Payload ID: 5722
  Gene Symbol: FAM102A
  Gene Name: family with sequence similarity 102, member A
  Uniprot ID: Q5T9C2
  ENST ID: ENST00000373084
  CDS Start-End: 313-1041
gctgccgacccggggcctctgtccttgggtcccagttatgcaacagtcagtcgaggctgtggggctggcccaggggctttatctgtctccctctccaacttttgccaagttacccttctgggcttccgccagccaggagcccacactccctcagccctcccacacgctcctctcacctcctagctgggcttcgctgacttgaacctggccgagtttgcgggctcgggctccacggtgcgctgctgcctgctcgagggatatgacacgaagaacactcgccaggacaactccatccttaaggtcaccattggtatgttcctgctctctggagatccctgcttcaagacgccaccatcgactgccaagtccatctccatcccaggccaggattcctccctgcagctgacgtgtaagggtggtgggaccagcagtgggggcagcagcaccaactccctgactgggtcccggccccccaaggctcggcccactattctcagctcagggctgccagaggaacccgaccagaacctgtccagccctgaggaggtgttccactctggccactcccgcaactccagctatgccagccagcagtccaagatctccggctacagcacagagcactcgcgctcctccagcctctcagacctgacgcaccgccgcaacacgtccaccagcagcagcgcctctgggggccttggcatgaccgtggagggccctgagggcagtgagcgggagcaccggcccccggagaagccgccgcggccaccccggcccctgcatctgtccgatcgctctttcaggcggaagaaggactcggtggagagccacccgacctgggtggacgacacgcggatcgatgcggatgccatcgtggagaagatcgtgcagagccaggatttcacagatggcagcaacaccgaggacagcaacctccggctgttcgtgagccgcgatggctctgccacgctgagcggcatccagcttgccaccagggtctcttctggggtctacgagccagttgtgattgaaagccattgaggagcaggtgtccgggctggagaagagtcctgctttctctggagtccagacctgtatcattccatgaggaactttccccttcagatcacctctgcgccacatctcatccatgcctcctccatgcactccagtccacactccccgtagcatcattccattgcccctcccatccatgctgggaccctcctggcccaccaaggcccaggcaccactgtgaatattctcctctgaaccactagagggcaggccaggcaggccaggcgggcccgtgcagcttgtgggcaagaaggagctggcaaggaccggcgctgctggagactgacccagccctctggctgaggacatgcagcggctcctaaatgtagagatgcctgtggctgagggggcctctctacctgtgtccccactcactccaggagcactggctttggtcacgtcttagcagcagggccttgctccgttgttcccttgccctggtggtgggggggccagaccacctccggaatcctgccacctgtgactgtctgactgcttagtgcttcagctgtcccttccttgtgtcctgggggacctgctggcggcctcttcctgggagccatgacctcagaccccacccacactccagatcgagacccctgcctccccccggcaaatgtcctcccgctgccttgcagcctgcactttgcacatgctcacccccagcacagtcccactggcccctcacctccccttccctgagctccttcccaaggactcctggtcactgcctgctgtgcagtcagaggcccagggtccagcagcccggcgggaacgggtgctgcctcttcctccagttagctccagctcaggtctgagacccgtgctgagaaaggtctgagcaccgaccgtgccctctgcccagggctgggtcctgagcagctggttttcctgcaggaaggttggagcaagcaaagtccttctctgccctcagggtcagctgcccagactggggcggatgccagagaggcaggtgggctgtggctggactggtccggagctggcttccttaccagaaaagcctcagccttcctctggaagcatcccccgttctgggcaagggggaagggctcctttaaggggtgtgctttcccagtggggagcagtctggccctgccccctactaaagcctctgctctcagcactttcccccaagtccttgtaacttgcttgaaggtgggttctggctgccagccagtccctggacaaactctcctgccccttttaaatttcactcattttgtataaacccagcaggctggtgtttacttagccctgtagcttttttcattttttctttccgtctttcttcttgagttcacggttcaatattgcctcctcgccctggtgaggggaggtgctgcttttctgccccacctgccggctggttccagcagcgctggggcccagctggggggccgggatgggggcttctctctctgggaggggtgcaggtgccctccccaggctgggagggttccttccctagctccccatctgcccccgctggtgagagttgggcttcttggtcttggaactccctggcattgggaacagagcatttccagcatttgttgttgttttactcacctaacccttagaaaatgaatgttagaaggtgcctgccgaggcgggacagagtgttcgctcgcgctggagaaggctctgctcagccctgagagtcccttcctgccccaccgatactggcactttaaaaaggaagctgaccgcacagtgtccagacgaattggcccccagaagatggggagttctgtcctgcccttctgtgtctgcgtgacctcacccagcctaggagggaggtgcattcagggtagatttgcctctcattcaaagttctggggctttgggtggaaaacagccagctttggcgctgttggggagactcctccagaccaggaaccccagaaggagacagagcctgccacatcctcccacgccaggccctgggccagggtgattggactgagaatttggccacaaccaaattgatgctggctggaaccagaggccagaaagcctggccttgtccccatgtgggagccctgtcctcagccctcttgtccccttgagctcagtgaattcccaccaggtgcccacagctcctggacttcaaattctatatattgagagagttggagagtatatcagagatatttttggaaaggagttggtctatgcaatgtcagtttggaatcttcttgaaagtttaatgtttttattaggagatttaaagaaaataaaggtctacaatatc

SEQ ID NO: 131776 - DNA, 4144 bp, Homo sapiens
  Payload ID: 5722
  Gene Symbol: FAM102A
  Gene Name: family with sequence similarity 102, member A
  Uniprot ID: Q5T9C2
  ENST ID: ENST00000373095
  CDS Start-End: 377-1531
ccgcgcggcgtgagctccccggacatcgcgtctcgggatgctgcaagccagcgcggccgctcgcgcgcagccccgcacctccgcccctgcctctgcctcctgggccatgccctgctgtttacatgccggtgaggtccccggccgctccgaacccctccgagccccggctccccgagggtgaagcccgccggcccgcgaactggactggtggatctctcagacctggggccccggactccgatctccgccgtctccgccaccatcagggcgggatccggctctggtgttttgaggagggggtgtggtgtagggaaaggaatcccgtccctctccaccttttttcgccttcggggcttcagactcagggaactcgctcatggctttcttgatgaagaagaagaaattcaaattccaaactactttcaccctggaggagctgactgcggttcccttcgtgaacggggtcctcttctgcaaggtccggctgctggatggaggggattttgtcagcttgtcgtcaagggaggaggtacaggagaactgtgtgcggtggcgaaagaggttcaccttcgtgtgtaagatgagtgctaacccggccaccggcctgctggacccctgtgtcttccgtgtgtctgtgcgcaaggagctgaaaggcgggaaggcttattccaagctgggcttcgctgacttgaacctggccgagtttgcgggctcgggctccacggtgcgctgctgcctgctcgagggatatgacacgaagaacactcgccaggacaactccatccttaaggtcaccattggtatgttcctgctctctggagatccctgcttcaagacgccaccatcgactgccaagtccatctccatcccaggccaggattcctccctgcagctgacgtgtaagggtggtgggaccagcagtgggggcagcagcaccaactccctgactgggtcccggccccccaaggctcggcccactattctcagctcagggctgccagaggaacccgaccagaacctgtccagccctgaggaggtgttccactctggccactcccgcaactccagctatgccagccagcagtccaagatctccggctacagcacagagcactcgcgctcctccagcctctcagacctgacgcaccgccgcaacacgtccaccagcagcagcgcctctgggggccttggcatgaccgtggagggccctgagggcagtgagcgggagcaccggcccccggagaagccgccgcggccaccccggcccctgcatctgtccgatcgctctttcaggcggaagaaggactcggtggagagccacccgacctgggtggacgacacgcggatcgatgcggatgccatcgtggagaagatcgtgcagagccaggatttcacagatggcagcaacaccgaggacagcaacctccggctgttcgtgagccgcgatggctctgccacgctgagcggcatccagcttgccaccagggtctcttctggggtctacgagccagttgtgattgaaagccattgaggagcaggtgtccgggctggagaagagtcctgctttctctggagtccagacctgtatcattccatgaggaactttccccttcagatcacctctgcgccacatctcatccatgcctcctccatgcactccagtccacactccccgtagcatcattccattgcccctcccatccatgctgggaccctcctggcccaccaaggcccaggcaccactgtgaatattctcctctgaaccactagagggcaggccaggcaggccaggcgggcccgtgcagcttgtgggcaagaaggagctggcaaggaccggcgctgctggagactgacccagccctctggctgaggacatgcagcggctcctaaatgtagagatgcctgtggctgagggggcctctctacctgtgtccccactcactccaggagcactggctttggtcacgtcttagcagcagggccttgctccgttgttcccttgccctggtggtgggggggccagaccacctccggaatcctgccacctgtgactgtctgactgcttagtgcttcagctgtcccttccttgtgtcctgggggacctgctggcggcctcttcctgggagccatgacctcagaccccacccacactccagatcgagacccctgcctccccccggcaaatgtcctcccgctgccttgcagcctgcactttgcacatgctcacccccagcacagtcccactggcccctcacctccccttccctgagctccttcccaaggactcctggtcactgcctgctgtgcagtcagaggcccagggtccagcagcccggcgggaacgggtgctgcctcttcctccagttagctccagctcaggtctgagacccgtgctgagaaaggtctgagcaccgaccgtgccctctgcccagggctgggtcctgagcagctggttttcctgcaggaaggttggagcaagcaaagtccttctctgccctcagggtcagctgcccagactggggcggatgccagagaggcaggtgggctgtggctggactggtccggagctggcttccttaccagaaaagcctcagccttcctctggaagcatcccccgttctgggcaagggggaagggctcctttaaggggtgtgctttcccagtggggagcagtctggccctgccccctactaaagcctctgctctcagcactttcccccaagtccttgtaacttgcttgaaggtgggttctggctgccagccagtccctggacaaactctcctgccccttttaaatttcactcattttgtataaacccagcaggctggtgtttacttagccctgtagcttttttcattttttctttccgtctttcttcttgagttcacggttcaatattgcctcctcgccctggtgaggggaggtgctgcttttctgccccacctgccggctggttccagcagcgctggggcccagctggggggccgggatgggggcttctctctctgggaggggtgcaggtgccctccccaggctgggagggttccttccctagctccccatctgcccccgctggtgagagttgggcttcttggtcttggaactccctggcattgggaacagagcatttccagcatttgttgttgttttactcacctaacccttagaaaatgaatgttagaaggtgcctgccgaggcgggacagagtgttcgctcgcgctggagaaggctctgctcagccctgagagtcccttcctgccccaccgatactggcactttaaaaaggaagctgaccgcacagtgtccagacgaattggcccccagaagatggggagttctgtcctgcccttctgtgtctgcgtgacctcacccagcctaggagggaggtgcattcagggtagatttgcctctcattcaaagttctggggctttgggtggaaaacagccagctttggcgctgttggggagactcctccagaccaggaaccccagaaggagacagagcctgccacatcctcccacgccaggccctgggccagggtgattggactgagaatttggccacaaccaaattgatgctggctggaaccagaggccagaaagcctggccttgtccccatgtgggagccctgtcctcagccctcttgtccccttgagctcagtgaattcccaccaggtgcccacagctcctggacttcaaattctatatattgagagagttggagagtatatcagagatatttttggaaaggagttggtctatgcaatgtcagtttggaatcttcttgaaagtttaatgtttttattaggagatttaaagaaaataaaggtctacaatatctttaggttttttttttttcctgtttaccgcacaaactgaccacatggcatgtctatcaggatggagggtgtccatgttctcctctgtctttagggaggtgataaggagatgggcggaggggtgtttttttctttgactcccctcctttctaacagaatgttgccaccactgcttgagtgggctgtgtttgttcctctgtcccagcttctgttgtagaaaataacattgttaggggaactcaggctagtgtcagcgtcttggtttggggagaaaaaattaaatgtttcggtttttgtttcttt

SEQ ID NO: 131777 - DNA, 5600 bp, Homo sapiens
  Payload ID: 5723
  Gene Symbol: FAM102B
  Gene Name: family with sequence similarity 102, member B
  Uniprot ID: Q5T8I3
  ENST ID: ENST00000370035
  CDS Start-End: 341-1423
tcccgactcccagacgggcggcagcggcggcggaggcggcggcggcggcggcggcgagctgagcaccaaaagggcgctcacctccccgggcgagctgcagcacgaccgctccccgcgggcggtcggggtccgcgccgcagctgccgccgcgttccggcccaggctgccgcgagaggcggcggcagcggccccggccgcggccggcctgcggcgccccccggccgcgcccccgcgcacagctcgcggccccggccatggggctgggctgatccggggctcggccaagctgaggcggcggcgcccggccgtgcgcccagcttgcaggcgcctggctctcacgatgatgaagaagaagaagtttaagtttaaggtggacttcgagctcgaggagctctcctcagtgcccttcgtcaatggggtcctcttctgcaagatgcggctgctggacggcggcagcttcaccgccgagtcctccagggaggtggtacaagcaaactgtgttcgctggagaaagaagttctcatttatgtgcaaaatgagtgcaagtgctgccacaggcatcctagatccttgtatctacagagtatccgtgaggaaggaattaaaaggtggaaaagcttatgcaaagctgggctttgcagatctaaacctggcagagtttgctggatcaggaaataccactcgccgctgtttactggaaggctatgataccaaaaatacaagacaggataattccattcttaaagttttgatcagtatgcaactgatgtctggtgacccatgttttaaaacgcctccctccacttcaatgtctataccaattgctggtgaatctgaatctttgcaagaagatagaaaaggtggagagactctcaaagtgcatcttggaatagcagatctttcagcaaagagtgcctctgttccagacgaacttggtgcctgtggacattctagaacatcaagctatgcaagtcagcagtcaaaagtatcagggtatagcacgtgtcactcccggtcatctagtttctctgagctctgccacaggagaaatacctcagtgggaagcacatcaacaggagttgaaagtattctagagccatgtgatgaaattgagcagaaaatcgctgagccaaatcttgatacagctgataaagaagatacagcttcagaaaaactcagcagatgcccagtgaaacaagattctgtagaatctcagctgaagcgagttgatgacaccagggtggatgcagatgacattgtagagaaaatattacaaagtcaagacttcagcctagattccagtgcggaagaagaaggactaaggctatttgtgggtcctgggggaagtacaacctttggcagtcatcatcttccaaatagggtggggtctggagcttatgaacaagttgtgatcaaacgctagaagtcaagtcggtgaaaacatttccttgtggatttaagatgtgagtagttgatgtatcaaggcattttattcaagcacttaatagaaaatgaacctcaactatcaagaggaaagccaatgctggtttcttctctggaaggacccaccgccatcctgtaccagccaccaaaggggaacatctacatggcagtctccaggcactgtgccactgtgtgccttggaagcacctggcttctgtggtcactgcacatcataatgaaaagcctgctttttctttcagaacaccccagcggagaaaacagcattatatacatcggagtatcattttaggattcaagtgtaaaaatctgtgatcaagaggctcaatagatttgggctctatggtttggtttttttagtttgagagacagtacatgaatataacttaaaccctatagattttgtcaagatagttgtaattcctgttctggaaatcttccctattacactacctacagcattgtataaagtgtgggtgttcatgctttgggaaaatgttagactacaatttaaacatgtgatgtgcttattcataattctcagtgtatcagtcataaatgaaataacaagtgcatttaagtcagagatacgtgaatggatgtaatgccgttatgcagtatatattgttaattgtcattaatattagatgagctgcagaaccacccccaagcactacataaaagactcaaaataagtttaacacttactgtgttgggcaccctaacagaagagctatcttaactcattgaatattaagatctgctggtttcaggagtcaaaatgtagaaaaagaggagaattgtaatatggtcagaaacagagaagccttttctatgtaaattcagacttatctgaggctaacagttttccgaagtggtggtgggtagcagcatgacagctgcttgccatgactgatgcagactactaggtttccattttagctctctgtaggtactgttttcttccccactgtgtcgaaagtgatttgttttgaagcaagagtagaatataacatctatcaaatatagcttttaaaataagaatacctggtctggatccagttgagcagcacagcagataaaccttagagtttttctgttcttacatgacggtttccatgtggaaagatctaaactttcttggaatcactattagtgaagaaaaatgtagaatctgtataaccagtaattccccaattcttactttcaaagtcatatccaagaaagacaatatgtcagaatagaatgactttggtctaggtgttttcacgttggcaaaaataaggaggaaattatattattttaatatccaaatttaaaggtttggaaaattttgaatagttaatattagaacttatgttgctgttttttatatttcaaggattgagtattctgcattaatccaatactattccaacaaagagattctggaagtttttaaaaaatgataccctgttttatattttgaatgtagagagactctgagagagagaatgttctgagttatactttttattttttaagatttatttttaagaataaaacattgacctgaacattttagcctaaccaagggacttaagtggtaaagacttgcattatgtcttcatgtgaactgatccgttcattatatattatgggaaaaatcaaagaaagttttttatagagatatgaagatattatttagagagatatttattatgacattttttaaaaacatatttttctattttcaaaatattatttctaggctatatttttattggtgctgtgcaaatgattttgcagttttgaaaatgataaaactagattgtaagtggggttcagtgaggacattcatcagacacgtaagaggtgctgcaatcagggtgatgcccatcttactcatccttggctgcccttggtccgacacctctctatacaagactggttctcagtattttaaatggtacagaattctttttaaaaagtagagagattttgaaaagcataaaaatcatgcctttataatcttagcagccatcagatacaccttgatttatgtagtagtaaatataacaaatattttaataaatagaaacactgataaggaagaaaaaagaactaatgtctatgtcttctgtagtcagcaaaagtctggatccattttctattttgtgttccattggcacactttgtgttcaaatttcagtgcagtcctttcaaaatactcgctaagggttgcctaagtgtctgccttactttctgattgtccttttctgagagcatggttaagaacatcttaaccatatagctgttgaaaaaatctgtttattaaataacaagttcacttctgtttatgttttgagtttagaaaatttgacttgaaaatttagattattaataaatttatttttaaatattaaagtcaaatttcaaatcacccagtgttgaagaatttgcagatgtatacaatactttttctaattatgtcttttctatctccatgcctggctttttctaattatatcctagagaaaaagactaatggtatttcaaagctgtgtatttgtgacgagataaagaagagtcttaaacatcttgtttgggagaatgcacaggccagtcaggagacccacctcctcctgtgccctgagctgctgagacccgacagatcatgaaggctagtaaagggcagagaaggccctgagccatcagtttacactcgaattgttgactcccctttgtggtgtttttgaaggctgcttataccaacagctaatgtggattagtgcttatgatcttgaaaaagtcttgaccaagaatcctaaactccaccactcctcccattccagcttaacactatcagaataatatccaaattccagatttttttcttttttacttttttttcttccttttttaagagagacagtgtcttgctcggtcacctaggctggagtgtagtggcgcaatcgttgctcactacagcctcccaactcccaggctcaaatgagcctcccaccttggcctcccaaagtgctaggaccacaggcatgagccactgtgcccagcctagtttcttttctgtatgctttttttacaaaactgtgagccacagaggttgaccacttagccaatttgttgctagaagggagaaaaaaatctccaactagcctccagacaaaacatactcaaattcaaacagcagttagttttaattaacatacagaagtaattttagactttcagatttctatgctgactagaacactttgcaggctgaagctgacattattaccaaatacttcatttaagtacatactctgaagtgtcaggcttccagtatatatagcaacgctctgagagacaaactgggctcatatgacggggttgcattttattttcttaacaggtctttaaattgggcagttctgaaattctgtttggtcagttctagatggtacgtcatgtgaatgcaaccaagcactgtagttgaaattgtgttatgccactactcatgttgtcttaggtactacgcataatgttaatagctgagatgttaaagaatttgaagtctaaaatataaaagatgaatatacccatattaatcctatgttaagatgctctggaaataaaggccttattcccttacacatgcgatttttgtaagataatatatacacagtatattttaaatgtttgtgtgggtggtctgtgtagttactccccatacaacaaagctgacaaaatttttaatttacacaatgtattctgcattttcaaatgtttatgttgtgtatatagcaaagaaattatcttactgatatgcgttgaccaaatcccatggagaaaagacatctcatttgaggttccccttcctctcatgtgtttgattttttggaaggtgatacagtatgtgggtaaccatgcaaatgtttatgaataactttactgaagtgattccatccgtattctgttctaatacttggagaatgaccttcatatttatatattttatttctttgtttcaactatccagtgataattcaggaaatgtttccttttttttttttttttacaaaaactttttatttgtaaaatgtttgtaataatgtaaaggtgaacatgttcaataaaaatcatatattaaaagttta

SEQ ID NO: 131778 - DNA, 1585 bp, Homo sapiens
  Payload ID: 5723
  Gene Symbol: FAM102B
  Gene Name: family with sequence similarity 102, member B
  Uniprot ID: Q5T8I3
  ENST ID: ENST00000405454
  CDS Start-End: 341-1408
tcccgactcccagacgggcggcagcggcggcggaggcggcggcggcggcggcggcgagctgagcaccaaaagggcgctcacctccccgggcgagctgcagcacgaccgctccccgcgggcggtcggggtccgcgccgcagctgccgccgcgttccggcccaggctgccgcgagaggcggcggcagcggccccggccgcggccggcctgcggcgccccccggccgcgcccccgcgcacagctcgcggccccggccatggggctgggctgatccggggctcggccaagctgaggcggcggcgcccggccgtgcgcccagcttgcaggcgcctggctctcacgatgatgaagaagaagaagtttaagtttaaggtggacttcgagctcgaggagctctcctcagtgcccttcgtcaatggggtcctcttctgcaagatgcggctgctggacggcggcagcttcaccgccgagtcctccagggaggtggtacaagcaaactgtgttcgctggagaaagaagttctcatttatgtgcaaaatgagtgcaagtgctgccacaggcatcctagatccttgtatctacagagtatccgtgaggaaggaattaaaaggtggaaaagcttatgcaaagctgggctttgcagatctaaacctggcagagtttgctggatcaggaaataccactcgccgctgtttactggaaggctatgataccaaaaatacaagacaggataattccattcttaaagttttgatcagtatgcaactgatgtctggtgacccatgttttaaaacgcctccctccacttcaatgtctataccaattgctggtgaatctgaatctttgcaagaagatagaaaaggtggagagactctcaaagtgcatcttggaatagcagatctttcagcaaagagtgcctctgttccagacgaacttggtgcctgtggacattctagaacatcaagctatgcaagtcagcagtcaaaagtatcagggtatagcacgtgtcactcccggtcatctagtttctctgagctctgccacaggagaaatacctcagtgggaagcacatcaacaggagttgaaagtattctagagccatgtgatgaaattgagcagaaaatcgctgagccaaatcttgatacagctgataaagaagatacagcttcagaaaaactcagcagatgcccagtgaaacaagattctgtagaatctcagctgaagcgagttgatgacaccagggtggatgcagatgacattgtagagaaaatattacaaagtcaagacttcagcctagattccagtgcggaagaagaaggactaaggctatttgtgggtcctgggggaagtacaacctttggcagtcatcatcttccaaatagtgccctggaagctccctccttgctttgagttgtccccgcctttctggatggaaccaatgtacttcttacatatattgattaatgtctcatgtctccctaaaatgtataaaaccaagatgtgccccgaccaccctgagtacatgttgtcaggacctcctgagactgtgtcatgggagcgtgtcctcaaccttggcaaaataaactt

SEQ ID NO: 131779 - DNA, 1568 bp, Homo sapiens
  Payload ID: 5724
  Gene Symbol: FAM103A1
  Gene Name: family with sequence similarity 103, member A1
  Uniprot ID: Q9BTL3
  ENST ID: ENST00000304191
  CDS Start-End: 222-578
gtcaggtggttgtcggattttagaggaaggcgctcggttacattggagaactggagtggtctggagttccacggtgtagtggaccagaggccacctctcctgggcttctcagtgtctcgccggcggggttcggcctgagctggattgacatagcccttggcggatttaaacaacctaaacattaagcagtacagctgcctcaaacctttgggattttcagaatgactgacactgccgaagctgttccaaagtttgaagagatgtttgctagtagattcacagaaaatgacaaggagtatcaggaatacctgaaacgccctcctgagtctcctccaattgttgaggaatggaatagcagagctggtgggaaccaaagaaacagaggcaatcggttgcaagacaacagacagttcagaggcagggacaacagatgggggtggccaagtgacaatcgatccaatcagtggcatggacgatcctggggtaacaactacccgcaacacagacaagaaccttactatccccagcaatatggacattatggttacaaccagcggcctccttacggttactactgatagaaatgttggcagcttttagtaaaagcatttactctgttaccatgagaaaagtttgggtgtcttctgttggtcatagttttacatctgattttacagaatggattattgattttttggaagttgagactttaaaaaaaatagatcttacttgcgaaatgcgatggttgctgggaatacctgaaactgtggattatattgcttgacttctacctcagaatcttctttgtttcatgacttaatagtgctttaagtttggtatattatttgacctctaggaattctttgttttacacagaaataaaaattttaaaatagaaaatgcttttactttgtaaggtaagagagtatccatatgcttagatgtgctcgtttctaaaattctagaggttgatataatcagctcatgaatgcacagctatgctttttgtgatagattgtacataacatcagcagttgaaaggtaaaacaattgcttttttttttttttgcatttgttaagtgactatggtactttgtgattccttaatctatagatgagtcagctccacacttgagtctctttttagagggaaatcagtaataaagctgtaaaataaggaaggaatcattgtcagtttgtgtcttgatctggtggtggttgggataagggtacacatcattttatacaaacactaaagctttttgctaacaacatagcaggtcaaaattcacacataagaaagtttaactctgtactgttcacactttttaatcctgtaaataatgctgcattttgatggttcttacttttttggtatttaatgtgggctgattttacaatgttatattcacttccagatgcatacctctgctgctttctctcctataaatagtgatgctataaacttcctttcacagagatcattctatttcaaatcactttaatgattattacaatgatttcattcaaataaaaattttaaaatatttaagcatcttcactcccaa

SEQ ID NO: 131780 - DNA, 2798 bp, Homo sapiens
  Payload ID: 5725
  Gene Symbol: FAM104A
  Gene Name: family with sequence similarity 104, member A
  Uniprot ID: Q969W3
  ENST ID: ENST00000403627
  CDS Start-End: 62-622
ggtgcggttgggatggtgccactgcgcagccgcgagagggcggtaccacggcggcagcgacatgggggggcgcggagcagacgccggaagtagtggtggtacgggtccgactgaggggtactcgccaccggctgcgtccacccgagcggctgcgagagccaaggcccgagggggtgggcgtggcggccgccgaaacacaaccccctctgttccctctcttcgcggagcggcgccgcgtagcttccatccgccagctgccatgagcgagcgcctccgtcccaggaaaaggagaaggaatggcaacgaagaagacaaccatcttcccccccagaccaaaagaagtagcagaaaccctgtctttcaggattcctgggacacagagtcttcaggcagtgacagtggtgggagcagcagcagcagcagcagcagcatcaatagcccggacagggccagcgggccggaaggcagcttgagccagaccatggccggatccagccctaacacgcctcagcccgtgcccgagcagtccgcgctgtgccaaggcctctacttccacatcaaccagaccctgagggaggcccacttccacagcctacagcaccgagggcggcctctgacatgatgtgccggcagtttcttgccttctgtgaagggacagcgctgtgcagatttgatatttcaacttacaacttgttttaaaagaaaaattgcacacgaaaaatgcctgttggcttttcagtctatatttgaaataacaggttaacaggcagttgtttacttgtggttttgctgcactattgcaatttcaaaggggctttgaagcaattttttataggattcttttgagggagggtatcaaatctatgtcaaggtagtggtttgaggaaaactcattctgtgtgttgaatccatagtatgtcccattcagactgatttccaaatctgtcaactagaaactctactttatgtaaagggccttttaaaaatgcgggatcttcaattttttttattcaataaactagtaaagagtatctagtttccatgaaaaaacataagtttttttccaaaatataggaagcttgattcagtcttgcactgaaattaactgccatactacctctcagtatgtagatgttctattgaaagtactctctcctgtgtaacaggagaacaatcagatccaattcagactgtcagtgaagcacactccctaataatagtctctactctttgttatatatttgtatttccagagagaatgtcttttagattcttgtatacccagataacttctgtgtcactattccaccagagtctgcacctcagactttagtaggaaacatggcacagttctgcaagtaaagtaatatgtaatgactttttgtcctacaaacttggtcagtcagcagcttacatgatctcattgacaattccaccttgtagtgtcaacaattaaggtgttgttgaacgctgataaaatgtaagctacctgaactgatgtctaaagcaacaagtattgtgaaattttgggacaaggattaacttgatgcttaaagtaacccccaacagtaactagggggccacattccatcagtgaaactggaaagattggtgtggctgagaatcagatgagcagaggcacctttagaagaaataatgtggtagtatttatttagggagagacagatgtgttgccatgttacttagtcatactagagagccagccaagtttgaataatgaaggtgcagacgtgttgtcttcttcactgacaagctgtctgaacaaggagccaggaactgtcgggtcaccagctgtggagcgtgccggggggacaacctgccattggatgtagagaaaagtgccttagagttggcctgagccctcctgcccactcgccctccgcgcgacgccactcggagtccacacggcacacacaagcggagctgagaagcacgatggctctagtcagaggactttgctgtcggtccagatttgaagaggacacggaacagcatgagcctttgtgacaaaactagaatttggaaatgaggactgtcttgggaaaagggtagacacaggcacttctctccacagcctgctaacctaatgtgggcagaactgaaagatcactgcagtggaaactgttctggaagaggctgcaacatagcccatgcttagggactggatggtttttgcaagagctttttttttttttaaactaccatctcccaacttttaaagccagatacttgacaaggattttagatcttaatgggttcgatggtagggaatacggaaaggatacactgctaatattgtgtctaacaataaagcaaacaactcgatgctgtaagaagacaagctgtttgagctttcaaacacacatgcacacagcacaattcagaaatacccaggaggattcctgcaggcttaacagttggcatcgtactgaaatgaaacgtgtattaacaagaaaatgtcaaacttttggggaaacaaattttctgttacttcccacccaactaaaagggaagataaaaccatcatcaccagaacaaaacagattttctccaaacaagtacaatgatagtgccgggttggcagttaactctttcaccctactaaattcaagagctcatctccaccctgtcctgtatattttctacatttctattaagaggctacttggtagtgtcagcgggcatcttttacaccttctagtagctcaagctagtaaaaccttgtacttctctattgcgccgccattaaaagcagcattagtgcattttgtcattca

SEQ ID NO: 131781 - DNA, 2865 bp, Homo sapiens
  Payload ID: 5725
  Gene Symbol: FAM104A
  Gene Name: family with sequence similarity 104, member A
  Uniprot ID: Q969W3
  ENST ID: ENST00000405159
  CDS Start-End: 66-689
agtcggtgcggttgggatggtgccactgcgcagccgcgagagggcggtaccacggcggcagcgacatgggggggcgcggagcagacgccggaagtagtggtggtacgggtccgactgaggggtactcgccaccggctgcgtccacccgagcggctgcgagagccaaggcccgagggggtgggcgtggcggccgccgaaacacaaccccctctgttccctctcttcgcggagcggcgccgcgtagcttccatccgccagctgccatgagcgagcgcctccgtcccaggaaaaggagaaggaatggcaacgaagaagacaaccatcttcccccccagaccaaaagaagtagcagaaaccctgtctttcaggattcctgggacacagagacagtacctgtaatgagaaacagtaaagaaaacagactaagaggaaacaaagcgttctgcgcgtcttcaggcagtgacagtggtgggagcagcagcagcagcagcagcagcatcaatagcccggacagggccagcgggccggaaggcagcttgagccagaccatggccggatccagccctaacacgcctcagcccgtgcccgagcagtccgcgctgtgccaaggcctctacttccacatcaaccagaccctgagggaggcccacttccacagcctacagcaccgagggcggcctctgacatgatgtgccggcagtttcttgccttctgtgaagggacagcgctgtgcagatttgatatttcaacttacaacttgttttaaaagaaaaattgcacacgaaaaatgcctgttggcttttcagtctatatttgaaataacaggttaacaggcagttgtttacttgtggttttgctgcactattgcaatttcaaaggggctttgaagcaattttttataggattcttttgagggagggtatcaaatctatgtcaaggtagtggtttgaggaaaactcattctgtgtgttgaatccatagtatgtcccattcagactgatttccaaatctgtcaactagaaactctactttatgtaaagggccttttaaaaatgcgggatcttcaattttttttattcaataaactagtaaagagtatctagtttccatgaaaaaacataagtttttttccaaaatataggaagcttgattcagtcttgcactgaaattaactgccatactacctctcagtatgtagatgttctattgaaagtactctctcctgtgtaacaggagaacaatcagatccaattcagactgtcagtgaagcacactccctaataatagtctctactctttgttatatatttgtatttccagagagaatgtcttttagattcttgtatacccagataacttctgtgtcactattccaccagagtctgcacctcagactttagtaggaaacatggcacagttctgcaagtaaagtaatatgtaatgactttttgtcctacaaacttggtcagtcagcagcttacatgatctcattgacaattccaccttgtagtgtcaacaattaaggtgttgttgaacgctgataaaatgtaagctacctgaactgatgtctaaagcaacaagtattgtgaaattttgggacaaggattaacttgatgcttaaagtaacccccaacagtaactagggggccacattccatcagtgaaactggaaagattggtgtggctgagaatcagatgagcagaggcacctttagaagaaataatgtggtagtatttatttagggagagacagatgtgttgccatgttacttagtcatactagagagccagccaagtttgaataatgaaggtgcagacgtgttgtcttcttcactgacaagctgtctgaacaaggagccaggaactgtcgggtcaccagctgtggagcgtgccggggggacaacctgccattggatgtagagaaaagtgccttagagttggcctgagccctcctgcccactcgccctccgcgcgacgccactcggagtccacacggcacacacaagcggagctgagaagcacgatggctctagtcagaggactttgctgtcggtccagatttgaagaggacacggaacagcatgagcctttgtgacaaaactagaatttggaaatgaggactgtcttgggaaaagggtagacacaggcacttctctccacagcctgctaacctaatgtgggcagaactgaaagatcactgcagtggaaactgttctggaagaggctgcaacatagcccatgcttagggactggatggtttttgcaagagctttttttttttttaaactaccatctcccaacttttaaagccagatacttgacaaggattttagatcttaatgggttcgatggtagggaatacggaaaggatacactgctaatattgtgtctaacaataaagcaaacaactcgatgctgtaagaagacaagctgtttgagctttcaaacacacatgcacacagcacaattcagaaatacccaggaggattcctgcaggcttaacagttggcatcgtactgaaatgaaacgtgtattaacaagaaaatgtcaaacttttggggaaacaaattttctgttacttcccacccaactaaaagggaagataaaaccatcatcaccagaacaaaacagattttctccaaacaagtacaatgatagtgccgggttggcagttaactctttcaccctactaaattcaagagctcatctccaccctgtcctgtatattttctacatttctattaagaggctacttggtagtgtcagcgggcatcttttacaccttctagtagctcaagctagtaaaaccttgtacttctctattgcgccgccattaaaagcagcattagtgcattttgtcattca

SEQ ID NO: 131782 - DNA, 417 bp, Homo sapiens
  Payload ID: 5725
  Gene Symbol: FAM104A
  Gene Name: family with sequence similarity 104, member A
  ENST ID: ENST00000583024
  CDS Start-End: 15-344
acggcggcagcgacatgggggggcgcggagcagacgccggaagtagtggtggtacgggtccgactgaggggtactcgccaccggctgcgtccacccgagcggctgcgagagccaaggcccgagggggtgggcgtggcggccgccgaaacacaaccccctctgttccctctcttcgcggagcggcgccgcgtagcttccatccgccagctgccatgagcgagcgcctccgtcccaggattcctgggacacagagtcttcaggcagtgacagtggtgggagcagcagcagcagcagcagcagcatcaatagcccggacagggccagcgggccggaaggcagcttgagccagaccatggccggatccagccctaacacgcctcagcccgtgcccgagcagtccgcgctgtgccaaggcct

SEQ ID NO: 131783 - DNA, 451 bp, Homo sapiens
  Payload ID: 5725
  Gene Symbol: FAM104A
  Gene Name: family with sequence similarity 104, member A
  ENST ID: ENST00000580032
  CDS Start-End: 140-430
gaataagcaggtgaatgtgaccaagaggaaaaggagaaggaatggcaacgaagaagacaaccatcttcccccccagaccaaaagaagtagcagaaaccctgtctttcaggattcctgggacacagagacagtacctgtaatgagaaacagtaaagaaaacagactaagaggaaacaaagcgttctgcgcgtcttcaggcagtgacagtggtgggagcagcagcagcagcagcagcagcatcaatagcccggacagggccagcgggccggaaggcagcttgagccagaccatggccggatccagccctaacacgcctcagcccgtgcccgagcagtccgcgctgtgccaaggcctctacttccacatcaaccagaccctgagggaggcccacttccacagcctacagcaccgagggcggcctctgacatgatgtgccggcagtttcttgcct

SEQ ID NO: 131784 - DNA, 422 bp, Homo sapiens
  Payload ID: 5725
  Gene Symbol: FAM104A
  Gene Name: family with sequence similarity 104, member A
  ENST ID: ENST00000579872
  CDS Start-End: 46-422
gggcaaataggcaaaggcagccactcttatatcaaatgttgtcatatggaagggagtacaattaggaaaaggagaaggaatggcaacgaagaagacaaccatcttcccccccagaccaaaagaagtagcagaaaccctgtctttcaggattcctgggacacagagacagtacctgtaatgagaaacagtaaagaaaacagactaagaggaaacaaagcgttctgcgcgtcttcaggcagtgacagtggtgggagcagcagcagcagcagcagcagcatcaatagcccggacagggccagcgggccggaaggcagcttgagccagaccatggccggatccagccctaacacgcctcagcccgtgcccgagcagtccgcgctgtgccaaggcctctacttccacatcaaccagaccctgaggga

SEQ ID NO: 131785 - DNA, 512 bp, Homo sapiens
  Payload ID: 5725
  Gene Symbol: FAM104A
  Gene Name: family with sequence similarity 104, member A
  ENST ID: ENST00000581110
  CDS Start-End: 89-400
ctcttcccgtgggcggggttaccagtcggtgcggttgggatggtgccactgcgcagccgcgagagggcggtaccacggcggcagcgacatgggggggcgcggagcagacgccggaagtagtggtggtacgggtccgactgaggggtactcgccaccggctgcgtccacccgagcggctgcgagagccaaggcccgagggggtgggcgtggcggccgccgaaacacaaccccctctgttccctctcttcgcggagcggcgccgcgtagcttccatccgccagctgccatgagcgagcgcctccgtcccagtcttcaggcagtgacagtggtgggagcagcagcagcagcagcagcagcatcaatagcccggacagggccagcgggccggaaggcagcttgagccagaccatggccggatccagccctaacacgcctcagcccgtgcccgagcagtccgcgctgtgccaaggcctctacttccacatcaaccagaccctgagggaggcccactt

SEQ ID NO: 131786 - DNA, 1067 bp, Homo sapiens
  Payload ID: 5726
  Gene Symbol: FAM104B
  Gene Name: family with sequence similarity 104, member B
  Uniprot ID: Q5XKR9
  ENST ID: ENST00000332132
  CDS Start-End: 40-390
aacttcctgcgcggttgctatggttccgagggcaggactatgggaggctgccctgtacggaaaagaagaagaaatggcagtaaagagggcaaccatcattccacccagcccaaaaggaataagagaaaccctatctttcaggattctcaagatacagaggtattttcatggagtgataatgaaaggagcagcagccgcattaatatcccagagagagcaagtggaccagaaggcaacttaaaccagattgttactgaacccgatgcaaactttccccagttcttgcatgagggattgtctaaacctgtttatgtcataaactggtttatgtcctttggtcctgaaataaaactcaatacttcacagcagggaaggaaccaagctgtttaaaactacttatctccgctatgaaggagaagtattttcaaggaatatcagaagaaagtagaaagtgagaggaggttccagctgggcttcctgggtcaagtaggggctcagaaagctgtgaaactcactcatttcctgcatgcggacttactttggtcctggatgaataatattgaagatatgtgcttaaaacattcctaacatcagaatttgcgcctgtgttttcttccccaagaaagctataaacagcgaaaattttgttgtaagcttccctgtgtcctctctccctctctcccttccccctcccctgaaactaaaaggaatgttaaaagcccacttttctgtgaccagcagaccttatctatggtcccaattccaattccttgtaaacacaatttgtaaaatcccgtgagatcctgtctcctttgccatcccgctgcaaggttataagtagagaaaacttaagttacaattccagttttcctcaagatctgagacatgttaattgtctttgtttctccctctggtaacatcttcccaccacacatatttcctgccttagagagtttaaaaggtgataaaaaaatctaacactggctaccccgctcgggaccccttccacgctgtgaaagctttgtactgtcactctgcttaataaagcctacagcttttttactctc

SEQ ID NO: 131787 - DNA, 1179 bp, Homo sapiens
  Payload ID: 5726
  Gene Symbol: FAM104B
  Gene Name: family with sequence similarity 104, member B
  Uniprot ID: Q5XKR9
  ENST ID: ENST00000358460
  CDS Start-End: 155-502
cggcggacccagaggaaacaggagccgacctccccgggctccgatgcgcaggcccagagcccgtcaatccttggccagccccgccctccgggctgcgtttttccggcggcgcaggaacttcctgcgcggttgctatggttccgagggcaggactatgggaggctgccctgtacggaaaagaagaagaaatggcagtaaagagggcaaccatcattccacccagcccaaaaggaataagagaaaccctatctttcaggattctcaagatacagagttttcatggagtgataatgaaaggagcagcagccgcattaatatcccagagagagcaagtggaccagaaggcaacttaaaccagattgttactgaacccgatgcaaactttccccagttcttgcatgagggattgtctaaacctgtttatgtcataaactggtttatgtcctttggtcctgaaataaaactcaatacttcacagcagggaaggaaccaagctgtttaaaactacttatctccgctatgaaggagaagtattttcaaggaatatcagaagaaagtagaaagtgagaggaggttccagctgggcttcctgggtcaagtaggggctcagaaagctgtgaaactcactcatttcctgcatgcggacttactttggtcctggatgaataatattgaagatatgtgcttaaaacattcctaacatcagaatttgcgcctgtgttttcttccccaagaaagctataaacagcgaaaattttgttgtaagcttccctgtgtcctctctccctctctcccttccccctcccctgaaactaaaaggaatgttaaaagcccacttttctgtgaccagcagaccttatctatggtcccaattccaattccttgtaaacacaatttgtaaaatcccgtgagatcctgtctcctttgccatcccgctgcaaggttataagtagagaaaacttaagttacaattccagttttcctcaagatctgagacatgttaattgtctttgtttctccctctggtaacatcttcccaccacacatatttcctgccttagagagtttaaaaggtgataaaaaaatctaacactggctaccccgctcgggaccccttccacgctgtgaaagctttgtactgtcactctgcttaataaagcctacagcttttttactctc

SEQ ID NO: 131788 - DNA, 1229 bp, Homo sapiens
  Payload ID: 5726
  Gene Symbol: FAM104B
  Gene Name: family with sequence similarity 104, member B
  Uniprot ID: Q5XKR9
  ENST ID: ENST00000425133
  CDS Start-End: 40-390
aacttcctgcgcggttgctatggttccgagggcaggactatgggaggctgccctgtacggaaaagaagaagaaatggcagtaaagagggcaaccatcattccacccagcccaaaaggaataagagaaaccctatctttcaggattctcaagatacagaggtattttcatggagtgataatgaaaggagcagcagccgcattaatatcccagagagagcaagtggaccagaaggcaacttaaaccagattgttactgaacccgatgcaaactttccccagttcttgcatgaggggtatgtaccatgccaaggtctttactcccatatcaaccagaccttgaaggaggctcacttcaacagcctgcagcagcgagggcaagctccaacatgatgaattaggacttccttattccaacctaaactgtgtttataaaagcaattgcatacacaccaaaaaaagtctattggtttttaagtctacattttaagtaacaagttaatgggcagttgtttaattggggttttacttcactgttgtacttttaaaggggctgtgaataaatgtttatgaaatttttatttttatttttattttactctttctacatagagttttcaagttgagtgtcaatttcatgttaaggtagcaatatgaggaaacttctcctgtgcattgaagccatatgtccaattcagattgatttccagatctgtcagttagaaactctatgttaaacatctttttaaaatacaagtaagtcttcatttttaaaaatacagtagcctagtaaagaggtatgtagctttcatttaaaaaacaaacaaaaaatccacactcaaaaaaccataagttagtattcccaaatatgcaaagccagattcagtcttgcactgaaatgaactgccatactcccctcagaaggtagatgttctgttgaaattgctctctagttgtaatggcaacaatcagacccagtttagactatgaacatgaaaatctctctctaataactgtctctacactttgtatttccagggagaatgtttctaaggctcttgtatacttagataccttctgtatcatttatcctctagagtgtgcacttcagacttagtaggaaacactgcacaattctgtcagataagaaatatgtaatattttgtcttaaacaaaaatttattacgttagcacattatgtgatctcataattccatctattatgtatagag

SEQ ID NO: 131789 - DNA, 1109 bp, Homo sapiens
  Payload ID: 5726
  Gene Symbol: FAM104B
  Gene Name: family with sequence similarity 104, member B
  Uniprot ID: Q5XKR9
  ENST ID: ENST00000472571
  CDS Start-End: 27-167
gttgctatggttccgagggcaggactatgggaggctgccctgtacggaaaagaagaagaaatggcagtaaagagggcaaccatcattccacccagcccaaaaggaataagagaaaccctatctttcaggattctcaagatacagaggtagcaattttcatggagtgataatgaaaggagcagcagccgcattaatatcccagagagagcaagtggaccagaaggcaacttaaaccagattgttactgaacccgatgcaaactttccccagttcttgcatgaggggtatgtaccatgccaaggtctttactcccatatcaaccagaccttgaaggaggctcacttcaacagcctgcagcagcgagggcaagctccaacatgatgaattaggacttccttattccaacctaaactgtgtttataaaagcaattgcatacacaccaaaaaaagtctattggtttttaagtctacattttaagtaacaagttaatgggcagttgtttaattggggttttacttcactgttgtacttttaaaggggctgtgaataaatgtttatgaaatttttatttttatttttattttactctttctacatagagttttcaagttgagtgtcaatttcatgttaaggtagcaatatgaggaaacttctcctgtgcattgaagccatatgtccaattcagattgatttccagatctgtcagttagaaactctatgttaaacatctttttaaaatacaagtaagtcttcatttttaaaaatacagtagcctagtaaagaggtatgtagctttcatttaaaaaacaaacaaaaaatccacactcaaaaaaccataagttagtattcccaaatatgcaaagccagattcagtcttgcactgaaatgaactgccatactcccctcagaaggtagatgttctgttgaaattgctctctagttgtaatggcaacaatcagacccagtttagactatgaacatgaaaatctctctctaataactgtctctacactttgtatttccagggagaatgtttctaaggctcttgtatacttagataccttctgtatcatttatcctctagagtgtgcacttcagacttagtagg

SEQ ID NO: 131790 - DNA, 1170 bp, Homo sapiens
  Payload ID: 5726
  Gene Symbol: FAM104B
  Gene Name: family with sequence similarity 104, member B
  Uniprot ID: Q5XKR9
  ENST ID: ENST00000477847
  CDS Start-End: 135-473
tttccggccggtaccagtccgagctctggtccccacggtcatcacgctttgctttctcagccaagatctcggggctcagggcggaaacgcagcggatatgtattttcttccggggttggtggcgctcggctctcatgacctgcaggaaaagaagaagaaatggcagtaaagagggcaaccatcattccacccagcccaaaaggaataagagaaaccctatctttcaggattctcaagatacagagttttcatggagtgataatgaaaggagcagcagccgcattaatatcccagagagagcaagtggaccagaaggcaacttaaaccagattgttactgaacccgatgcaaactttccccagttcttgcatgaggggtatgtaccatgccaaggtctttactcccatatcaaccagaccttgaaggaggctcacttcaacagcctgcagcagcgagggcaagctccaacatgatgaattaggacttccttattccaacctaaactgtgtttataaaagcaattgcatacacaccaaaaaaagtctattggtttttaagtctacattttaagtaacaagttaatgggcagttgtttaattggggttttacttcactgttgtacttttaaaggggctgtgaataaatgtttatgaaatttttatttttatttttattttactctttctacatagagttttcaagttgagtgtcaatttcatgttaaggtagcaatatgaggaaacttctcctgtgcattgaagccatatgtccaattcagattgatttccagatctgtcagttagaaactctatgttaaacatctttttaaaatacaagtaagtcttcatttttaaaaatacagtagcctagtaaagaggtatgtagctttcatttaaaaaacaaacaaaaaatccacactcaaaaaaccataagttagtattcccaaatatgcaaagccagattcagtcttgcactgaaatgaactgccatactcccctcagaaggtagatgttctgttgaaattgctctctagttgtaatggcaacaatcagacccagtttagactatgaacatgaaaatctctctctaataactgtctctacactttgtatttccagggagaatgtttctaaggctcttgtatacttagataccttctgtatcatttat

SEQ ID NO: 131791 - DNA, 712 bp, Homo sapiens
  Payload ID: 5726
  Gene Symbol: FAM104B
  Gene Name: family with sequence similarity 104, member B
  Uniprot ID: Q5XKR9
  ENST ID: ENST00000489298
  CDS Start-End: 222-566
tccgagctctggtccccacggtcatcacgctttgctttctcagccaagatctcggggctcagggcggaaacgcagcggatatgtattttcttccggggttggtggcgctcggctctcatgacctgcaggtgacagtgttggccggtggcgcggccctgcttgcctcgtgccccgcccttcgtgcttgaaaaaaaatcccgcgaagccttctccgaaagaacatgctggttctttggttgaaaagaagaagaaatggcagtaaagagggcaaccatcattccacccagcccaaaaggaataagagaaaccctatctttcaggattctcaagatacagagttttcatggagtgataatgaaaggagcagcagccgcattaatatcccagagagagcaagtggaccagaaggcaacttaaaccagattgttactgaacccgatgcaaactttccccagttcttgcatgaggggtatgtaccatgccaaggtctttactcccatatcaaccagaccttgaaggaggctcacttcaacagcctgcagcagcgagggcaagctccaacatgatgaattaggacttccttattccaacctaaactgtgtttataaaagcaattgcatacacaccaaaaaaagtctattggtttttaagtctacattttaagtaacaagttaatgggcagttgtttaattggggttttacttcactgttg

SEQ ID NO: 131792 - DNA, 3597 bp, Homo sapiens
  Payload ID: 5727
  Gene Symbol: FAM105A
  Gene Name: family with sequence similarity 105, member A
  Uniprot ID: Q9NUU6
  ENST ID: ENST00000274217
  CDS Start-End: 121-1191
cccgccctccccagcccgcctcagggaagcgagcccgggcgccggcgggcggccgtcgcgtctgacagaccactgcagaccacgggccgaggcccagcgcccgtccgcagcgcggccggcatggcggcgacaaggagccccacgcgggcaagggagcgggagcggtctggcgctcccgccgcaggaagtgaccaagttcactcctggatgctagctacaagccaagccttagacactgtctggagaatggcaaaaggctttgtgatgttggcagtttcatttctggtggctgccatctgctacttccggaggctacatttatattcagggcacaagctgaaatggtggattggatatctgcagagaaaattcaaaaggaacctcagtgtggaggcagaggttgatttactcagttattgtgcaagagaatggaaaggagagacaccccgtaacaagctgatgaggaaggcttatgaggagctattttggcggcatcacattaaatgtgttcgacaagtaaggagagataactatgatgctctcagatcagtgttatttcagatattcagccagggcatctcttttccatcatggatgaaagaaaaggacattgttaagcttcctgaaaaactgctgttttcacaaggttgtaattggattcagcagtacagttttggtcctgagaagtatacaggctcgaatgtgtttggaaaactacggaaatatgtggaattattgaaaacacagtggactgaatttaatggcattagagattatcacaagagaggaagtatgtgcaacacccttttttcagatgccattctggaatataaactttatgaagctttaaagttcatcatgctgtatcaagtcactgaagtttatgaacaaatgaagactaaaaaggtcattcccagtctttttagactcctgttttccagggagacatcctctgatcctttgagcttcatgatgaatcacctgaattctgtaggcgacacatgtggactagagcagattgatatgtttatacttggatactcccttgaagtaaagataaaagtgttcagactgttcaagtttaactccagagactttgaagtctgctacccagaggagcctctcagggactggccggagatctccctgctgaccgagaacgaccgccactaccacattccagtcttttaagtccgctgggggccgaacagcagtgctcaccagtgacggtggtcacagttgcaataaagtctctctctgaaaccaaagctagcatttcagcatggaaggaattaggaccttttcttcaggattacaggtacactggatgcagccatgcatggatggtttttctttatttttcagtgatttcctctgaagcagctgcactgatacatttgggagttggtggcttgactttgtccataaggggcgtggccacttcacatgatggcgggcctttaagagcacaaagaagtttaatatggacaacaacaggaaaaagcaagaagaaaacaagtagggaaaaacagctaacctggagagaaagaatttctttaacctttatgttcttcattaaaaatcttatcttggactgatttgagggatttttagaaacatggccttattttatataagcattaccttcccaggaatctttgttgtatattaatttttgataaccatttgattaactttaaaattaagtatatgtgtgtatatatacatatgtatgtttatatacacacatgtatctgtatagttttatatatacatatatacacatagacatacagagaaccactactttgtaatagtgtacagtttgttttatatctctttactttttttgttactattttatctggccagcttaatagttttatttagattttttaaaattctgtagattaaagcaaatgacagttattgaactatcacaaaactattaaactgtggtacatttaatgtgtatttaatgtgtggaatctcattatggtaggcagaataatgccctatgctccccaaagatgtctgtgtctgaatcctcagagccgtaaagggctaaatgggttaaatgggaaaggagaattaaggttgcaggtggaactgagatgctaatccaatgatgctgaaatagggagatttttctagattctccaggtggacgcagtgtaatcagaatggttcttaaaagtggaagagggaattggaagagtgtcagagtcagaggggaatgtgaaatatggaagaacggttagagagagatgcaccattgctggctttgaagatggaggaaggggccataagccagggagttgcaggcagcctgtagaattgagactggaaaggaaacagaaacttccccatagcctccagaaggaacgcagccctgccaacaccttgattttagcccagtgaagcctgtgttggacctctaatctgcagaactgtaagataatagatttgtgtttaagccactaagtttgtggtaatgtgttgtagcaacagaaaactagtattctcaggctagtttttggtcgtctttattttggaaatacttttctagtttaatttgatagttttttttttggaggtactttgctagtctgttttgagtttcagtacataagaataatttttaaaatcttgctaattatatattacttcaaagtcacaaatccctttctaagaatgacttacttcacgagatatttagcactatcattttcccagatgttcatattatttctgcaataaattaaaagggagtgtgtcaaatgctgtcatgtctgaaattagcattcatattcttttgcaatggggatgatcagtcgtgtgtactacatgaaccatgtctgatggtagcttgttcccactgtcattttgttttctggttgaagattaatgagctcagccacagaaacaagagttcttcattgacctctacagtccctgcctgtttggaaacatctatggttttgtataacccctgtcatttaactgacagtgttagaagatatccccctgatgtgttactgtaaccaagaaagcatgaacgttaccctttctggtgacagcctgccatgggctgctgtggctgatacttatagaattgttgctccaaaattttggctccacttgagctgtccagaagtgtacctgacatttgtgtattaccactcaccttggatctccttactagtgtaattatttccacatcaatccaggactgaaaggaaaaattttttcaccaggattggcagcctgtagctctgtgacctcagtcaacccatcatgttgtgttgtgggcggggggcaagaattctttagagaaccaagttgcgagaaagatttcaatccagtgaaagtaaaaagtaagaagacatttagatagttgctatattttgggaagatgtcaaaacaggtttttagggaggaggtatgaggtgttgtgttgttttgtttgtttttattcagttgtataatgaatataacaaattaagtagccagaaggagctgcatgtaaattagcaccacttttaaatgtcaacaataaatttgaggtgagcttcctgggtgatgccaacatttaaa

SEQ ID NO: 131793 - DNA, 2281 bp, Homo sapiens
  Payload ID: 5728
  Gene Symbol: FAM106A
  Gene Name: family with sequence similarity 106, member A
  Uniprot ID: Q4KMX7
  ENST ID: ENST00000392176
  CDS Start-End: 44-553
acaactggcctgaccttcaaaggccttcacagctcctgccttcatgttaccgtctactatgttcctcgtgcaccttccactcagcacaaacaggctgcactgcctccgaaacacatcacttgaatcctacctctgctcctttgtccatctgaatcaccctctccacatttctgaccgtgtaatcctgatctcacttcatgaggcagttcgcttctcttttgcatttagctttccccggggtacactgtcaatagcctactgtctgatgtcatcagtcagcacttcatcagaggcaattatgtccacagagcttttggctaattactgtcactcctctttacatgtgtgcatatgcatatcatctttccctaatgagactggaaatcatgattcattccctggagcagtggtttccataagtgaccaacccacagaccagtgcaaactggctgcaaaagagcttcctctgaggaacttattagaatgcagattctttgactgcatgggagaggaggatctcataaatctgggtgtaataggcacagaacgttaggtgtaatatgggcgggactctggactcagcatatccaacaagctgctggctgattccgacgatgccgatgaattgccaggttgggaactgctgcccccagagaacctagcagagagctctgtacgtggtaggtgctcactcccctattgtttgggtgtatgcctcctgataatgaacttgatcgtaactttattgttgtattatgcctgtattgtttccttaagtgaaggaagaatgcttttgagtacctaataggtggcaagctctgtgcctacttacatacatgaactattccttttaataacctttggaaataaagtggcatttccattgggcattagaaatctgaagactttcgtttacagctgttgcaacagcagaactagaattcgacctccgacatttctgctcaccagagggcatgaactgctggtttgtacctggcttgcagataccttctttgggcagcacaatgttcaaaattaaaaaaactaccaacacttctaaactggatactttgtatcaatatctgggtttctggcttctcttcacgggaaaaaaacaaacaaacaaaaaggtttggtgaacactggggcccacattcctgcagggcaacagtcacatggagactttagatgggcacgtgcccagaacacactagagtccccatcgctccccattctcttacattctgttcccaactaggttcttataggcctgggtttgtgcctgttgcacacttatctactctcttgcttcccactggtcaggaagtctggcaaacttaaaaggcctctttttgttgctctcttctgtatggatctctcatcatagaggtgtgtgcatttctgactttgtgatttcaatactaaggaagctgtcggcagattatcaaggaaaacggggatcgctgctccccaacgtacacattctggtgtgccccagtaaaattctatattcagcctccaaactagctgggaaaaatgtggcaaatcatctacttgctccaattcaatggtgtttagaagtaggaagtcactgtgagcaatgccaccaagtggtggagagactccatgcagaatcgccaccttcagccagagaggctgggaggccgaagacctctctcaatgcacagggccattcagaaactagaaacaaaatgcttgctcatctccctaggccactccttccgaggctttttgagacgaggtctcactgtcacccaggccggagtgcagtggcacaatcaaggctcactgcaacctcaaccttctgggttcaagcgatcctcccacttcagcctttcaagtagctgggatgactacaggcatgggccaccacagccagctgattttttttttctttttagtagaaatgaggtctcgccatattgctcagactggtcttgaaccaacacatctttagctttttaaaagacagccttggccagccatggcagctcacacttgtaatcactgcactttcggaagctgaggtgggcagatagcttgagccgaggagttcaagaccagcctgggcaacatggtgaaaccccatctctacaaaaaatacaaaaattagctgggtgtgatggtgcacatctgtggtcccagctactggggaggctgaggtgggaggattgcttgagcctgggaggtcgaggctgcagtgagctgtgattacctcactgcattccagcctgggcaacagagaaccctgtctctattt

SEQ ID NO: 131794 - DNA, 3367 bp, Homo sapiens
  Payload ID: 5729
  Gene Symbol: FAM107A
  Gene Name: family with sequence similarity 107, member A
  Uniprot ID: O95990
  ENST ID: ENST00000360997
  CDS Start-End: 462-896
ctgcctcaggaagcttggcttcccctcccatggggaagtgctggaatccactcttgcctgaccctcccataagaaacaagggaaattcctttacgtgagccgccttgctcagaacaaagcttggcgtgtttcttattcctcatcaatctgacaaaatgggtatttatttgtgcctctcaagcgtgtggcttggacatgatgttccgcatcgtggaagtggccgtgcaccaagtggaatatctgttactatagtaacagttcctttttattgataccagaataaacaggaatgcaaaggctgtctcacttgttggcacatttcagcagcctccgttcccaggggtttaagaaccgccctctagaggcagccctccttgctagtctgggacttcccggtggagtgaggaacccagcaacacgctcctgacttcccttcccaaggactcgacctgagaaccgccatgtactcggagatccagagggagcgggcagacattgggggcctgatggcccggccagaatacagagagtggaatccggagctcatcaagcccaagaagctgctgaaccccgtgaaggcctctcggagtcaccaggagctccaccgggagctgctcatgaaccacagaaggggccttggtgtggacagcaagccagagctgcagcgtgtcctagagcaccgccggcggaaccagctcatcaagaagaagaaggaggagctggaagccaagcggctgcagtgcccctttgagcaggagctgctgagacggcagcagaggctgaaccagctggaaaaaccaccagagaaggaagaggatcacgcccccgagtttattaaagtcagggaaaacctgcggagaattgccacactgaccagcgaagagagagagctgtagggccagctgccgggctcaggccactgcccaccctggcctggacagcctccttcagcccttctgtacctggcagccctgggccccaggccctgggacgtctgtgatgttcccacctgcttctgtagaaatgtgtcaccccagagggcctggctctccctgggaggctggggcccctaagctcctaggttttccttccaagcacccagccctcctgctccaagagggataacctgcacccctccctgcaaggggttcagagcccagcacaggagctttctctggcagaattgaggaggaagaggtggccctctgacttgacaagccttctgttctgcccaggccttcccaccaggaatctccgaggctccccagggccccgcttctccgtacaccccagctcctaggtctcagagaactcccccacctgtggttttacctgcagccagcagagcttagcttcaaggacacctgccttcaaagccactgaggggaggaagggcagggcagactgcagatggccttgttgctggcatcccggccaggtgggcggggactaacaaagacagctgtttagggtcttctcccctcacccatgctttcatcatcccctccgcacagcctccccgtccaggccttctaaccacacctacccagggctgccgcattcctgcactcagaagtctgcagcggtgcctcacaaacttgattgtgcataaaaatcactggggatcttgttaatacagcttctaactcaatagatctgggagatcctgcatttctaacaagctcccaggtaaggcggaggctgctggtgtgaggaccatgctgtgagcagcagggcgagagtgcccagggctgatatatattggaaatatcacccctgaagccatcgctggcccccacctcctgtggactgatgccccagggattcccaccccacttctgcaaccccaggtatccttcattatccaccccatcccagactcccaccccagggattgcccgtgaagactttggcctagcaaattgtgttggttatgtgagtgttgttttaatcagagatgtacatgattgccaatctgcatttcttaccagtgtgaccacactgttacgatgcaattctagccaaaaaaaaaaaaaaaaaaaaaaaaattttttttttttactttttcctagtcttatggaaagcaaatatacaatgattttcagtaggcttctggaatagaaacagtggtttgaagaccccactgccacctttatggactggcccctttgagtctgaatccccggcctctgtcacctgagacccaacccctagctgggccaactccagtgaattcacccatttttcttcttcagaaggcctttcctgtgtgagacccacatattttaaccttttgctcctatcccatttttaaagaattagagaataaaccaggcctgtttcttttcccctgaaatccctgcctctggcttcctaaacccatcatctaaggtgacagagcagtgctggaatagcatctcctttcactttcccaaaactgccacagatagctgccactggcatgctctttgattcctggaagcaaacgtgggactgtcggaggaaagggattgttctggtcttactcataactgggtggtttgagggtgactgaagtcgtgcttttcctgtgtgtgctgccagcacagggctgtaaatgcagatattgcgcctgtgtgcgtgtgtataagtcaagctccaagaggctcctgaatgtgactggcgtgctgagaatgtgtttacgctgtttaatgtctgccaggtgagggttacactgaagatgcacaatccctaaaataaagatcaccacttccccaaagaagcagccctcgggtccatgtgttgttcagacatgtgaagagaagcaagacagagggtctcagatggacgagggctctccaagggaatgcctggggattcacccagtggtccccagaggtgctccatggaggcaacaagtcattccatgaagccccagaggtagaagggacctcaagcaccacgccctccagggcagccgtgcagacgaccttggttcacttttcaggggtcgtcccaactctgtatctccagccactccaactgtggaggctgtaaatccagattttcactgttccagtctcctttgcagcttaggatggctatgtgatcaggtgtggccaatgaaattgaagaggaagtctacctgggcttctgggaaagcttttccaataaaagacacaggcatggctaacacctccctgggcctcttcttcctaccttgattgagggtgtgatgcctggagccacagcagccactttgctaccatgacaaaaaggccaagagaatcacagagtcattgaccctatcattatttcaccaagccaataccagccgccatccttctccagaattcttgtaaataaaataaatccctctttgtttaaa

SEQ ID NO: 131795 - DNA, 3465 bp, Homo sapiens
  Payload ID: 5729
  Gene Symbol: FAM107A
  Gene Name: family with sequence similarity 107, member A
  Uniprot ID: O95990
  ENST ID: ENST00000394481
  CDS Start-End: 560-994
ctgcctcaggaagcttggcttcccctcccatggggaagtgctggaatccactcttgcctgaccctcccataagaaacaagggaaattcctttacgtgagccgccttgctcagaacaaagcttggcgtgtttcttattcctcatcaatctgacaaaatgggtatttatttgtgcctctcaagcgtgtggcttggacatgatgttccgcatcgtggaagtggccgtgcaccaagtggaatatctgttactatagtaacagttcctttttattgataccagaataaacaggaatgcaaaggctgtctcacttgttggcacatttcagcagcctccgttcccaggggtttaagaaccgccctctagaggcagccctccttgctagtctgggacttcccggtggagtgaggaacccagcaacacgctcctgacttcccttcccaaggactcgacctgagaaggacacagcagtctctgaatttcatgctctcctctttgatgtgaagaaaatgaaaagctgaacagttgtggaactgtggatagagttagacaataaggccgccatgtactcggagatccagagggagcgggcagacattgggggcctgatggcccggccagaatacagagagtggaatccggagctcatcaagcccaagaagctgctgaaccccgtgaaggcctctcggagtcaccaggagctccaccgggagctgctcatgaaccacagaaggggccttggtgtggacagcaagccagagctgcagcgtgtcctagagcaccgccggcggaaccagctcatcaagaagaagaaggaggagctggaagccaagcggctgcagtgcccctttgagcaggagctgctgagacggcagcagaggctgaaccagctggaaaaaccaccagagaaggaagaggatcacgcccccgagtttattaaagtcagggaaaacctgcggagaattgccacactgaccagcgaagagagagagctgtagggccagctgccgggctcaggccactgcccaccctggcctggacagcctccttcagcccttctgtacctggcagccctgggccccaggccctgggacgtctgtgatgttcccacctgcttctgtagaaatgtgtcaccccagagggcctggctctccctgggaggctggggcccctaagctcctaggttttccttccaagcacccagccctcctgctccaagagggataacctgcacccctccctgcaaggggttcagagcccagcacaggagctttctctggcagaattgaggaggaagaggtggccctctgacttgacaagccttctgttctgcccaggccttcccaccaggaatctccgaggctccccagggccccgcttctccgtacaccccagctcctaggtctcagagaactcccccacctgtggttttacctgcagccagcagagcttagcttcaaggacacctgccttcaaagccactgaggggaggaagggcagggcagactgcagatggccttgttgctggcatcccggccaggtgggcggggactaacaaagacagctgtttagggtcttctcccctcacccatgctttcatcatcccctccgcacagcctccccgtccaggccttctaaccacacctacccagggctgccgcattcctgcactcagaagtctgcagcggtgcctcacaaacttgattgtgcataaaaatcactggggatcttgttaatacagcttctaactcaatagatctgggagatcctgcatttctaacaagctcccaggtaaggcggaggctgctggtgtgaggaccatgctgtgagcagcagggcgagagtgcccagggctgatatatattggaaatatcacccctgaagccatcgctggcccccacctcctgtggactgatgccccagggattcccaccccacttctgcaaccccaggtatccttcattatccaccccatcccagactcccaccccagggattgcccgtgaagactttggcctagcaaattgtgttggttatgtgagtgttgttttaatcagagatgtacatgattgccaatctgcatttcttaccagtgtgaccacactgttacgatgcaattctagccaaaaaaaaaaaaaaaaaaaaaaaaattttttttttttactttttcctagtcttatggaaagcaaatatacaatgattttcagtaggcttctggaatagaaacagtggtttgaagaccccactgccacctttatggactggcccctttgagtctgaatccccggcctctgtcacctgagacccaacccctagctgggccaactccagtgaattcacccatttttcttcttcagaaggcctttcctgtgtgagacccacatattttaaccttttgctcctatcccatttttaaagaattagagaataaaccaggcctgtttcttttcccctgaaatccctgcctctggcttcctaaacccatcatctaaggtgacagagcagtgctggaatagcatctcctttcactttcccaaaactgccacagatagctgccactggcatgctctttgattcctggaagcaaacgtgggactgtcggaggaaagggattgttctggtcttactcataactgggtggtttgagggtgactgaagtcgtgcttttcctgtgtgtgctgccagcacagggctgtaaatgcagatattgcgcctgtgtgcgtgtgtataagtcaagctccaagaggctcctgaatgtgactggcgtgctgagaatgtgtttacgctgtttaatgtctgccaggtgagggttacactgaagatgcacaatccctaaaataaagatcaccacttccccaaagaagcagccctcgggtccatgtgttgttcagacatgtgaagagaagcaagacagagggtctcagatggacgagggctctccaagggaatgcctggggattcacccagtggtccccagaggtgctccatggaggcaacaagtcattccatgaagccccagaggtagaagggacctcaagcaccacgccctccagggcagccgtgcagacgaccttggttcacttttcaggggtcgtcccaactctgtatctccagccactccaactgtggaggctgtaaatccagattttcactgttccagtctcctttgcagcttaggatggctatgtgatcaggtgtggccaatgaaattgaagaggaagtctacctgggcttctgggaaagcttttccaataaaagacacaggcatggctaacacctccctgggcctcttcttcctaccttgattgagggtgtgatgcctggagccacagcagccactttgctaccatgacaaaaaggccaagagaatcacagagtcattgaccctatcattatttcaccaagccaataccagccgccatccttctccagaattcttgtaaataaaataaatccctctttgtttaaa

SEQ ID NO: 131796 - DNA, 1432 bp, Homo sapiens
  Payload ID: 5729
  Gene Symbol: FAM107A
  Gene Name: family with sequence similarity 107, member A
  Uniprot ID: O95990
  ENST ID: ENST00000447756
  CDS Start-End: 178-696
ttcccccggcggcgtctcctcgcccgcccctccggccgccgccgtaacttgaccctcagcggggtttgggacttggggccgcgtcaccgtcgcggaggcgcttcggctccggactacgctcctgctgtgcgctcgcggggccagcagtgctggctctgcagtaggaggcgcgggggcatggcgcagaggctgggcgagtgggcccgggggccctccgatgccaccgggctctaccgggctgtgctgctccggtcggccgccatgtactcggagatccagagggagcgggcagacattgggggcctgatggcccggccagaatacagagagtggaatccggagctcatcaagcccaagaagctgctgaaccccgtgaaggcctctcggagtcaccaggagctccaccgggagctgctcatgaaccacagaaggggccttggtgtggacagcaagccagagctgcagcgtgtcctagagcaccgccggcggaaccagctcatcaagaagaagaaggaggagctggaagccaagcggctgcagtgcccctttgagcaggagctgctgagacggcagcagaggctgaaccagctggaaaaaccaccagagaaggaagaggatcacgcccccgagtttattaaagtcagggaaaacctgcggagaattgccacactgaccagcgaagagagagagctgtagggccagctgccgggctcaggccactgcccaccctggcctggacagcctccttcagcccttctgtacctggcagccctgggccccaggccctgggacgtctgtgatgttcccacctgcttctgtagaaatgtgtcaccccagagggcctggctctccctgggaggctggggcccctaagctcctaggttttccttccaagcacccagccctcctgctccaagagggataacctgcacccctccctgcaaggggttcagagcccagcacaggagctttctctggcagaattgaggaggaagaggtggccctctgacttgacaagccttctgttctgcccaggccttcccaccaggaatctccgaggctccccagggccccgcttctccgtacaccccagctcctaggtctcagagaactcccccacctgtggttttacctgcagccagcagagcttagcttcaaggacacctgccttcaaagccactgaggggaggaagggcagggcagactgcagatggccttgttgctggcatcccggccaggtgggcggggactaacaaagacagctgtttagggtcttctcccctcacccatgctttcatcatcccctccgcacagcctccccgtccaggccttctaaccacacctacccagggctgccgcattcctgcactcagaagtctgcagcggtgcctcacaaacttgattgtgcataaaaatcactggggatcttgtt

SEQ ID NO: 131797 - DNA, 580 bp, Homo sapiens
  Payload ID: 5729
  Gene Symbol: FAM107A
  Gene Name: family with sequence similarity 107, member A
  ENST ID: ENST00000465970
  CDS Start-End: 265-580
agttgaatgaaggagtctgctctcagagtatctgctgtgggagagccccggaccccaagcatcttcaaaggtctattattaatggggctgtccagctgaagctgacatccgcacgcagccctcccagagctctgcacctcagccagcccacggcctccaccgtctggccctgtcggctgagtggtgcccagcaagaaaacatactctcctcaggccagatttcatagtgaaaatgagaagcagagacgaaatggctcagccgccatgtactcggagatccagagggagcgggcagacattgggggcctgatggcccggccagaatacagagagtggaatccggagctcatcaagcccaagaagctgctgaaccccgtgaaggcctctcggagtcaccaggagctccaccgggagctgctcatgaaccacagaaggggccttggtgtggacagcaagccagagctgcagcgtgtcctagagcaccgccggcggaaccagctcatcaagaagaagaaggaggagctggaagccaagcggctgcagtgcccctttgagcaggagctgctgagacggcagcaga

SEQ ID NO: 131798 - DNA, 2271 bp, Homo sapiens
  Payload ID: 5729
  Gene Symbol: FAM107A
  Gene Name: family with sequence similarity 107, member A
  Uniprot ID: O95990
  ENST ID: ENST00000474531
  CDS Start-End: 617-1144
agttgaatgaaggagtctgctctcagagtatctgctgtgggagagccccggaccccaagcatcttcaaaggtctattattaatggggctgtccagctgaagctgacatccgcacgcagccctcccagagctctgcacctcagccagcccacggcctccaccgtctggccctgtcggctgagtggtgcccagcaaggtgagaaggccaagtcctgcccgctgggccaggcagaggtcacccgccgcgcctgagctaccggtgtgtgatgagaggactgccccacgtcttccctcatttcccagctgcctcagtttcccttcctgagagaggcagggttctgggaggtgaggagctgcagggacccaagaagggcatagaagccgcctggggacactggcccctctgtcaggatcaatcgccctaagcctgtctgaggcgctccgggcttaggagcagctgtgaaagccgcctttgtgcctgggagaatgagccgcaagaggacagggggccctcgccccgggagccccttgggtcctggctcctgagatcaacgccagcagggaggaccccagcctggcccctgcagcccacccaggcctggtgcccacttcgtgccatgggagcagcccaggggaagaagaaaacatactctcctcaggccagatttcatagtgaaaatgagaagcagagacgaaatggctcagccgccatgtactcggagatccagagggagcgggcagacattgggggcctgatggcccggccagaatacagagagtggaatccggagctcatcaagcccaagaagctgctgaaccccgtgaaggcctctcggagtcaccaggagctccaccgggagctgctcatgaaccacagaaggggccttggtgtggacagcaagccagagctgcagcgtgtcctagagcaccgccggcggaaccagctcatcaagaagaagaaggaggagctggaagccaagcggctgcagtgcccctttgagcaggagctgctgagacggcagcagaggctgaaccagctggaaaaaccaccagagaaggaagaggatcacgcccccgagtttattaaagtcagggaaaacctgcggagaattgccacactgaccagcgaagagagagagctgtagggccagctgccgggctcaggccactgcccaccctggcctggacagcctccttcagcccttctgtacctggcagccctgggccccaggccctgggacgtctgtgatgttcccacctgcttctgtagaaatgtgtcaccccagagggcctggctctccctgggaggctggggcccctaagctcctaggttttccttccaagcacccagccctcctgctccaagagggataacctgcacccctccctgcaaggggttcagagcccagcacaggagctttctctggcagaattgaggaggaagaggtggccctctgacttgacaagccttctgttctgcccaggccttcccaccaggaatctccgaggctccccagggccccgcttctccgtacaccccagctcctaggtctcagagaactcccccacctgtggttttacctgcagccagcagagcttagcttcaaggacacctgccttcaaagccactgaggggaggaagggcagggcagactgcagatggccttgttgctggcatcccggccaggtgggcggggactaacaaagacagctgtttagggtcttctcccctcacccatgctttcatcatcccctccgcacagcctccccgtccaggccttctaaccacacctacccagggctgccgcattcctgcactcagaagtctgcagcggtgcctcacaaacttgattgtgcataaaaatcactggggatcttgttaatacagcttctaactcaatagatctgggagatcctgcatttctaacaagctcccaggtaaggcggaggctgctggtgtgaggaccatgctgtgagcagcagggcgagagtgcccagggctgatatatattggaaatatcacccctgaagccatcgctggcccccacctcctgtggactgatgccccagggattcccaccccacttctgcaaccccaggtatccttcattatccaccccatcccagactcccaccccagggattgcccgtgaagactttggcctagcaaattgtgttggttatgtgagtgttgttttaatcagagatgtacatgattgccaatctgcatttcttaccagtgtgaccacactgttacgatgcaattctagcc

SEQ ID NO: 131799 - DNA, 2159 bp, Homo sapiens
  Payload ID: 5729
  Gene Symbol: FAM107A
  Gene Name: family with sequence similarity 107, member A
  Uniprot ID: O95990
  ENST ID: ENST00000464064
  CDS Start-End: 86-493
gctagtctgggacttcccggtggagtgaggaacccagcaacacgctcctgacttcccttcccaaggactcgacctgagaaccgccatgtactcggagatccagagggagcgggcagacattgggggcctgatggcccggccagaatacagagagtggaatccggagctcatcaagcccaagaagctgctgaaccccgtgaaggcctctcggagtcaccaggagctccaccgggagctgctcatgaaccacagaaggggccttggtgtggacagcaagccagagctgcagcgtgtcctagagcaccgccggcggaaccagctcatcaagaagaagaaggaggagctggaagccaagcggctgcagtgcccctttgagcaggagctgctgagacggcagcagaggctgaaccaggtgggtgatgggcacccagcagggaccacgcatcctccagggctgtcctccagggaggagctctgctgtggccacagctagtaagagggaagaggatcagcagacagagcactggactaagagtccactcctggcctgagtcctccctctgccattcactttgctaggtccttagggcgagtggcttccctgaacctcagcttcctcactggcccagtgtactgcatgctgattctgatttcattcttataactgtcttgtgagccaggtggcattcccattttagagatggggaagctgaggcccagagggggtgagtgatttgaaccaggctgcacaaggagaactcagtctcatgctctgtgccccagctaccaggctgatagcaaaactcatccccaggttggttctgtttccccactgagtgggcccttggtccaaactccacaggttttcagagtaggaatccccctagctccacccacttcactctctgcttctccctccttcagctggaaaaaccaccagagaaggaagaggatcacgcccccgagtttattaaagtcagggaaaacctgcggagaattgccacactgaccagcgaagagagagagctgtagggccagctgccgggctcaggccactgcccaccctggcctggacagcctccttcagcccttctgtacctggcagccctgggccccaggccctgggacgtctgtgatgttcccacctgcttctgtagaaatgtgtcaccccagagggcctggctctccctgggaggctggggcccctaagctcctaggttttccttccaagcacccagccctcctgctccaagagggataacctgcacccctccctgcaaggggttcagagcccagcacaggagctttctctggcagaattgaggaggaagaggtggccctctgacttgacaagccttctgttctgcccaggccttcccaccaggaatctccgaggctccccagggccccgcttctccgtacaccccagctcctaggtctcagagaactcccccacctgtggttttacctgcagccagcagagcttagcttcaaggacacctgccttcaaagccactgaggggaggaagggcagggcagactgcagatggccttgttgctggcatcccggccaggtgggcggggactaacaaagacagctgtttagggtcttctcccctcacccatgctttcatcatcccctccgcacagcctccccgtccaggccttctaaccacacctacccagggctgccgcattcctgcactcagaagtctgcagcggtgcctcacaaacttgattgtgcataaaaatcactggggatcttgttaatacagcttctaactcaatagatctgggagatcctgcatttctaacaagctcccaggtaaggcggaggctgctggtgtgaggaccatgctgtgagcagcagggcgagagtgcccagggctgatatatattggaaatatcacccctgaagccatcgctggcccccacctcctgtggactgatgccccagggattcccaccccacttctgcaaccccaggtatccttcattatccaccccatcccagactcccaccccagggattgcccgtgaagactttggcctagcaaattgtgttggttatgtgagtgttgttttaatcagagatgtacatgattgccaatctgcatttcttaccagtgtgaccacactgttacgatgcaattctagcc

SEQ ID NO: 131800 - DNA, 3785 bp, Homo sapiens
  Payload ID: 5730
  Gene Symbol: FAM107B
  Gene Name: family with sequence similarity 107, member B
  Uniprot ID: Q9H098
  ENST ID: ENST00000181796
  CDS Start-End: 235-1155
acagaaggaagagcgcgaaattgcccaggatggacactttcaaaggggccccagcggctaagtgactctcagggaaggtggccttgccatcccaacttctatttaggggcaaccactagcaagttcttctcttcgggcaattggaaagagttcctataagcaaagtggaggtgatgtggacccctggaaaatttccttgccccgtttgaactttgcaatgattcactgcaagtcatgtccacgtggaaagcaagactcaccaaaagactgaagtctccctctagaagcatgcatccatttccgtgctcagctctgctcgcctgttttgggaatacgagggagagtgcttccttcaatcagtccggcgtggctgatactcattccaccgtccgtgtgcagcctgtggccaaagcaggcagacagccaagacacccaagcgcagaaggagctccagagaaaaggcaagattcgagcacccatgcagagagaaatggcagtgcgaatcggaattcaagtcaccgcactgcggcccagcccgcggagacgcctgaagatgtgcccgggtccctggatgatggggcggactgtgaagcagtggtgtttcacgcttccatccccagaccatcaattattgacacgcccaaggaagaagaatttcgagaagaacctaaatgcctcgagctggagcagaaaatgacatcagacagcccacctgaggatattgaccataaggactcatatctcattacaagaagcatcatggccgagccagactacatagaagatgacaatcctgaactcattaggcctcagaaactgatcaatcctgtaaaaacctcccggaaccatcaagatcttcacagagaacttcttatgaatcaaaaaaggggtcttgctcctcagaacaaaccagaattgcagaaggtgatggaaaaaagaaaacgagaccaagtaataaagcagaaggaagaagaagcacagaagaagaaatctgacttggaaatagagctattaaaacggcagcagaagttggagcagcttgaacttgagaagcagaaattgcaagaagagcaagaaaatgcccccgagtttgtgaaggtgaaaggcaatctcaggagaacaggccaagaagtcgcccaagcccaggagtcctaggctgaggctgcaccaagacctcgtgtgtcaccccacagagctgtctgtgggtgccttctcaatctcagggcaaaagcccctggagaatatttcagccagcagagaattttgacttgcagtaggatttggtttgattttcctacgatctgggtggatgccttgcctgtgacagttgcagttcctattcgccaaatgaagggcagtgccccgcacgtaagttggaatgatggacctgtgttcagagacttaacagaaccaacaagcaaaacaagtgagaacaggaaaaaggaagaggacactggaatcaattcttgagagttgcactacttggtttttcttccattccaagtttcgtgggacccagagccttttttcttttaaaagctaaaaaacaagtgtttaattcctctttttgttatctgttagataattgagatcacctagaaatgcgtttaatctgttcactcactgtaaattttgaggacccagaattgtcttgtttaatttatactttcacccctgttgcagttaacaccagagaaggaacgtgaatgtcgagcacagccactacccttgttggcacttaatttagaaatagggtgagaagtttaaaagcccatcttgattttattttcattccttttggttctctgtgtaataatagcaggctacatagtgacattccagttccaagaaggtacatcctgtccattcattaattgctttgattactaggagggtttctgttcagttttgtttttaaatgtcttgctgatctagttctttcagatggaataaccttccagtcccttagagagtggaactagtccatataacccagcttcagtagcaaaagtagaagccgccacatcttttcatttctccaagaggagagtggggaaggttcccatgaccagctgggcagtcaggatttctctaggcattctaatgtgaaataagtgtagactgctgtcaaggaggcttcatcagaagatgtatagcatttgaatgtctaatgataatgcatatcattagaatccaagctttgaaaatttctgattaatgctcatgtatttctttatctttgtttttccttgtgaagaaagactttcaccactgtctgagtgatgatgctgttgataaggatgatgtcgatgactactatattgcatctctcaggaacagctgatgggaagggaggggctgctgagttcccttgttctagctagcagcacgctcctcagagagggggccgagttacagacagcagccgcattctcatgcaaaattagttttaaactgctagtgtgggcatcggtaccttttgcctgggtgataccgaagaattgttgaggatttagtatgctccgtagagacagttcagccagtcatttctgcattggagagacttctcatactttctttgaagactcatagaaagctggatctagagcttttgaatccttaattagcacagtagaaattagctttctatgggaatgctttagtgttagcagttgacaattaggcccatattcaatctgaatgggaacaaaagtaaatgcaatgataatatactgctagttagagaaacatgttagttgattatacctgaaatggattatttatctcatcagcaagtattatttgaataaaatgagaaatgcttaagaaaaattgttgctctacagtaatttggtttcgaagaatggaatggtaactattttttcccatcgttcttttgagagaaggaagtgtgatgactgatgatcttgaaaagcccatttctgattgcacgttgactggaattctttctttgtgtctgtggactagcgatgctgtttgtaaaatgaagattcgggactggctcatatctttttatctaactagatgtcagatcttgaaatctgtattctcgaagcaattctgccacttgatcgtattcacaggggccctggtaggctcctttagaaggaccatttctgttcctagagcttaactagaattcattcttcactgaaaaaaaaaaaagttacttaagaaagcatttctttcctaatctcactcaaatctgcagaattatttgtaattagtaatacaaaatctggccaaaaggagacttgtaaatagcgtaaagtggtgtcttatgctaaacggtggaatgtataggcagagaagctctttgaagttgtcagatgagctgggctcacaagcctgattcaaacaggctgtcggtctcctctcaccccttaatactgtgcagcccaaactcctaggactcttgaacatctgagcagttttgtgctttgagccactttttgacaaaaatggctccatttttccacagcgtggttttcttaaaatagtttaatgttttatagtctcatagtagtagtgttgctttctaagctataacagtcgactttattcttctactctgaaaaatcttgacttgtttgagtgtatataatatatataaagggagccttaatggattggttttcataatttaatattttttgtatttgctcttgtataattgtttttaacggaaagtattaaagaattgagggtggaattcttagaaccaaagttattcttaataaaaatcaccacatgcttggaccatg

SEQ ID NO: 131801 - DNA, 1284 bp, Homo sapiens
  Payload ID: 5730
  Gene Symbol: FAM107B
  Gene Name: family with sequence similarity 107, member B
  Uniprot ID: Q9H098
  ENST ID: ENST00000378458
  CDS Start-End: 550-945
attgtttgctctggcttctgtgccggatgaggtcattcagttgcatacagttcctgctttcagaagttgctagagtgtttctctttgaacttgaactgtggctcttttgatatccagaaagagagttctttgtggggatggttaattcttgttttgggtgcttttcttcaccgctctaaggaactaccacagtcagaaggtgcattcttactgcgatctttttatttgctaccttgggcttaaggagcctgcctatatctactgaggtgaggttaggtcagtctctgtaaccgttcgtcacttaggccttgatgggtgacatggatggggatgacttcctgggctaactcttctcttgctaaaggatgatttttcaccaccttgaatgcccatgattaaaacataaacaagaaaatagatatctgaggagaatgcagttgaaactaattttgtggatagagaaactgttggaactgctttacaaagtattttaacagcccacctgaggatattgaccataaggactcatatctcattacaagaagcatcatggccgagccagactacatagaagatgacaatcctgaactcattaggcctcagaaactgatcaatcctgtaaaaacctcccggaaccatcaagatcttcacagagaacttcttatgaatcaaaaaaggggtcttgctcctcagaacaaaccagaattgcagaaggtgatggaaaaaagaaaacgagaccaagtaataaagcagaaggaagaagaagcacagaagaagaaatctgacttggaaatagagctattaaaacggcagcagaagttggagcagcttgaacttgagaagcagaaattgcaagaagagcaagaaaatgcccccgagtttgtgaaggtgaaaggcaatctcaggagaacaggccaagaagtcgcccaagcccaggagtcctaggctgaggctgcaccaagacctcgtgtgtcaccccacagagctgtctgtgggtgccttctcaatctcagggcaaaagcccctggagaatatttcagccagcagagaattttgacttgcagtaggatttggtttgattttcctacgatctgggtggatgccttgcctgtgacagttgcagttcctattcgccaaatgaagggcagtgccccgcacgtaagttggaatgatggacctgtgttcagagacttaacagaaccaacaagcaaaacaagtgagaacaggaaaaaggaagaggacactggaatcaattcttgagagttgcactacttggtttttctt

SEQ ID NO: 131802 - DNA, 692 bp, Homo sapiens
  Payload ID: 5730
  Gene Symbol: FAM107B
  Gene Name: family with sequence similarity 107, member B
  Uniprot ID: Q9H098
  ENST ID: ENST00000378462
  CDS Start-End: 180-575
gtttctctttgaacttgaactgtggctcttttgatatccagaaagagagttctttgtggggatggttaattcttgttttgggtgcttttcttcaccgctctaaggaactaccacagtcagaagacagcccacctgaggatattgaccataaggactcatatctcattacaagaagcatcatggccgagccagactacatagaagatgacaatcctgaactcattaggcctcagaaactgatcaatcctgtaaaaacctcccggaaccatcaagatcttcacagagaacttcttatgaatcaaaaaaggggtcttgctcctcagaacaaaccagaattgcagaaggtgatggaaaaaagaaaacgagaccaagtaataaagcagaaggaagaagaagcacagaagaagaaatctgacttggaaatagagctattaaaacggcagcagaagttggagcagcttgaacttgagaagcagaaattgcaagaagagcaagaaaatgcccccgagtttgtgaaggtgaaaggcaatctcaggagaacaggccaagaagtcgcccaagcccaggagtcctaggctgaggctgcaccaagacctcgtgtgtcaccccacagagctgtctgtgggtgccttctcaatctcagggcaaaagcccctggagaatatttcagccagcagagaattttgacttgc

SEQ ID NO: 131803 - DNA, 1052 bp, Homo sapiens
  Payload ID: 5730
  Gene Symbol: FAM107B
  Gene Name: family with sequence similarity 107, member B
  Uniprot ID: Q9H098
  ENST ID: ENST00000378465
  CDS Start-End: 262-657
agaagttgctagagtgtttctctttgaacttgaactgtggctcttttgatatccagaaagagagttctttgtggggatggttaattcttgttttgggtgcttttcttcaccgctctaaggaactaccacagtcagaaggtgcattcttactgcgatctttttatttgctaccttgggcttaaggagcctgcctatatctactgagacagcccacctgaggatattgaccataaggactcatatctcattacaagaagcatcatggccgagccagactacatagaagatgacaatcctgaactcattaggcctcagaaactgatcaatcctgtaaaaacctcccggaaccatcaagatcttcacagagaacttcttatgaatcaaaaaaggggtcttgctcctcagaacaaaccagaattgcagaaggtgatggaaaaaagaaaacgagaccaagtaataaagcagaaggaagaagaagcacagaagaagaaatctgacttggaaatagagctattaaaacggcagcagaagttggagcagcttgaacttgagaagcagaaattgcaagaagagcaagaaaatgcccccgagtttgtgaaggtgaaaggcaatctcaggagaacaggccaagaagtcgcccaagcccaggagtcctaggctgaggctgcaccaagacctcgtgtgtcaccccacagagctgtctgtgggtgccttctcaatctcagggcaaaagcccctggagaatatttcagccagcagagaattttgacttgcagtaggatttggtttgattttcctacgatctgggtggatgccttgcctgtgacagttgcagttcctattcgccaaatgaagggcagtgccccgcacgtaagttggaatgatggacctgtgttcagagacttaacagaaccaacaagcaaaacaagtgagaacaggaaaaaggaagaggacactggaatcaattcttgagagttgcactacttggtttttcttccattccaagtttcgtgggacccagagccttttttcttttaaaagctaaaaaacaa

SEQ ID NO: 131804 - DNA, 2374 bp, Homo sapiens
  Payload ID: 5730
  Gene Symbol: FAM107B
  Gene Name: family with sequence similarity 107, member B
  Uniprot ID: Q9H098
  ENST ID: ENST00000378467
  CDS Start-End: 302-697
gcggggccgcggggagcgagagccgccctgcgccggactggcttgcgggccgggccgccgcccccggagccgccctcgcgccgcctcgggccgccgccgagcagtcgggccgctgggcgccgccgcgggcgccgggagcgagctgggagggagccgcgcgcctttgtgcgcgcgccgaggagaatgcagttgaaactaattttgtggatagagaaactgttggaactgctttacaaagtattttaacagcccacctgaggatattgaccataaggactcatatctcattacaagaagcatcatggccgagccagactacatagaagatgacaatcctgaactcattaggcctcagaaactgatcaatcctgtaaaaacctcccggaaccatcaagatcttcacagagaacttcttatgaatcaaaaaaggggtcttgctcctcagaacaaaccagaattgcagaaggtgatggaaaaaagaaaacgagaccaagtaataaagcagaaggaagaagaagcacagaagaagaaatctgacttggaaatagagctattaaaacggcagcagaagttggagcagcttgaacttgagaagcagaaattgcaagaagagcaagaaaatgcccccgagtttgtgaaggtgaaaggcaatctcaggagaacaggccaagaagtcgcccaagcccaggagtcctaggctgaggctgcaccaagacctcgtgtgtcaccccacagagctgtctgtgggtgccttctcaatctcagggcaaaagcccctggagaatatttcagccagcagagaattttgacttgcagtaggatttggtttgattttcctacgatctgggtggatgccttgcctgtgacagttgcagttcctattcgccaaatgaagggcagtgccccgcacgtaagttggaatgatggacctgtgttcagagacttaacagaaccaacaagcaaaacaagtgagaacaggaaaaaggaagaggacactggaatcaattcttgagagttgcactacttggtttttcttccattccaagtttcgtgggacccagagccttttttcttttaaaagctaaaaaacaagtgtttaattcctctttttgttatctgttagataattgagatcacctagaaatgcgtttaatctgttcactcactgtaaattttgaggacccagaattgtcttgtttaatttatactttcacccctgttgcagttaacaccagagaaggaacgtgaatgtcgagcacagccactacccttgttggcacttaatttagaaatagggtgagaagtttaaaagcccatcttgattttattttcattccttttggttctctgtgtaataatagcaggctacatagtgacattccagttccaagaaggtacatcctgtccattcattaattgctttgattactaggagggtttctgttcagttttgtttttaaatgtcttgctgatctagttctttcagatggaataaccttccagtcccttagagagtggaactagtccatataacccagcttcagtagcaaaagtagaagccgccacatcttttcatttctccaagaggagagtggggaaggttcccatgaccagctgggcagtcaggatttctctaggcattctaatgtgaaataagtgtagactgctgtcaaggaggcttcatcagaagatgtatagcatttgaatgtctaatgataatgcatatcattagaatccaagctttgaaaatttctgattaatgctcatgtatttctttatctttgtttttccttgtgaagaaagactttcaccactgtctgagtgatgatgctgttgataaggatgatgtcgatgactactatattgcatctctcaggaacagctgatgggaagggaggggctgctgagttcccttgttctagctagcagcacgctcctcagagagggggccgagttacagacagcagccgcattctcatgcaaaattagttttaaactgctagtgtgggcatcggtaccttttgcctgggtgataccgaagaattgttgaggatttagtatgctccgtagagacagttcagccagtcatttctgcattggagagacttctcatactttctttgaagactcatagaaagctggatctagagcttttgaatccttaattagcacagtagaaattagctttctatgggaatgctttagtgttagcagttgacaattaggcccatattcaatctgaatgggaacaaaagtaaatgcaatgataatatactgctagttagagaaacatgttagttgattatacctgaaatggattatttatctcatcagcaagtattatttgaataaaatgagaaatgcttaagaaaaa

SEQ ID NO: 131805 - DNA, 3316 bp, Homo sapiens
  Payload ID: 5730
  Gene Symbol: FAM107B
  Gene Name: family with sequence similarity 107, member B
  Uniprot ID: Q9H098
  ENST ID: ENST00000378470
  CDS Start-End: 288-683
ggcccccgggggcttctgggagtgcctgccttcgcagctggagagagccctcctcaggggctgtctctgccttcccttcttcccatgtgtatctggggcagctgaggcagggctaggagaagagcccaggttcctcctgccacctccaagcgatgaagcagccctgggccaactccagcattctcgtgtgaactgcagaggagccctgcgcttccagctacttgcagccagacagcccacctgaggatattgaccataaggactcatatctcattacaagaagcatcatggccgagccagactacatagaagatgacaatcctgaactcattaggcctcagaaactgatcaatcctgtaaaaacctcccggaaccatcaagatcttcacagagaacttcttatgaatcaaaaaaggggtcttgctcctcagaacaaaccagaattgcagaaggtgatggaaaaaagaaaacgagaccaagtaataaagcagaaggaagaagaagcacagaagaagaaatctgacttggaaatagagctattaaaacggcagcagaagttggagcagcttgaacttgagaagcagaaattgcaagaagagcaagaaaatgcccccgagtttgtgaaggtgaaaggcaatctcaggagaacaggccaagaagtcgcccaagcccaggagtcctaggctgaggctgcaccaagacctcgtgtgtcaccccacagagctgtctgtgggtgccttctcaatctcagggcaaaagcccctggagaatatttcagccagcagagaattttgacttgcagtaggatttggtttgattttcctacgatctgggtggatgccttgcctgtgacagttgcagttcctattcgccaaatgaagggcagtgccccgcacgtaagttggaatgatggacctgtgttcagagacttaacagaaccaacaagcaaaacaagtgagaacaggaaaaaggaagaggacactggaatcaattcttgagagttgcactacttggtttttcttccattccaagtttcgtgggacccagagccttttttcttttaaaagctaaaaaacaagtgtttaattcctctttttgttatctgttagataattgagatcacctagaaatgcgtttaatctgttcactcactgtaaattttgaggacccagaattgtcttgtttaatttatactttcacccctgttgcagttaacaccagagaaggaacgtgaatgtcgagcacagccactacccttgttggcacttaatttagaaatagggtgagaagtttaaaagcccatcttgattttattttcattccttttggttctctgtgtaataatagcaggctacatagtgacattccagttccaagaaggtacatcctgtccattcattaattgctttgattactaggagggtttctgttcagttttgtttttaaatgtcttgctgatctagttctttcagatggaataaccttccagtcccttagagagtggaactagtccatataacccagcttcagtagcaaaagtagaagccgccacatcttttcatttctccaagaggagagtggggaaggttcccatgaccagctgggcagtcaggatttctctaggcattctaatgtgaaataagtgtagactgctgtcaaggaggcttcatcagaagatgtatagcatttgaatgtctaatgataatgcatatcattagaatccaagctttgaaaatttctgattaatgctcatgtatttctttatctttgtttttccttgtgaagaaagactttcaccactgtctgagtgatgatgctgttgataaggatgatgtcgatgactactatattgcatctctcaggaacagctgatgggaagggaggggctgctgagttcccttgttctagctagcagcacgctcctcagagagggggccgagttacagacagcagccgcattctcatgcaaaattagttttaaactgctagtgtgggcatcggtaccttttgcctgggtgataccgaagaattgttgaggatttagtatgctccgtagagacagttcagccagtcatttctgcattggagagacttctcatactttctttgaagactcatagaaagctggatctagagcttttgaatccttaattagcacagtagaaattagctttctatgggaatgctttagtgttagcagttgacaattaggcccatattcaatctgaatgggaacaaaagtaaatgcaatgataatatactgctagttagagaaacatgttagttgattatacctgaaatggattatttatctcatcagcaagtattatttgaataaaatgagaaatgcttaagaaaaattgttgctctacagtaatttggtttcgaagaatggaatggtaactattttttcccatcgttcttttgagagaaggaagtgtgatgactgatgatcttgaaaagcccatttctgattgcacgttgactggaattctttctttgtgtctgtggactagcgatgctgtttgtaaaatgaagattcgggactggctcatatctttttatctaactagatgtcagatcttgaaatctgtattctcgaagcaattctgccacttgatcgtattcacaggggccctggtaggctcctttagaaggaccatttctgttcctagagcttaactagaattcattcttcactgaaaaaaaaaaaagttacttaagaaagcatttctttcctaatctcactcaaatctgcagaattatttgtaattagtaatacaaaatctggccaaaaggagacttgtaaatagcgtaaagtggtgtcttatgctaaacggtggaatgtataggcagagaagctctttgaagttgtcagatgagctgggctcacaagcctgattcaaacaggctgtcggtctcctctcaccccttaatactgtgcagcccaaactcctaggactcttgaacatctgagcagttttgtgctttgagccactttttgacaaaaatggctccatttttccacagcgtggttttcttaaaatagtttaatgttttatagtctcatagtagtagtgttgctttctaagctataacagtcgactttattcttctactctgaaaaatcttgacttgtttgagtgtatataatatatataaagggagccttaatggattggttttcataatttaatattttttgtatttgctcttgtataattgtttttaacggaaagtattaaagaattgagggtggaattcttagaaccaaagttattcttaataaaaatcaccacatgcttggaccatgcaa

SEQ ID NO: 131806 - DNA, 458 bp, Homo sapiens
  Payload ID: 5730
  Gene Symbol: FAM107B
  Gene Name: family with sequence similarity 107, member B
  ENST ID: ENST00000442012
  CDS Start-End: 187-458
aatgtgtgttagctgtggacttagaaaaaggaggccaccagaacaagctggaatcttggacagggagaatgcagttgaaactaattttgtggatagagaaactgttggaactgctttacaaagtattttaacagcccacctgaggatattgaccataaggactcatatctcattacaagaagcatcatggccgagccagactacatagaagatgacaatcctgaactcattaggcctcagaaactgatcaatcctgtaaaaacctcccggaaccatcaagatcttcacagagaacttcttatgaatcaaaaaaggggtcttgctcctcagaacaaaccagaattgcagaaggtgatggaaaaaagaaaacgagaccaagtaataaagcagaaggaagaagaagcacagaagaagaaatctgacttggaaatagagctattaaaacggcagcagaagtt

SEQ ID NO: 131807 - DNA, 834 bp, Homo sapiens
  Payload ID: 5730
  Gene Symbol: FAM107B
  Gene Name: family with sequence similarity 107, member B
  ENST ID: ENST00000452706
  CDS Start-End: 450-834
attcagttgcatacagttcctgctttcagaagttgctagagtgtttctctttgaacttgaactgtggctcttttgatatccagaaagagagttctttgtggggatggttaattcttgttttgggtgcttttcttcaccgctctaaggaactaccacagtcagaaggtgcattcttactgcgatctttttatttgctaccttgggcttaaggagcctgcctatatctactgaggtgaggttaggtcagtctctgtaaccgttcgtcacttaggccttgatgggtgacatggatggggatgacttcctgggctaactcttctcttgctaaaggatgatttttcaccaccttgaatgcccatgattaaaacataaacaagaaaatagatatctgagacagcccacctgaggatattgaccataaggactcatatctcattacaagaagcatcatggccgagccagactacatagaagatgacaatcctgaactcattaggcctcagaaactgatcaatcctgtaaaaacctcccggaaccatcaagatcttcacagagaacttcttatgaatcaaaaaaggggtcttgctcctcagaacaaaccagaattgcagaaggtgatggaaaaaagaaaacgagaccaagtaataaagcagaaggaagaagaagcacagaagaagaaatctgacttggaaatagagctattaaaacggcagcagaagttggagcagcttgaacttgagaagcagaaattgcaagaagagcaagaaaatgcccccgagtttgtgaaggtgaaaggcaatctcaggagaacaggccaagaagtcgcccaagccc

SEQ ID NO: 131808 - DNA, 583 bp, Homo sapiens
  Payload ID: 5730
  Gene Symbol: FAM107B
  Gene Name: family with sequence similarity 107, member B
  ENST ID: ENST00000475786
  CDS Start-End: 279-583
attgagaagggaatgtgcttggtctgtcttctctctctgcttcgtcacctgccagtcctgagggccccaggcagcagtgcagctttaatgtggattcctatggatcagaggtgtcctagggctcacgttgttattctgcattgcacttgcagccaggagaatgcagttgaaactaattttgtggatagagaaactgttggaactgctttacaaagtattttaacagcccacctgaggatattgaccataaggactcatatctcattacaagaagcatcatggccgagccagactacatagaagatgacaatcctgaactcattaggcctcagaaactgatcaatcctgtaaaaacctcccggaaccatcaagatcttcacagagaacttcttatgaatcaaaaaaggggtcttgctcctcagaacaaaccagaattgcagaaggtgatggaaaaaagaaaacgagaccaagtaataaagcagaaggaagaagaagcacagaagaagaaatctgacttggaaatagagctattaaaacggcagcagaagttggagcagcttgaacttgagaagcagaaattgca

SEQ ID NO: 131809 - DNA, 790 bp, Homo sapiens
  Payload ID: 5730
  Gene Symbol: FAM107B
  Gene Name: family with sequence similarity 107, member B
  Uniprot ID: Q9H098
  ENST ID: ENST00000478076
  CDS Start-End: 222-617
atatcgagtattgagaagggaatgtgcttggtctgtcttctctctctgcttcgtcacctgccagtcctgagggccccaggcagcagtgcagctttaatgtggattcctatggatcagaggtgtcctagggctcacgttgttattctgcattgcacttgcagccagacagcccacctgaggatattgaccataaggactcatatctcattacaagaagcatcatggccgagccagactacatagaagatgacaatcctgaactcattaggcctcagaaactgatcaatcctgtaaaaacctcccggaaccatcaagatcttcacagagaacttcttatgaatcaaaaaaggggtcttgctcctcagaacaaaccagaattgcagaaggtgatggaaaaaagaaaacgagaccaagtaataaagcagaaggaagaagaagcacagaagaagaaatctgacttggaaatagagctattaaaacggcagcagaagttggagcagcttgaacttgagaagcagaaattgcaagaagagcaagaaaatgcccccgagtttgtgaaggtgaaaggcaatctcaggagaacaggccaagaagtcgcccaagcccaggagtcctaggctgaggctgcaccaagacctcgtgtgtcaccccacagagctgtctgtgggtgccttctcaatctcagggcaaaagcccctggagaatatttcagccagcagagaattttgacttgcagtaggatttggtttgattttcctacgatctgggtggatgccttgcctgtgacagt

SEQ ID NO: 131810 - DNA, 549 bp, Homo sapiens
  Payload ID: 5730
  Gene Symbol: FAM107B
  Gene Name: family with sequence similarity 107, member B
  ENST ID: ENST00000482277
  CDS Start-End: 296-549
aactgtggctcttttgatatccagaaagagagttctttgtggggatggttaattcttgttttgggtgcttttcttcaccgctctaaggaactaccacagtcagaaggtgcattcttactgcgatctttttatttgctaccttgggcttaaggagcctgcctatatctactgaggagaatgcagttgaaactaattttgtggatagagaaactgttggaactgctttacaaagtattttaacagcccacctgaggatattgaccataaggactcatatctcattacaagaagcatcatggccgagccagactacatagaagatgacaatcctgaactcattaggcctcagaaactgatcaatcctgtaaaaacctcccggaaccatcaagatcttcacagagaacttcttatgaatcaaaaaaggggtcttgctcctcagaacaaaccagaattgcagaaggtgatggaaaaaagaaaacgagaccaagtaataaagcagaaggaagaagaagcacagaagaagaaatctgacttggaaatagagctatt

SEQ ID NO: 131811 - DNA, 2633 bp, Homo sapiens
  Payload ID: 5730
  Gene Symbol: FAM107B
  Gene Name: family with sequence similarity 107, member B
  Uniprot ID: Q9H098
  ENST ID: ENST00000468747
  CDS Start-End: 207-602
gcgccggactggcttgcgggccgggccgccgcccccggagccgccctcgcgccgcctcgggccgccgccgagcagtcgggccgctgggcgccgccgcgggcgccgggagcgagctgggagggagccgcgcgcctttgtgcgcgcgccgagacagcccacctgaggatattgaccataaggactcatatctcattacaagaagcatcatggccgagccagactacatagaagatgacaatcctgaactcattaggcctcagaaactgatcaatcctgtaaaaacctcccggaaccatcaagatcttcacagagaacttcttatgaatcaaaaaaggggtcttgctcctcagaacaaaccagaattgcagaaggtgatggaaaaaagaaaacgagaccaagtaataaagcagaaggaagaagaagcacagaagaagaaatctgacttggaaatagagctattaaaacggcagcagaagttggagcagcttgaacttgagaagcagaaattgcaagaagagcaagaaaatgcccccgagtttgtgaaggtgaaaggcaatctcaggagaacaggccaagaagtcgcccaagcccaggagtcctaggctgaggctgcaccaagacctcgtgtgtcaccccacagagctgtctgtgggtgccttctcaatctcagggcaaaagcccctggagaatatttcagccagcagagaattttgacttgcagtaggatttggtttgattttcctacgatctgggtggatgccttgcctgtgacagttgcagttcctattcgccaaatgaagggcagtgccccgcacgtaagttggaatgatggacctgtgttcagagacttaacagaaccaacaagcaaaacaagtgagaacaggaaaaaggaagaggacactggaatcaattcttgagagttgcactacttggtttttcttccattccaagtttcgtgggacccagagccttttttcttttaaaagctaaaaaacaagtgtttaattcctctttttgttatctgttagataattgagatcacctagaaatgcgtttaatctgttcactcactgtaaattttgaggacccagaattgtcttgtttaatttatactttcacccctgttgcagttaacaccagagaaggaacgtgaatgtcgagcacagccactacccttgttggcacttaatttagaaatagggtgagaagtttaaaagcccatcttgattttattttcattccttttggttctctgtgtaataatagcaggctacatagtgacattccagttccaagaaggtacatcctgtccattcattaattgctttgattactaggagggtttctgttcagttttgtttttaaatgtcttgctgatctagttctttcagatggaataaccttccagtcccttagagagtggaactagtccatataacccagcttcagtagcaaaagtagaagccgccacatcttttcatttctccaagaggagagtggggaaggttcccatgaccagctgggcagtcaggatttctctaggcattctaatgtgaaataagtgtagactgctgtcaaggaggcttcatcagaagatgtatagcatttgaatgtctaatgataatgcatatcattagaatccaagctttgaaaatttctgattaatgctcatgtatttctttatctttgtttttccttgtgaagaaagactttcaccactgtctgagtgatgatgctgttgataaggatgatgtcgatgactactatattgcatctctcaggaacagctgatgggaagggaggggctgctgagttcccttgttctagctagcagcacgctcctcagagagggggccgagttacagacagcagccgcattctcatgcaaaattagttttaaactgctagtgtgggcatcggtaccttttgcctgggtgataccgaagaattgttgaggatttagtatgctccgtagagacagttcagccagtcatttctgcattggagagacttctcatactttctttgaagactcatagaaagctggatctagagcttttgaatccttaattagcacagtagaaattagctttctatgggaatgctttagtgttagcagttgacaattaggcccatattcaatctgaatgggaacaaaagtaaatgcaatgataatatactgctagttagagaaacatgttagttgattatacctgaaatggattatttatctcatcagcaagtattatttgaataaaatgagaaatgcttaagaaaaattgttgctctacagtaatttggtttcgaagaatggaatggtaactattttttcccatcgttcttttgagagaaggaagtgtgatgactgatgatcttgaaaagcccatttctgattgcacgttgactggaattctttctttgtgtctgtggactagcgatgctgtttgtaaaatgaagattcgggactggctcatatctttttatctaactagatgtcagatcttgaaatctgtattctcgaagcaattctgccacttgatcgtattcacaggggccctggtaggctcctttagaaggaccatttctgttcctagagcttaactagaattcattcttcactgaaaaaaaaaaaa

SEQ ID NO: 131812 - DNA, 697 bp, Homo sapiens
  Payload ID: 5730
  Gene Symbol: FAM107B
  Gene Name: family with sequence similarity 107, member B
  Uniprot ID: Q9H098
  ENST ID: ENST00000496330
  CDS Start-End: 249-644
attcgtgggggaggtgtgtttgtggagtaaggcagtgggagggtagaggaaaaggagataaagaaaaagcccatttctaactctctgaacaggcgaggccagcttatctgagatgcctgtgatcaggagaatgcagttgaaactaattttgtggatagagaaactgttggaactgctttacaaagtattttaacagcccacctgaggatattgaccataaggactcatatctcattacaagaagcatcatggccgagccagactacatagaagatgacaatcctgaactcattaggcctcagaaactgatcaatcctgtaaaaacctcccggaaccatcaagatcttcacagagaacttcttatgaatcaaaaaaggggtcttgctcctcagaacaaaccagaattgcagaaggtgatggaaaaaagaaaacgagaccaagtaataaagcagaaggaagaagaagcacagaagaagaaatctgacttggaaatagagctattaaaacggcagcagaagttggagcagcttgaacttgagaagcagaaattgcaagaagagcaagaaaatgcccccgagtttgtgaaggtgaaaggcaatctcaggagaacaggccaagaagtcgcccaagcccaggagtcctaggctgaggctgcaccaagacctcgtgtgtcaccccacagagctgtctgtgggtg

SEQ ID NO: 131813 - DNA, 857 bp, Homo sapiens
  Payload ID: 5730
  Gene Symbol: FAM107B
  Gene Name: family with sequence similarity 107, member B
  ENST ID: ENST00000481209
  CDS Start-End: 258-413
ttcgcagctggagagagccctcctcaggggctgtctctgccttcccttcttcccatgtgtatctggggcagctgaggcagggctaggagaagagcccaggttcctcctgccacctccaagcgatgaagcagccctgggccaactccagcattctcgtgtgaactgcagaggagccctgcgcttccagctacttgcagccagacagcccacctgaggatattgaccataaggactcatatctcattacaagaagcatcatggccgagccagactacatagaagatgacaatcctgaactcattaggcctcagaaactgatcaatcctgtaaaaacctcccggaaccatcaagatcttcacagagaacttcttatgaatcaaaaaaggattttggtctggttggaaatacattaaaaaaaaaaaaaagaaaaggcagatttcaaaatgaaatgaaaatatatctcatcttatctcttaagagttttcaaggggtcttgctcctcagaacaaaccagaattgcagaaggtgatggaaaaaagaaaacgagaccaagtaataaagcagaaggaagaagaagcacagaagaagaaatctgacttggaaatagagctattaaaacggcagcagaagttggagcagcttgaacttgagaagcagaaattgcaagaagagcaagaaaatgcccccgagtttgtgaaggtgaaaggcaatctcaggagaacaggccaagaagtcgcccaagcccaggagtcctaggctgaggctgcaccaagacctcgtgtgtcaccccacagagctgtctgtgggtgccttctcaatctcagggcaaaagcccctggagaatatttcagccagca

SEQ ID NO: 131814 - DNA, 561 bp, Homo sapiens
  Payload ID: 5730
  Gene Symbol: FAM107B
  Gene Name: family with sequence similarity 107, member B
  ENST ID: ENST00000494865
  CDS Start-End: 188-561
ctgcaagtttagcactggcctgtcctgattagtgaggacctctgattgcctaggccagggctcaggagaatgcagttgaaactaattttgtggatagagaaactgttggaactgctttacaaagtattttaacagcccacctgaggatattgaccataaggactcatatctcattacaagaagcatcatggccgagccagactacatagaagatgacaatcctgaactcattaggcctcagaaactgatcaatcctgtaaaaacctcccggaaccatcaagatcttcacagagaacttcttatgaatcaaaaaaggggtcttgctcctcagaacaaaccagaattgcagaaggtgatggaaaaaagaaaacgagaccaagtaataaagcagaaggaagaagaagcacagaagaagaaatctgacttggaaatagagctattaaaacggcagcagaagttggagcagcttgaacttgagaagcagaaattgcaagaagagcaagaaaatgcccccgagtttgtgaaggtgaaaggcaatctcaggagaacaggccaagaagt

SEQ ID NO: 131815 - DNA, 475 bp, Homo sapiens
  Payload ID: 5730
  Gene Symbol: FAM107B
  Gene Name: family with sequence similarity 107, member B
  ENST ID: ENST00000472095
  CDS Start-End: 273-475
gtgcttttcttcaccgctctaaggaactaccacagtcagaaggagaatgcagttgaaactaattttgtggatagagaaactgttggaactgctttacaaagtattttactctttcaagatcaaatgaagacagaattgttcaaagcgtgggttgacctcccctactcagtttttggctccttttggaaatctgatgtctgcccttctaagcgtaagacagcccacctgaggatattgaccataaggactcatatctcattacaagaagcatcatggccgagccagactacatagaagatgacaatcctgaactcattaggcctcagaaactgatcaatcctgtaaaaacctcccggaaccatcaagatcttcacagagaacttcttatgaatcaaaaaaggggtcttgctcctcagaacaaaccagaattgcagaaggtgatggaaaaaagaaaacgagaccaagtaataaagca

SEQ ID NO: 131816 - DNA, 570 bp, Homo sapiens
  Payload ID: 5730
  Gene Symbol: FAM107B
  Gene Name: family with sequence similarity 107, member B
  Uniprot ID: Q9H098
  ENST ID: ENST00000479731
  CDS Start-End: 143-538
atatttgcttacaagtagaggagctgatttttgtacagacaagtacatttcaccagtgctgccagcacgttctcttggtctggaagacagcccacctgaggatattgaccataaggactcatatctcattacaagaagcatcatggccgagccagactacatagaagatgacaatcctgaactcattaggcctcagaaactgatcaatcctgtaaaaacctcccggaaccatcaagatcttcacagagaacttcttatgaatcaaaaaaggggtcttgctcctcagaacaaaccagaattgcagaaggtgatggaaaaaagaaaacgagaccaagtaataaagcagaaggaagaagaagcacagaagaagaaatctgacttggaaatagagctattaaaacggcagcagaagttggagcagcttgaacttgagaagcagaaattgcaagaagagcaagaaaatgcccccgagtttgtgaaggtgaaaggcaatctcaggagaacaggccaagaagtcgcccaagcccaggagtcctaggctgaggctgcaccaagacctcgtgtgtcacc

SEQ ID NO: 131817 - DNA, 559 bp, Homo sapiens
  Payload ID: 5730
  Gene Symbol: FAM107B
  Gene Name: family with sequence similarity 107, member B
  ENST ID: ENST00000489100
  CDS Start-End: 181-559
acttgtggctgagcagaggtgtatgtagtgcatttaggattttgccgaggagcacgtttttccatgggacagtgtgttgatatcaggctggctgtgatgggttccctgagtcaccctctgcgagacagcccacctgaggatattgaccataaggactcatatctcattacaagaagcatcatggccgagccagactacatagaagatgacaatcctgaactcattaggcctcagaaactgatcaatcctgtaaaaacctcccggaaccatcaagatcttcacagagaacttcttatgaatcaaaaaaggggtcttgctcctcagaacaaaccagaattgcagaaggtgatggaaaaaagaaaacgagaccaagtaataaagcagaaggaagaagaagcacagaagaagaaatctgacttggaaatagagctattaaaacggcagcagaagttggagcagcttgaacttgagaagcagaaattgcaagaagagcaagaaaatgcccccgagtttgtgaaggtgaaaggcaatctcaggagaacaggccaagaagtcgccc

SEQ ID NO: 131818 - DNA, 2317 bp, Homo sapiens
  Payload ID: 5730
  Gene Symbol: FAM107B
  Gene Name: family with sequence similarity 107, member B
  ENST ID: ENST00000487335
  CDS Start-End: 43-525
ttccttgccccgtttgaactttgcaatgattcactgcaagtcatgtccacgtggaaagcaagactcaccaaaagactgaagtctccctctagaagcatgcatccatttccgtgctcagctctgctcgcctgttttgggaatacgagggagagtgcttccttcaatcagtccggcgtggctgatactcattccaccgtccgtgtgcagcctgtggccaaagcaggcagacagccaagacacccaagcgcagaaggagctccagagaaaaggcaagattcgagcacccatgcagagagaaatggcagtgcgaatcggaattcaagtcaccgcactgcggcccagcccgcggagacgcctgaagatgtgcccgggtccctggatgatggggcggactgtgaagcagtggtgtttcacgcttccatccccagaccatcaattattgacacgcccaaggaagaagaatttcgagaagaacctaaatgcctcgagctggagcagaaaatgacatcaggagaatgcagttgaaactaattttgtggatagagaaactgttggaactgctttacaaagtattttaacagcccacctgaggatattgaccataaggactcatatctcattacaagaagcatcatggccgagccagactacatagaagatgacaatcctgaactcattaggcctcagaaactgatcaatcctgtaaaaacctcccggaaccatcaagatcttcacagagaacttcttatgaatcaaaaaaggggtcttgctcctcagaacaaaccagaattgcagaaggtgatggaaaaaagaaaacgagaccaagtaataaagcagaaggaagaagaagcacagaagaagaaatctgacttggaaatagagctattaaaacggcagcagaagttggagcagcttgaacttgagaagcagaaattgcaagaagagcaagaaaatgcccccgagtttgtgaaggtgaaaggcaatctcaggagaacaggccaagaagtcgcccaagcccaggagtcctaggctgaggctgcaccaagacctcgtgtgtcaccccacagagctgtctgtgggtgccttctcaatctcagggcaaaagcccctggagaatatttcagccagcagagaattttgacttgcagtaggatttggtttgattttcctacgatctgggtggatgccttgcctgtgacagttgcagttcctattcgccaaatgaagggcagtgccccgcacgtaagttggaatgatggacctgtgttcagagacttaacagaaccaacaagcaaaacaagtgagaacaggaaaaaggaagaggacactggaatcaattcttgagagttgcactacttggtttttcttccattccaagtttcgtgggacccagagccttttttcttttaaaagctaaaaaacaagtgtttaattcctctttttgttatctgttagataattgagatcacctagaaatgcgtttaatctgttcactcactgtaaattttgaggacccagaattgtcttgtttaatttatactttcacccctgttgcagttaacaccagagaaggaacgtgaatgtcgagcacagccactacccttgttggcacttaatttagaaatagggtgagaagtttaaaagcccatcttgattttattttcattccttttggttctctgtgtaataatagcaggctacatagtgacattccagttccaagaaggtacatcctgtccattcattaattgctttgattactaggagggtttctgttcagttttgtttttaaatgtcttgctgatctagttctttcagatggaataaccttccagtcccttagagagtggaactagtccatataacccagcttcagtagcaaaagtagaagccgccacatcttttcatttctccaagaggagagtggggaaggttcccatgaccagctgggcagtcaggatttctctaggcattctaatgtgaaataagtgtagactgctgtcaaggaggcttcatcagaagatgtatagcatttgaatgtctaatgataatgcatatcattagaatccaagctttgaaaatttctgattaatgctcatgtatttctttatctttgtttttccttgtgaagaaagactttcaccactgtctgagtgatgatgctgttgataaggatgatgtcgatgactactatattgcatctctcaggaacagctgatgggaagggaggggctgctgagttcccttgttctagctagcagcacgctcctcagagagggggccgagttacagacagcagccgcattctcatgcaaaa

SEQ ID NO: 131819 - DNA, 552 bp, Homo sapiens
  Payload ID: 5730
  Gene Symbol: FAM107B
  Gene Name: family with sequence similarity 107, member B
  ENST ID: ENST00000488576
  CDS Start-End: 274-552
gcttttcttcaccgctctaaggaactaccacagtcagaaggtgcattcttactgcgatctttttatttgctaccttgggcttaaggagcctgcctatatctactgagccagagaatcctggtcaagccctgaacagtccagaaactctgaggagaatgcagttgaaactaattttgtggatagagaaactgttggaactgctttacaaagtattttaacagcccacctgaggatattgaccataaggactcatatctcattacaagaagcatcatggccgagccagactacatagaagatgacaatcctgaactcattaggcctcagaaactgatcaatcctgtaaaaacctcccggaaccatcaagatcttcacagagaacttcttatgaatcaaaaaaggggtcttgctcctcagaacaaaccagaattgcagaaggtgatggaaaaaagaaaacgagaccaagtaataaagcagaaggaagaagaagcacagaagaagaaatctgacttggaaatagagctattaaaacggcagcagaagttggagcag

SEQ ID NO: 131820 - DNA, 625 bp, Homo sapiens
  Payload ID: 5730
  Gene Symbol: FAM107B
  Gene Name: family with sequence similarity 107, member B
  ENST ID: ENST00000468492
  CDS Start-End: 234-625
acccagggctggagagtctgcgtgcatatttgcttacaagtagaggagctgatttttgtacagacaagtacatttcaccagtgctgccagcacgttctcttggtctggaaggagaatgcagttgaaactaattttgtggatagagaaactgttggaactgctttacaaagtattttaacagcccacctgaggatattgaccataaggactcatatctcattacaagaagcatcatggccgagccagactacatagaagatgacaatcctgaactcattaggcctcagaaactgatcaatcctgtaaaaacctcccggaaccatcaagatcttcacagagaacttcttatgaatcaaaaaaggggtcttgctcctcagaacaaaccagaattgcagaaggtgatggaaaaaagaaaacgagaccaagtaataaagcagaaggaagaagaagcacagaagaagaaatctgacttggaaatagagctattaaaacggcagcagaagttggagcagcttgaacttgagaagcagaaattgcaagaagagcaagaaaatgcccccgagtttgtgaaggtgaaaggcaatctcaggagaacaggccaagaagtcgcccaagcccaggagtc

SEQ ID NO: 131821 - DNA, 3510 bp, Homo sapiens
  Payload ID: 5730
  Gene Symbol: FAM107B
  Gene Name: family with sequence similarity 107, member B
  Uniprot ID: Q9H098
  ENST ID: ENST00000622567
  CDS Start-End: 484-879
attgtttgctctggcttctgtgccggatgaggtcattcagttgcatacagttcctgctttcagaagttgctagagtgtttctctttgaacttgaactgtggctcttttgatatccagaaagagagttctttgtggggatggttaattcttgttttgggtgcttttcttcaccgctctaaggaactaccacagtcagaaggtgcattcttactgcgatctttttatttgctaccttgggcttaaggagcctgcctatatctactgaggtgaggttaggtcagtctctgtaaccgttcgtcacttaggccttgatgggtgacatggatggggatgacttcctgggctaactcttctcttgctaaaggatgatttttcaccaccttgaatgcccatgattaaaacataaacaagaaaatagatatctgagacagcccacctgaggatattgaccataaggactcatatctcattacaagaagcatcatggccgagccagactacatagaagatgacaatcctgaactcattaggcctcagaaactgatcaatcctgtaaaaacctcccggaaccatcaagatcttcacagagaacttcttatgaatcaaaaaaggggtcttgctcctcagaacaaaccagaattgcagaaggtgatggaaaaaagaaaacgagaccaagtaataaagcagaaggaagaagaagcacagaagaagaaatctgacttggaaatagagctattaaaacggcagcagaagttggagcagcttgaacttgagaagcagaaattgcaagaagagcaagaaaatgcccccgagtttgtgaaggtgaaaggcaatctcaggagaacaggccaagaagtcgcccaagcccaggagtcctaggctgaggctgcaccaagacctcgtgtgtcaccccacagagctgtctgtgggtgccttctcaatctcagggcaaaagcccctggagaatatttcagccagcagagaattttgacttgcagtaggatttggtttgattttcctacgatctgggtggatgccttgcctgtgacagttgcagttcctattcgccaaatgaagggcagtgccccgcacgtaagttggaatgatggacctgtgttcagagacttaacagaaccaacaagcaaaacaagtgagaacaggaaaaaggaagaggacactggaatcaattcttgagagttgcactacttggtttttcttccattccaagtttcgtgggacccagagccttttttcttttaaaagctaaaaaacaagtgtttaattcctctttttgttatctgttagataattgagatcacctagaaatgcgtttaatctgttcactcactgtaaattttgaggacccagaattgtcttgtttaatttatactttcacccctgttgcagttaacaccagagaaggaacgtgaatgtcgagcacagccactacccttgttggcacttaatttagaaatagggtgagaagtttaaaagcccatcttgattttattttcattccttttggttctctgtgtaataatagcaggctacatagtgacattccagttccaagaaggtacatcctgtccattcattaattgctttgattactaggagggtttctgttcagttttgtttttaaatgtcttgctgatctagttctttcagatggaataaccttccagtcccttagagagtggaactagtccatataacccagcttcagtagcaaaagtagaagccgccacatcttttcatttctccaagaggagagtggggaaggttcccatgaccagctgggcagtcaggatttctctaggcattctaatgtgaaataagtgtagactgctgtcaaggaggcttcatcagaagatgtatagcatttgaatgtctaatgataatgcatatcattagaatccaagctttgaaaatttctgattaatgctcatgtatttctttatctttgtttttccttgtgaagaaagactttcaccactgtctgagtgatgatgctgttgataaggatgatgtcgatgactactatattgcatctctcaggaacagctgatgggaagggaggggctgctgagttcccttgttctagctagcagcacgctcctcagagagggggccgagttacagacagcagccgcattctcatgcaaaattagttttaaactgctagtgtgggcatcggtaccttttgcctgggtgataccgaagaattgttgaggatttagtatgctccgtagagacagttcagccagtcatttctgcattggagagacttctcatactttctttgaagactcatagaaagctggatctagagcttttgaatccttaattagcacagtagaaattagctttctatgggaatgctttagtgttagcagttgacaattaggcccatattcaatctgaatgggaacaaaagtaaatgcaatgataatatactgctagttagagaaacatgttagttgattatacctgaaatggattatttatctcatcagcaagtattatttgaataaaatgagaaatgcttaagaaaaattgttgctctacagtaatttggtttcgaagaatggaatggtaactattttttcccatcgttcttttgagagaaggaagtgtgatgactgatgatcttgaaaagcccatttctgattgcacgttgactggaattctttctttgtgtctgtggactagcgatgctgtttgtaaaatgaagattcgggactggctcatatctttttatctaactagatgtcagatcttgaaatctgtattctcgaagcaattctgccacttgatcgtattcacaggggccctggtaggctcctttagaaggaccatttctgttcctagagcttaactagaattcattcttcactgaaaaaaaaaaaagttacttaagaaagcatttctttcctaatctcactcaaatctgcagaattatttgtaattagtaatacaaaatctggccaaaaggagacttgtaaatagcgtaaagtggtgtcttatgctaaacggtggaatgtataggcagagaagctctttgaagttgtcagatgagctgggctcacaagcctgattcaaacaggctgtcggtctcctctcaccccttaatactgtgcagcccaaactcctaggactcttgaacatctgagcagttttgtgctttgagccactttttgacaaaaatggctccatttttccacagcgtggttttcttaaaatagtttaatgttttatagtctcatagtagtagtgttgctttctaagctataacagtcgactttattcttctactctgaaaaatcttgacttgtttgagtgtatataatatatataaagggagccttaatggattggttttcataatttaatattttttgtatttgctcttgtataattgtttttaacggaaagtattaaagaattgagggtggaattcttagaaccaaagttattcttaataaaaatcaccacatgcttggaccatgc

SEQ ID NO: 131822 - DNA, 3256 bp, Homo sapiens
  Payload ID: 5731
  Gene Symbol: FAM109A
  Gene Name: family with sequence similarity 109, member A
  Uniprot ID: Q8N4B1
  ENST ID: ENST00000361483
  CDS Start-End: 441-1229
aggggcgcgcccgtgggtcgcggactgtccggttgctcccgcctccttccgtcggatccgcgctctcccgcggctgcgccggcccggccgcccaggagacaaagcgctgccgccgccgtcgccgccaccgggccagtcccgaaccatggccgggccaccccgcaacctcgcgcctcccgtcccgtcgccgccctaggcctgcgctgcgagatgcagaaacagaggcccagagagatgaatagcctgcctggggtcccccagcccagatgctgcagagctgacatttgaatccagagaagagcgagctgaggctggagctgagcagagggcagggaggcaagtggtggcctgagagtttgctgaggatgatggcttccagctccatctatttccccgcaaaggacatgatctcattcctttttatggctggatagttttccatggccccaggctcccctccaggccccgcgattgccaccatgaagctgaacgagcgcagcctggccttctacgccacctgtgacgccccggtggacaatgcaggcttcctgtacaagaagggtgggcggcacgcggcctaccaccggcgctggttcgtgctgcgcgggaacatgctcttctacttcgaggacgctgccagccgtgagcccgtgggcgtcatcatcctggagggctgcactgtggagctggtggaggccgccgaggagttcgccttcgctgtgcgctttgcggggacccgggcgcgcacctacgtgctggccgctgagagtcaggatgccatggagggctgggtcaaggccctgtcgcgtgccagcttcgactacctgcggctggtggtgcgcgagctggagcagcagctggcggctgtacgtggcgggggtggcatggccctgccccagccccagccccagtccctgcccttgcccccgtccctgccctctgccctggccccagtcccatccctgccttctgccccagccccggtcccagccctgcccctgccccgccggcccagtgccctcccgcccaaggagaatggctgcgctgtctggagcactgaggccaccttcaggcctggacccgagccccctccaccaccgcctcgccgccgggcctcggcaccccacgggcccctggacatggcccccttcgcccggctgcacgagtgctatggccaggagatccgggccctgcgtggccagtggctcagcagccgggtccagccctgaggccaccagggcgcctgttttagggggacacaagctctatgccctctgggacaggccgggtcctggagagactgggggagcagatcctgagggaaatcatgggcaaggctggcccccaggccctgagtggcctggttttgggggatgcaggctctgagaaggtgctggattctgagtgggcctttaggaccatgtgacccagaaggcctacccttgaggggaacgtcacgtgcaacactaaggagaatccagggcctgagggggaggtttcctgagaactccggccccaggctggcctgagctgccgggcagaggcctgtgctggcaacaggcattgccgggcctgcagctcagagggtcactgggactgagggcgatctgtggcctgaaaagcaaatgcacagttagtgcagctcctgaccaggccttcagggtggacagagggaggatcggtcatggcagccacacctgggcctggccttgctccgggacctgccagaggagctggcctggctctgtgcctgcctgcctccaggagcaggacggtggctgggagggtagtgactggggacacaggtgcaggtgttagtgcaggaccggaagggtgaggtggcctggtcctcggggctcctggcctgggctggctgaggcaggactctgccaaaagtcccctgccaggcctcatggtggtgctcctggtggcagtggctctctggccgcgggccctgtctgtgtctccgtggtggctctcacagggctctccagacactccttgactgcatccttcagtcttggcccctaggcctggggccccttgggagcttgcctgacctcccttcctgggctgggtagccatggcccgaggtgaccttctagcaggttcccccagggaggggaggccaccagctgactcaccgcctaggaaggcccaggtgctgacctagtggcggagaaaaagccgcacaccgagtgtggcttccagagcccctcttcagctccaggcagccccctctaacatgtcccctcctgagctcagcccccacccccatactcctggtggggaccaggtcttgcttggcttcggggctgaccgccggtcccctttcttctcaccacagtgcccatttttcatccagggagaacctcggggctgggacacctcctggccctcaccctgggtcatgtttacagtcctcagtgccccacaccggtggccccctgaggacacctccaccctgaccttgattttcccaaacgctgcctcttggtgacagactcagcccaaaaccccttccttctgtctctggagacccttgagcttggggaaatatggaggggtgtgtgtctgcaatcaaggcctctgcagctcacggctggcccggtgggctgggacttccgtctgaattttaaatacttagggttcatttttttttctctggcaacaaagcttgatgttttcactgctttagtttcctgtttgctggtgggaggggatacggtctgtgactctggacttgctctgggggaacagttgtcactgcccccggggagaggggcagcttgggctggagaagcacagccagagacagagcccctcgagagggatccttggctgcttcattgtcttccccccagcaagccctgctctccacaggcacctctggggtcttggtatggtccccgctcacctccttccagagtcctgagtggtgtgggtgtgggtggcacaggatctggggcatgggaggggttcagagcttcccagagccccgtgtcctggcagactcagctggtgggctggggtgttaaccccagtcctggcgtaggtttacagactctcaaggtacgttggccctggtctcctgggagagaggggtgagggatgtcccctaccaaagcacaaggtgggatcaggctgcctcctgggttgggtgtcgggggagctgtccggcagcctggcagggagatgcaagggctaaagtaaaattttgtcaagtaatggctgattgtgtcattttttttcccca

SEQ ID NO: 131823 - DNA, 571 bp, Homo sapiens
  Payload ID: 5731
  Gene Symbol: FAM109A
  Gene Name: family with sequence similarity 109, member A
  ENST ID: ENST00000547710
  CDS Start-End: 221-571
gtccggttgctcccgcctccttccgtcggatccgcgctctcccgcggctgcgccggcccggccgcccaggagacaaagcgctgccgccgccgtcgccgccaccgggccagtcccgaaccatggccgggccaccccgcaacctcgcgcctcccgtcccgtcgccgccctaggcctgcgctgcgaggccccaggctcccctccaggccccgcgattgccaccatgaagctgaacgagcgcagcctggccttctacgccacctgtgacgccccggtggacaatgcaggcttcctgtacaagaagggtgggcggcacgcggcctaccaccggcgctggttcgtgctgcgcgggaacatgctcttctacttcgaggacgctgccagccgtgagcccgtgggcgtcatcatcctggagggctgcactgtggagctggtggaggccgccgaggagttcgccttcgctgtgcgctttgcggggacccgggcgcgcacctacgtgctggccgctgagagtcaggatgccatggagggctgggtcaaggccctgtcgcgtgccagcttcgactacctgcgg

SEQ ID NO: 131824 - DNA, 2846 bp, Homo sapiens
  Payload ID: 5731
  Gene Symbol: FAM109A
  Gene Name: family with sequence similarity 109, member A
  Uniprot ID: Q8N4B1
  ENST ID: ENST00000547838
  CDS Start-End: 99-848
attcctctgaaatgtctggcatgcagcaggaactcacaacattatttcagggatacaggagggccccaggctcccctccaggccccgcgattgccaccatgaagctgaacgagcgcagcctggccttctacgccacctgtgacgccccggtggacaatgcaggcttcctgtacaagaagggtgggcggcacgcggcctaccaccggcgctggttcgtgctgcgcgggaacatgctcttctacttcgaggacgctgccagccgtgagcccgtgggcgtcatcatcctggagggctgcactgtggagctggtggaggccgccgaggagttcgccttcgctgtgcgctttgcggggacccgggcgcgcacctacgtgctggccgctgagagtcaggatgccatggagggctgggtcaaggccctgtcgcgtgccagcttcgactacctgcggctggtggtgcgcgagctggagcagcagctggcggctgtacgtggcgggggtggcatggccctgccccagccccagccccagtccctgcccttgcccccgtccctgccctctgccctggccccagtcccatccctgccttctgccccagccccggtcccagccctgcccctgccccgccggcccagtgccctcccgcccaaggagaatggctgcgctgtctggagcactgaggccaccttcaggcctggacccgagccccctccaccaccgcctcgccgccgggcctcggcaccccacgggcccctggacatggcccccttcgcccggctgcacgagtgctatggccaggagatccgggccctgcgtggccagtggctcagcagccgggtccagccctgaggccaccagggcgcctgttttagggggacacaagctctatgccctctgggacaggccgggtcctggagagactgggggagcagatcctgagggaaatcatgggcaaggctggcccccaggccctgagtggcctggttttgggggatgcaggctctgagaaggtgctggattctgagtgggcctttaggaccatgtgacccagaaggcctacccttgaggggaacgtcacgtgcaacactaaggagaatccagggcctgagggggaggtttcctgagaactccggccccaggctggcctgagctgccgggcagaggcctgtgctggcaacaggcattgccgggcctgcagctcagagggtcactgggactgagggcgatctgtggcctgaaaagcaaatgcacagttagtgcagctcctgaccaggccttcagggtggacagagggaggatcggtcatggcagccacacctgggcctggccttgctccgggacctgccagaggagctggcctggctctgtgcctgcctgcctccaggagcaggacggtggctgggagggtagtgactggggacacaggtgcaggtgttagtgcaggaccggaagggtgaggtggcctggtcctcggggctcctggcctgggctggctgaggcaggactctgccaaaagtcccctgccaggcctcatggtggtgctcctggtggcagtggctctctggccgcgggccctgtctgtgtctccgtggtggctctcacagggctctccagacactccttgactgcatccttcagtcttggcccctaggcctggggccccttgggagcttgcctgacctcccttcctgggctgggtagccatggcccgaggtgaccttctagcaggttcccccagggaggggaggccaccagctgactcaccgcctaggaaggcccaggtgctgacctagtggcggagaaaaagccgcacaccgagtgtggcttccagagcccctcttcagctccaggcagccccctctaacatgtcccctcctgagctcagcccccacccccatactcctggtggggaccaggtcttgcttggcttcggggctgaccgccggtcccctttcttctcaccacagtgcccatttttcatccagggagaacctcggggctgggacacctcctggccctcaccctgggtcatgtttacagtcctcagtgccccacaccggtggccccctgaggacacctccaccctgaccttgattttcccaaacgctgcctcttggtgacagactcagcccaaaaccccttccttctgtctctggagacccttgagcttggggaaatatggaggggtgtgtgtctgcaatcaaggcctctgcagctcacggctggcccggtgggctgggacttccgtctgaattttaaatacttagggttcatttttttttctctggcaacaaagcttgatgttttcactgctttagtttcctgtttgctggtgggaggggatacggtctgtgactctggacttgctctgggggaacagttgtcactgcccccggggagaggggcagcttgggctggagaagcacagccagagacagagcccctcgagagggatccttggctgcttcattgtcttccccccagcaagccctgctctccacaggcacctctggggtcttggtatggtccccgctcacctccttccagagtcctgagtggtgtgggtgtgggtggcacaggatctggggcatgggaggggttcagagcttcccagagccccgtgtcctggcagactcagctggtgggctggggtgttaaccccagtcctggcgtaggtttacagactctcaaggtacgttggccctggtctcctgggagagaggggtgagggatgtcccctaccaaagcacaaggtgggatcaggctgcctcctgggttgggtgtcgggggagctgtccggcagcctggcagggagatgcaagggctaaagtaaaattttgtcaagta

SEQ ID NO: 131825 - DNA, 574 bp, Homo sapiens
  Payload ID: 5731
  Gene Symbol: FAM109A
  Gene Name: family with sequence similarity 109, member A
  ENST ID: ENST00000549321
  CDS Start-End: 351-574
gactgtccggttgctcccgcctccttccgtcggatccgcgctctcccgcggctgcgccggcccggccgcccaggagacaaagcgctgccgccgccgtcgccgccaccgggccagtcccgaaccatggccgggccaccccgcaacctcgcgcctcccgtcccgtcgccgccctaggcctgcgctgcgagatgcagaaacagaggcccagagagatgaatagcctgcctggggtcccccagcccagatgctgcagagctgacatttgaatccagagaagagcgagctgaggctggagctgagcagagggcagggaggcaagtggctcccctccaggccccgcgattgccaccatgaagctgaacgagcgcagcctggccttctacgccacctgtgacgccccggtggacaatgcaggcttcctgtacaagaagggtgggcggcacgcggcctaccaccggcgctggttcgtgctgcgcgggaacatgctcttctacttcgaggacgctgccagccgtgagcccgtgggcgtcatcatcctggagggctgcactgtggagctggtggaggccgccga

SEQ ID NO: 131826 - DNA, 2317 bp, Homo sapiens
  Payload ID: 5731
  Gene Symbol: FAM109A
  Gene Name: family with sequence similarity 109, member A
  Uniprot ID: Q8N4B1
  ENST ID: ENST00000548163
  CDS Start-End: 105-854
aacattatttcagggatacaggagggtaggaggttatgaggctgtctggggaggcccgtgagacccaggccccaggctcccctccaggccccgcgattgccaccatgaagctgaacgagcgcagcctggccttctacgccacctgtgacgccccggtggacaatgcaggcttcctgtacaagaagggtgggcggcacgcggcctaccaccggcgctggttcgtgctgcgcgggaacatgctcttctacttcgaggacgctgccagccgtgagcccgtgggcgtcatcatcctggagggctgcactgtggagctggtggaggccgccgaggagttcgccttcgctgtgcgctttgcggggacccgggcgcgcacctacgtgctggccgctgagagtcaggatgccatggagggctgggtcaaggccctgtcgcgtgccagcttcgactacctgcggctggtggtgcgcgagctggagcagcagctggcggctgtacgtggcgggggtggcatggccctgccccagccccagccccagtccctgcccttgcccccgtccctgccctctgccctggccccagtcccatccctgccttctgccccagccccggtcccagccctgcccctgccccgccggcccagtgccctcccgcccaaggagaatggctgcgctgtctggagcactgaggccaccttcaggcctggacccgagccccctccaccaccgcctcgccgccgggcctcggcaccccacgggcccctggacatggcccccttcgcccggctgcacgagtgctatggccaggagatccgggccctgcgtggccagtggctcagcagccgggtccagccctgaggccaccagggcgcctgttttagggggacacaagctctatgccctctgggacaggccgggtcctggagagactgggggagcagatcctgagggaaatcatgggcaaggctggcccccaggccctgagtggcctggttttgggggatgcaggctctgagaaggtgctggattctgagtgggcctttaggaccatgtgacccagaaggcctacccttgaggggaacgtcacgtgcaacactaaggagaatccagggcctgagggggaggtttcctgagaactccggccccaggctggcctgagctgccgggcagaggcctgtgctggcaacaggcattgccgggcctgcagctcagagggtcactgggactgagggcgatctgtggcctgaaaagcaaatgcacagttagtgcagctcctgaccaggccttcagggtggacagagggaggatcggtcatggcagccacacctgggcctggccttgctccgggacctgccagaggagctggcctggctctgtgcctgcctgcctccaggagcaggacggtggctgggagggtagtgactggggacacaggtgcaggtgttagtgcaggaccggaagggtgaggtggcctggtcctcggggctcctggcctgggctggctgaggcaggactctgccaaaagtcccctgccaggcctcatggtggtgctcctggtggcagtggctctctggccgcgggccctgtctgtgtctccgtggtggctctcacagggctctccagacactccttgactgcatccttcagtcttggcccctaggcctggggccccttgggagcttgcctgacctcccttcctgggctgggtagccatggcccgaggtgaccttctagcaggttcccccagggaggggaggccaccagctgactcaccgcctaggaaggcccaggtgctgacctagtggcggagaaaaagccgcacaccgagtgtggcttccagagcccctcttcagctccaggcagccccctctaacatgtcccctcctgagctcagcccccacccccatactcctggtggggaccaggtcttgcttggcttcggggctgaccgccggtcccctttcttctcaccacagtgcccatttttcatccagggagaacctcggggctgggacacctcctggccctcaccctgggtcatgtttacagtcctcagtgccccacaccggtggccccctgaggacacctccaccctgaccttgattttcccaaacgctgcctcttggtgacagactcagcccaaaaccccttccttctgtctctggagacccttgagcttggggaaatatggaggggtgtgtgtctgcaatcaaggcctctgcagctcacggctggcccggtgggctgggacttccgtctgaattttaaatacttagggttcatttttttttctctggcaacaaagcttgatgttttcactg

SEQ ID NO: 131827 - DNA, 2335 bp, Homo sapiens
  Payload ID: 5732
  Gene Symbol: FAM109B
  Gene Name: family with sequence similarity 109, member B
  Uniprot ID: Q6ICB4
  ENST ID: ENST00000321753
  CDS Start-End: 188-967
ggctcccgcggccacgttgcagcccaggcggaggcgcgggatctcgagctgggatcgccctcttgggcttcggtgcgatcggcggcgggaggttccctgggaaccaggtggtcgaagggctgagctgtgtggccagacaagaggtccctgccctcccccagtgagccctgctgttcccgtgggagccatgaagctgaacgagaggagtgtagcccactatgcactcagcgactccccagcggaccacatgggcttcctgcgcacctgggggggcccagggaccccaccgacccccagtggcactggccgaagatgctggtttgtcctcaagggcaacctgctattctcctttgagagtcgcgagggccgggccccactgagcctggtggtgctggaaggctgcacagtggaactggccgaggctcccgtgcccgaggagtttgcctttgccatctgctttgatgcccctggagtgcgcccacacctgctggccgcagaagggccggcggcccaggaggcctgggtgaaggtgctgtcccgggcaagctttggctacatgcgcctggtggtacgcgagttggagagccagttgcaggacgcacgccagagcctggctttgcaacgccgctcatcctggaagtctgttgccagccgctgtaagccccaggctcctaaccaccgagctgcgggcctggagaatggccactgcctctccaaggacagcagccctgtgggcttggttgaagaagcgggcagcaggtctgcagggtgggggttggctgagtgggagctgcagggccctgccagcctcctcctaggcaaggggcagagccctgtgtcccctgagacctcctgcttctctaccctgcatgactggtatggccaggagatcgtggagctgcggcagtgttggcagaagagggcccaggggagccactcaaaatgtgaggaacaggataggccctaagtctgggccctttgagtcaggaaaccagggccagttctttttcaggagttaaatgtttacccatttccaaggttgcgttttgggaggggacatgggttctctccttcctgctatttaggcattctccaggttcgagatccacccgtgtgtctggaagggactgcgggaccattccttccatcctctttatttcctgaggtccagagaaggaaggagacttagcagccacagagcaagaccccaatctcctgactgcactggcctgactgccccctcccaggggatgttaatgaaatgaaggaagtggggaatgtcacccgagactgtcacaggcttgccatacctttggcctacacaccgggctctagagccataatttccaacctggggagtctcctgtgcacttaaatccgaggtaggctgcagtatcggcttgaagctctgacactgtcagagaaagtggatttattgtgtcataggagtttctgggacccagctcttcctgagaggggtgggaagattggggatgggatcctcactcagcagtctgggtagggccctttgaggcagagggtcttcggccagtgaagagagatttattctgctcagagtgctggggtcccatcctttctccctggctgccctgttaacagatggtgctggaccttgccccggaaggggcttgtagcttttttacgtcaacgaaatgccctcctgtactctgtcttcagcagccaactcctggagctgccaagtgaggggttaaagaagaggtggggaggcagtgtggctccctgggaaaagtctgttgctttggttctcagtcctgggtattctaggagcttggacacgggattgcgtttcctgtgctaaaattctctctcctggctgggctccggtaaactgaagctgctcgagaaatcacctgggaactctcatagccgtttgtcacccagggtgtacttgccaggacctctccttgctactcttcccaaagtcgggaggcaaagcggctgggtcaccagagcctgaccatactgacgctccagggggaagacgcagaggccgggaagagacaccccctcccaaacacataaaacttgccccttcctagcctcggctcccctcactggggccttgggcaggaccgacccgcatccaactaggcctaaggggtaggctctgagcctcttacccctaagaggcggagatgcgcccaaggcgggcgcccggcctgttccccagccctgcctggaagccccgcagccactgcattttgtttaaacacagatagcacgggcctttctcttattgctacagtgttttgtacacggttaaaacactagtaaagctttttcgttattactc

SEQ ID NO: 131828 - DNA, 537 bp, Homo sapiens
  Payload ID: 5732
  Gene Symbol: FAM109B
  Gene Name: family with sequence similarity 109, member B
  ENST ID: ENST00000419475
  CDS Start-End: 213-537
gcgggctccgggaggaggtggccccagggaaggtgtggccgcggggaagtggcggcgaacagccccgacgcgaggacggggaaaccaaggcggcagccagggagaccctgaccgaggttccctgggaaccaggtggtcgaagggctgagctgtgtggccagacaagaggtccctgccctcccccagtgagccctgctgttcccgtgggagccatgaagctgaacgagaggagtgtagcccactatgcactcagcgactccccagcggaccacatgggcttcctgcgcacctgggggggcccagggaccccaccgacccccagtggcactggccgaagatgctggtttgtcctcaagggcaacctgctattctcctttgagagtcgcgagggccgggccccactgagcctggtggtgctggaaggctgcacagtggaactggccgaggctcccgtgcccgaggagtttgcctttgccatctgctttgatgcccctggagtgcgcccacacctgctggccgcagaagggccggcggccc

SEQ ID NO: 131829 - DNA, 1619 bp, Homo sapiens
  Payload ID: 5733
  Gene Symbol: FAM110A
  Gene Name: family with sequence similarity 110, member A
  Uniprot ID: Q9BQ89
  ENST ID: ENST00000246100
  CDS Start-End: 145-1032
ctttacaagtatgaactcatttaattccctcaactctgtgatataagcagtggccggtgtccagctgcctactttctgcccggatctctggctcctcatctctccggtctccgcagactaaagccctcgggatatgcagcagccatgcctgtgcacacgctgagccccggagccccgtccgcccccgccctaccttgccgcctgcggaccagggtccctggctacctgctacgggggccggcagatggtggagcccggaaaccgagcgctgtggagcgcctggaggccgacaaggccaagtacgtcaagagcctgcacgtggccaacacccgccaggagcctgtgcagcccctgctgtccaaacagccgctctttagccctgagactcgccgcacagtgctcacgcccagccgccgagccctgcctggcccctgccgacggccccagctggacctggacatcctcagcagcctcatcgacttgtgtgacagccccgtgtcccctgccgaggccagccgcactcctggacgggccgagggagccggccgtcctcccccagccacccctccgcgaccgccgcccagtacctctgcggtccgccgggtggacgtccgccccctgcccgcctcgcctgcccggccctgcccatcacccggccctgccgccgcctccagcccagcccggccgccgggtttgcaacgctccaagtcggacttgagcgagcgcttttctagggcagccgctgatctcgagcgcttttttaacttctgcggcctggacccggaggaggcgagagggttgggtgtggcccacctggcacgggccagctcggatatcgtgtccctggcagggcccagtgctgggccgggcagctctgaagggggctgctcccgccgcagctcggtgactgttgaggagcgggcccgggagcgcgttccctatggcgtgtcggtggtggagcgcaatgcccgcgtgatcaagtggttgtatgggctaaggcaggctcgggagagcccagcagctgaaggctaggcgccactgggcctggaattcgccacaggacggatcttacagaggcaagtggtccctggacctctcttgcatccattctctagacggccgtgtcagaggctccaccctgttgtgaacttggtatggaggcaaaggcttagaggctggaccagcattgttgggcaaggactgactctccaagggttttgttcttggctttggacacctgagaaccccctcctcccctcccccaatacaaggtttttgacatgagtgtactcctgcttagttcctcttgtggggctgcatttgcggtgctttgccctccccactgtgagtgaggggccaagggatctcctcaatcctgtctccccagcggctctgtttcctccttccttccttggcctctgtcctttgctgacttcctcttccttacccagcagaactcaccctggggtcggggcagtggggaggggcctatccactgctcttcctagtccttggcagctggcctaggtgggcagactataggagggactggttaggagtctgcattgctttgacttccctctccttggttaataaacacaaatgcttgtttctcaagg

SEQ ID NO: 131830 - DNA, 1856 bp, Homo sapiens
  Payload ID: 5733
  Gene Symbol: FAM110A
  Gene Name: family with sequence similarity 110, member A
  Uniprot ID: Q9BQ89
  ENST ID: ENST00000304189
  CDS Start-End: 382-1269
cacccgctcagctcgaccgcggagggcagctccaaaggggaccccaaaggtgcccacgcggggctggggcctcctgggcgtcgttgggagcggccactaccggcccgggtccgagctgtcagcctctccaaagcctgcgcgagaggagccgggacacgcctagcgcgggctccaggtggctgaccacgtccacgaccacatctgcctctaaactggaattcggttgctgacccagccccagcctcggctttcttgtcagcaccagggggcacagaacaccgtctcagtggccggtgtccagctgcctactttctgcccggatctctggctcctcatctctccggtctccgcagactaaagccctcgggatatgcagcagccatgcctgtgcacacgctgagccccggagccccgtccgcccccgccctaccttgccgcctgcggaccagggtccctggctacctgctacgggggccggcagatggtggagcccggaaaccgagcgctgtggagcgcctggaggccgacaaggccaagtacgtcaagagcctgcacgtggccaacacccgccaggagcctgtgcagcccctgctgtccaaacagccgctctttagccctgagactcgccgcacagtgctcacgcccagccgccgagccctgcctggcccctgccgacggccccagctggacctggacatcctcagcagcctcatcgacttgtgtgacagccccgtgtcccctgccgaggccagccgcactcctggacgggccgagggagccggccgtcctcccccagccacccctccgcgaccgccgcccagtacctctgcggtccgccgggtggacgtccgccccctgcccgcctcgcctgcccggccctgcccatcacccggccctgccgccgcctccagcccagcccggccgccgggtttgcaacgctccaagtcggacttgagcgagcgcttttctagggcagccgctgatctcgagcgcttttttaacttctgcggcctggacccggaggaggcgagagggttgggtgtggcccacctggcacgggccagctcggatatcgtgtccctggcagggcccagtgctgggccgggcagctctgaagggggctgctcccgccgcagctcggtgactgttgaggagcgggcccgggagcgcgttccctatggcgtgtcggtggtggagcgcaatgcccgcgtgatcaagtggttgtatgggctaaggcaggctcgggagagcccagcagctgaaggctaggcgccactgggcctggaattcgccacaggacggatcttacagaggcaagtggtccctggacctctcttgcatccattctctagacggccgtgtcagaggctccaccctgttgtgaacttggtatggaggcaaaggcttagaggctggaccagcattgttgggcaaggactgactctccaagggttttgttcttggctttggacacctgagaaccccctcctcccctcccccaatacaaggtttttgacatgagtgtactcctgcttagttcctcttgtggggctgcatttgcggtgctttgccctccccactgtgagtgaggggccaagggatctcctcaatcctgtctccccagcggctctgtttcctccttccttccttggcctctgtcctttgctgacttcctcttccttacccagcagaactcaccctggggtcggggcagtggggaggggcctatccactgctcttcctagtccttggcagctggcctaggtgggcagactataggagggactggttaggagtctgcattgctttgacttccctctccttggttaataaacacaaatgcttgtttctcaagg

SEQ ID NO: 131831 - DNA, 1737 bp, Homo sapiens
  Payload ID: 5733
  Gene Symbol: FAM110A
  Gene Name: family with sequence similarity 110, member A
  Uniprot ID: Q9BQ89
  ENST ID: ENST00000381939
  CDS Start-End: 263-1150
tcagctcgaccgcggagggcagctccaaaggggaccccaaaggtgcccacgcggggctggggcctcctgggcgtcgttgggagcggccactaccggcccgggtccgagctgtcagcctctccaaagcctgcgcgagaggagccgggacacgcctagcgcgggctccagtggccggtgtccagctgcctactttctgcccggatctctggctcctcatctctccggtctccgcagactaaagccctcgggatatgcagcagccatgcctgtgcacacgctgagccccggagccccgtccgcccccgccctaccttgccgcctgcggaccagggtccctggctacctgctacgggggccggcagatggtggagcccggaaaccgagcgctgtggagcgcctggaggccgacaaggccaagtacgtcaagagcctgcacgtggccaacacccgccaggagcctgtgcagcccctgctgtccaaacagccgctctttagccctgagactcgccgcacagtgctcacgcccagccgccgagccctgcctggcccctgccgacggccccagctggacctggacatcctcagcagcctcatcgacttgtgtgacagccccgtgtcccctgccgaggccagccgcactcctggacgggccgagggagccggccgtcctcccccagccacccctccgcgaccgccgcccagtacctctgcggtccgccgggtggacgtccgccccctgcccgcctcgcctgcccggccctgcccatcacccggccctgccgccgcctccagcccagcccggccgccgggtttgcaacgctccaagtcggacttgagcgagcgcttttctagggcagccgctgatctcgagcgcttttttaacttctgcggcctggacccggaggaggcgagagggttgggtgtggcccacctggcacgggccagctcggatatcgtgtccctggcagggcccagtgctgggccgggcagctctgaagggggctgctcccgccgcagctcggtgactgttgaggagcgggcccgggagcgcgttccctatggcgtgtcggtggtggagcgcaatgcccgcgtgatcaagtggttgtatgggctaaggcaggctcgggagagcccagcagctgaaggctaggcgccactgggcctggaattcgccacaggacggatcttacagaggcaagtggtccctggacctctcttgcatccattctctagacggccgtgtcagaggctccaccctgttgtgaacttggtatggaggcaaaggcttagaggctggaccagcattgttgggcaaggactgactctccaagggttttgttcttggctttggacacctgagaaccccctcctcccctcccccaatacaaggtttttgacatgagtgtactcctgcttagttcctcttgtggggctgcatttgcggtgctttgccctccccactgtgagtgaggggccaagggatctcctcaatcctgtctccccagcggctctgtttcctccttccttccttggcctctgtcctttgctgacttcctcttccttacccagcagaactcaccctggggtcggggcagtggggaggggcctatccactgctcttcctagtccttggcagctggcctaggtgggcagactataggagggactggttaggagtctgcattgctttgacttccctctccttggttaataaacacaaatgcttgtttctcaagg

SEQ ID NO: 131832 - DNA, 1809 bp, Homo sapiens
  Payload ID: 5733
  Gene Symbol: FAM110A
  Gene Name: family with sequence similarity 110, member A
  Uniprot ID: Q9BQ89
  ENST ID: ENST00000381941
  CDS Start-End: 335-1222
acttccccttccacggcgccccagggactttccctgcggtgggggccttcgacagtgagggccacccgctcagctcgaccgcggagggcagctccaaaggggaccccaaaggtgcccacgcggggctggggcctcctgggcgtcgttgggagcggccactaccggcccgggtccgagctgtcagcctctccaaagcctgcgcgagaggagccgggacacgcctagcgcgggctccagcagtggccggtgtccagctgcctactttctgcccggatctctggctcctcatctctccggtctccgcagactaaagccctcgggatatgcagcagccatgcctgtgcacacgctgagccccggagccccgtccgcccccgccctaccttgccgcctgcggaccagggtccctggctacctgctacgggggccggcagatggtggagcccggaaaccgagcgctgtggagcgcctggaggccgacaaggccaagtacgtcaagagcctgcacgtggccaacacccgccaggagcctgtgcagcccctgctgtccaaacagccgctctttagccctgagactcgccgcacagtgctcacgcccagccgccgagccctgcctggcccctgccgacggccccagctggacctggacatcctcagcagcctcatcgacttgtgtgacagccccgtgtcccctgccgaggccagccgcactcctggacgggccgagggagccggccgtcctcccccagccacccctccgcgaccgccgcccagtacctctgcggtccgccgggtggacgtccgccccctgcccgcctcgcctgcccggccctgcccatcacccggccctgccgccgcctccagcccagcccggccgccgggtttgcaacgctccaagtcggacttgagcgagcgcttttctagggcagccgctgatctcgagcgcttttttaacttctgcggcctggacccggaggaggcgagagggttgggtgtggcccacctggcacgggccagctcggatatcgtgtccctggcagggcccagtgctgggccgggcagctctgaagggggctgctcccgccgcagctcggtgactgttgaggagcgggcccgggagcgcgttccctatggcgtgtcggtggtggagcgcaatgcccgcgtgatcaagtggttgtatgggctaaggcaggctcgggagagcccagcagctgaaggctaggcgccactgggcctggaattcgccacaggacggatcttacagaggcaagtggtccctggacctctcttgcatccattctctagacggccgtgtcagaggctccaccctgttgtgaacttggtatggaggcaaaggcttagaggctggaccagcattgttgggcaaggactgactctccaagggttttgttcttggctttggacacctgagaaccccctcctcccctcccccaatacaaggtttttgacatgagtgtactcctgcttagttcctcttgtggggctgcatttgcggtgctttgccctccccactgtgagtgaggggccaagggatctcctcaatcctgtctccccagcggctctgtttcctccttccttccttggcctctgtcctttgctgacttcctcttccttacccagcagaactcaccctggggtcggggcagtggggaggggcctatccactgctcttcctagtccttggcagctggcctaggtgggcagactataggagggactggttaggagtctgcattgctttgacttccctctccttggttaataaacacaaatgcttgtttctcaagg

SEQ ID NO: 131833 - DNA, 1614 bp, Homo sapiens
  Payload ID: 5733
  Gene Symbol: FAM110A
  Gene Name: family with sequence similarity 110, member A
  Uniprot ID: Q9BQ89
  ENST ID: ENST00000541082
  CDS Start-End: 140-1027
ccgggccggaggagcgcaggccagcggcgcgggcgcagccggcagtggccggtgtccagctgcctactttctgcccggatctctggctcctcatctctccggtctccgcagactaaagccctcgggatatgcagcagccatgcctgtgcacacgctgagccccggagccccgtccgcccccgccctaccttgccgcctgcggaccagggtccctggctacctgctacgggggccggcagatggtggagcccggaaaccgagcgctgtggagcgcctggaggccgacaaggccaagtacgtcaagagcctgcacgtggccaacacccgccaggagcctgtgcagcccctgctgtccaaacagccgctctttagccctgagactcgccgcacagtgctcacgcccagccgccgagccctgcctggcccctgccgacggccccagctggacctggacatcctcagcagcctcatcgacttgtgtgacagccccgtgtcccctgccgaggccagccgcactcctggacgggccgagggagccggccgtcctcccccagccacccctccgcgaccgccgcccagtacctctgcggtccgccgggtggacgtccgccccctgcccgcctcgcctgcccggccctgcccatcacccggccctgccgccgcctccagcccagcccggccgccgggtttgcaacgctccaagtcggacttgagcgagcgcttttctagggcagccgctgatctcgagcgcttttttaacttctgcggcctggacccggaggaggcgagagggttgggtgtggcccacctggcacgggccagctcggatatcgtgtccctggcagggcccagtgctgggccgggcagctctgaagggggctgctcccgccgcagctcggtgactgttgaggagcgggcccgggagcgcgttccctatggcgtgtcggtggtggagcgcaatgcccgcgtgatcaagtggttgtatgggctaaggcaggctcgggagagcccagcagctgaaggctaggcgccactgggcctggaattcgccacaggacggatcttacagaggcaagtggtccctggacctctcttgcatccattctctagacggccgtgtcagaggctccaccctgttgtgaacttggtatggaggcaaaggcttagaggctggaccagcattgttgggcaaggactgactctccaagggttttgttcttggctttggacacctgagaaccccctcctcccctcccccaatacaaggtttttgacatgagtgtactcctgcttagttcctcttgtggggctgcatttgcggtgctttgccctccccactgtgagtgaggggccaagggatctcctcaatcctgtctccccagcggctctgtttcctccttccttccttggcctctgtcctttgctgacttcctcttccttacccagcagaactcaccctggggtcggggcagtggggaggggcctatccactgctcttcctagtccttggcagctggcctaggtgggcagactataggagggactggttaggagtctgcattgctttgacttccctctccttggttaataaacacaaatgcttgtttctcaagg

SEQ ID NO: 131834 - DNA, 1328 bp, Homo sapiens
  Payload ID: 5733
  Gene Symbol: FAM110A
  Gene Name: family with sequence similarity 110, member A
  ENST ID: ENST00000505691
  CDS Start-End: 1-569
tcagcagcctcatcgacttgtgtgacagccccgtgtcccctgccgaggccagccgcactcctggacgggccgagggagccggccgtcctcccccagccacccctccgcgaccgccgcccagtacctctgcggtccgccgggtggacgtccgccccctgcccgcctcgcctgcccggccctgcccatcacccggccctgccgccgcctccagcccagcccggccgccgggtttgcaacgctccaagtcggacttgagcgagcgcttttctagggcagccgctgatctcgagcgcttttttaacttctgcggcctggacccggaggaggcgagagggttgggtgtggcccacctggcacgggccagctcggatatcgtgtccctggcagggcccagtgctgggccgggcagctctgaagggggctgctcccgccgcagctcggtgactgttgaggagcgggcccgggagcgcgttccctatggcgtgtcggtggtggagcgcaatgcccgcgtgatcaagtggttgtatgggctaaggcaggctcgggagagcccagcagctgaaggctaggcgccactgggcctggaattcgccacaggacggatcttacagagcctccaggtgggtgtatggacactccaaaacagccatccctgtcaatgaatcagcctgcagggactgaattcattccttcattcatcaatatccattgagcacctactgtgtgccaaacactcttctaggaactgaagatgcaacagaaaacaaaacagataaaaatccctgccctcgaggagctgacattccagaggggacacagacaatacttgccagagtgaaaatgctaaggagaaaaatgaagcagggaaggatggggaactagagattttttttcctttttttattgaggttgaattgataaacaataaaattggcccattttaggtgtacagttggatgcattttgacagttgtatggcactacagacaagtgctagaattcctgtatcatcccaccatgttccttcacgccccccacagtcagcccctgactcccacccgctcccacccgaagaaactacagatcagttttctttcactgtagatcagctttgtctttcccagagttcatgcaaatggaatctggcttctctcagtcagcatcatggacttggttgagattcgcccgtgttgctgagtgtatctgtagcttgttcctttttactgacgagtagtattccacagtgtggatgcactgtattttgtttattcatccaacttgttgacggacatacaggttgttcccatttcttggctattacaaataaa

SEQ ID NO: 131835 - DNA, 3438 bp, Homo sapiens
  Payload ID: 5734
  Gene Symbol: FAM110B
  Gene Name: family with sequence similarity 110, member B
  Uniprot ID: Q8TC76
  ENST ID: ENST00000361488
  CDS Start-End: 881-1993
actcggtgcagaccgaaccatcgcggccgccgccagccgggcccttcgcggccgcgcgtcctgggcccgttccgccagccccgtctgctctctacccgcggccccgcggcggcgaccgtgaacactcggcggcccctacagcccgctctcggcccttcgtccctcgcgggccccgactctccctccttgcagtcccccggagcctggctcccggctcgggccgcaccgccagggactggggtgagcggcccagaaatctccaaattggacatccagagcagcattcttgttctgtctacgtcttgaattagaaactatcaagctctgtaagtcctgaaaaggaaataaaaggtgcgtccctacccaagaggagaggtggccagtaaatgtcagctgaggcaccgaaggctgcgatgcaccagcccggtgccctgtgaggacggccacatcaatagtggtaacactcacaatttcctgctgcagagagcattttaagaaaggacagcattcctgtgacctctgcctaccatccataaaatactcattcccctctcagctctgcctgcagttgaacacaaagacctggaggagactcccacctccttcagggagaagaaaggaggcagcgaagcagattaaaggaacttgtggcttgtggcctttttgtgcaagggccgcctggaaggggagaaaagtgtatgaaagccaccgtggcggttaatgagctgtgagatgaggcgctgctgcggccgctgctgctgacactcgctcccaggctgcacccgccgcccttggcgcttcatgtacatgtgtctattcaggccttgcggaggcgcccagaagagcatccaacacggctgccggggaaagaccgcccaccatgcccacggagaccctacagacaggtagcatggtgaagccggtcagccccgcgggcaccttcacctctgctgtgcccctgcgcatcctgaacaaggggccagactacttccgcaggcaggccgagcccaaccccaagaggctcagcgccgtggagaggctggaggccgacaaggccaagtacgtcaagagccaggaggtgatcaacgccaagcaggagcccgtgaagcccgccgtgctggccaagcccccggtgtgcccggctgccaagcgcgcactgggcagccccacgctcaaagtgttcggcaaccacgccaagaccgagagcggcgtgcagagggagaacctgaagctggagatcctgaagaacatcatcaatagctccgagggctctagctcgggctcggggcacaagcacagctcccgcaactggccgccccaccggtcggaagccactgacctgcaccgtcactccttcgcggagtccctgaaggtctaccccacgcagggccgcaggagcccgcaggagggcggctcccacgtgggcaggagactgctggagcagtcagccgagtccttcctccacgtgtcccacagctcttcggacatccgcaaggtgaccagcgtgaagcccctcaaggccatcccctgcagtagctctgcccctcccctgcctcccaagcccaaaatcgcagccatcgcctccatgaagtcccccgaggccgaccctgtggaaccagcttgtggagtcagccgaagaccctccctccagcggtctaagtcagacttgagtgacagatatttccgagtggacgcggacgtggagaggttcttcaactactgtggactggacccggaagagctggaaaacctgggaatggaaaactttgcaagggctaattctgacataatatccctcaacttccgcagcgcaagcatgatcagctcagactgtgaacagtctcaggacagtaacagtgaccttagaaatgatgacagtgccaatgaccgcgtgccgtatggcatttctgccatcgaaagaaatgctagaatcatcaagtggttatatagcatcaaacaagctagagagtcacagaaggtctcccatgtgtaagacagtgcgtggaaaggagggagcgtgggtctctgtgcttacgcagttgtgaaggttgtgaggtctccttgaagtgttgtgagcttctccactctttgtgttgcttgttgtgcaatgttttcaagttgcatgcttgtcaacatggggactgacctggcttccacgtcaccatcgctacagagcctggctgaacacgcgtcatctgccaaaagtttcaggccagaatctaattagggctttgctcgtaagcaaaactgtttacatgaaaatggtatacaacttcttcgatatttatgtggttcttgtgtttttatatcccgcgctattgtgtcttaattaaaagttttatcaactggcttttaagttgagagcagaatctttttgaaataaaaagccactttgcctacatgtgagactattccagtgggacagtaaatgggatctgctaccaaacagataatgactgaccgaacatagaaccaggctgggttttctgtggaataaagtggtgagcctgacgttaatcgtttacatgttgaaattctcttgccacttagtgaagcagtcattggggtaacaatgctacgttttgtgtccgattcagtgtgtaaacgttggtggttctatgtaatactgaccccaaggaaagacgatcagatacaaagaaagatggttaaatctaggaggttgggtgtttgggggttttgttgatgttgttctgattgggataattcagaaattcctaatattatctttcgacagaatgaccaccctaaaacaaatactgaatgcctttaaaaaaaaaaaaagttgtggttttttgttttttttttttttttttttggtcgagaactactaatttcatgctatttctttctctctccctttgttgttatttgatttgggggaagggagtgaggcttgtgcagatttgagctatctgaagacatgaacagaagtcaaataccagccatatcagtagagccttccattcaaaagtgaacacacttggtagctgaaccatatctgagcagcgtgattctgttgtcttgcatatgttattctctcaggctgtggatctttgttacagctctaggaaactgtagaaatacaatgctatgtagcttttccaccccatggtctctagtgctgcctatcaacttgtccccttttttcccaataacctgtcttccaggtggtacagttagctgtcactcagctgacaccatgatgtggcagcagagagggaaacctacaagtggtttgcctcattgcctttgccacatctgaagttctcagcagcactaccttagacttcatgagctaataggaaactttttatggtgtaaatgctgtaagactttgtacatacttcagttgttatgaaatctttaaagaaaaaaagaaaaagttacgctaataaattgctgtggtgcaggcactaa

SEQ ID NO: 131836 - DNA, 3760 bp, Homo sapiens
  Payload ID: 5735
  Gene Symbol: FAM110C
  Gene Name: family with sequence similarity 110, member C
  Uniprot ID: Q1W6H9
  ENST ID: ENST00000327669
  CDS Start-End: 1-966
atgcgcgccctggcggccctgagcgcgcccccgaacgagcggctccttccccgggaccccgcggctacccgggaccccgacgccgcgcggccggcgcgcaggagcgcagtggagaggctggcggcggatcgcgccaagtatgtgcggggtcggccggggactggccggggcgtcgcttccgagggcagcggcccgggggcgatcaagtgcccggggaacgaccctgggcccccggcccgcgccccggccccggtggcgcgcagggctattgcgcggaagccgttgagaccggactcgctgatcatctaccggcagaaatgcgaattcgtgcgaggatcgggcgccgacggccccagggcaagcctggtgaagaagctcttccaggggccgggtaaggacaaggcgccggtgccccggacgggagacgagggcaaggccgggaacccggagacggtcccgaccactcctggccccgcggcggaccccgcaatccccgagaccccagccccagccgcgcggtccgcggcgccctccagtgtcccggccgcgccccctgggccagagccgcgggtggtgaggcgtcgggggctgcagcgctcacagtcggacctcagctcccgctattccgctgccttggccgagtctgacaccttcttccagtactgcggcctggaccccgaggtggtggaggccctggggagggagaacttcaccgcggggtcggactgtgtgaccctcaaggtgcgcagcgtgagcgtcgccacctccggcagcggcttctcccggcacagcggcggcgacgacgaggggctgcaggaggaggagctgatagagcaggtgcccagcaccacttcggtcatcgagaggaacgcccgcatcatcaagtggctgtacacctgtaagaaggccaaggagacccccagccaggagcagagccggacccgaggaagcaaaccttcccgatgatgaagacttcttgaaggatttcatgggtgatttgggatcccaggaccatttggctagtgtgcctaggtgaccacatgattgctgttttaccaggaatgcagcatcccattgacaaaacaagtgctctgagaaggtttaaaatactacagagaatatgggaacacagaccttgaaatttagctgagttgtaacagctgaaactccaagaggtgtcttccttgtttgaggtgaaactagtgttgcttccagagggcagctggaaaccgtaaagctgtttggaaatctttttgactgacttgctgacaaagaggtactgtgatgcattttaacaatatctaagttgatttttttttaaatcaaggaaaataaaaaccaagcatgaatgctatggtatgtgccccttttgaccatcctgggctgattaacatcatttaaatcaaagtaatcataaaaaggcatattctacttcaattatgtggtcaaataagagtaaacacacacactcacacatgctgaccccaattgccagagcattactgcactataaattacggttaattcccaaattatactactgtttatcttatttaacaagtcagaaagcacttttaaaataacttgagggctacaaggtcattctattaatgtcattctccattcgggttgtaggcatgtggaagtacccattaaaagataagttagagtttaaatactgataaacaaaaccttttattgcaactggacagtttctggagagttagcggaagaatcttggagtttcctttggtcagatgaatacaacatttcacttttgcagcactatttagaatgtactccatggttctcttgttcccaacttccaaaaagaacagaaaactttggtttacacagaacacgggcatctgaggcaggacctcttccctgccctttgatctgactcacacctccacatatgacgtaatcaacccaaatttgacaccaattcactcttttctgcaaagggcatattttgaaacaagggacagcctgagggcggctataatgagaatgttcatgggggttactgggtccctaattctgaacttgcttatgacacccagagtgaatagattcagattcagaaccttctgagaaataacccaaagaaaatttgttacccagccaattcttcgaaagcttaatatcaaaatatatcttttcaagaagaaaatcgttagagagaagaatgtggaggggagagaaatgggtttctcattgatatgatattttgttaaccatttcattttgaattattcaagttttggttaatattgtattcttttttcgtaactattttaccgtgagagtaggtcattgggttacttagatatttatttttacacagttattagtcttcagatagttttattttacttcatatgattttagtttttgtcagtataattttaaatcatgtttttcttggtcatctctttgtgtatattgtgtaattggattttcattgactgcaagtggagtgtttgccactcaattcagtactcagtactatggtgacttgttttcaaataagtctcagatacacatttagggagcctttgctggccgaatatagactctgtcaggacagcaggtcccctgatctaagaattttccccaatggttgctctaaaaatgctgctattttgctgttcactgtattgcacttagttaaaaagaagataatgtgaaagatgagagcagttttttaaaggatcttttcatatacccaattcccttattttcagatgtcccatcaattttagatatgaaagctttaagtaaaagtgtgtatgcctttctactgtcagaacaggatggatgcagcctgggtcagatttatttaagataaaaatcatgcagactcatcattcatatcataggtgaaaaatgtaaaaaccaaatggtttccactaaagccaccaagatcttttagaaatgtttgcacctttggtggtggcacaggaaaagagaagaattcagctggagtgaattctagaagtagatatcagaaacggggcatgaagaacaggggaactgggtggcatcagactcctaaagaagtgagttaattttccttcccttccattcagattcatgccacagctccatatcttgagtatgtgtaagaggtgagttccttcttcagccaggggcggtggctcatgcctttaatcccaatgctttgggaggccaaggtgggaggatcacttgtgccttggggttcaaggttgcagtgaaccatgattgcaccactgcactccagcctgagtgacagagcaagaccctgtctctaaaaatatatataaaaagtaaaactaaagaacttcttgcctaaacctgaattaccgcaatttgctgagtgactttgagaaaaatcagactgtttagttcagtcgggatgaaaagcttgcgattgcttcccacaagaatgggcaatagtgacggctgcaaggtacttttatttgttcatgaaagaacgacaatttttcaaaatgtaattaaacataatagaatgttttaaactactgggcactgaaactggaagaaaaaggaggctttattgaacattcccctttttcagttggttcaaagttcagcactgtggttatcattggtgatgccagaaaacattagtagacttagacaattgctatggcagtttctaaacagagctttttctatacactatttgcaactggagtgcaatattgtatattctgtgttaaagaaataaagtatttttatcatttattaa

SEQ ID NO: 131837 - DNA, 2858 bp, Homo sapiens
  Payload ID: 5736
  Gene Symbol: FAM110D
  Gene Name: family with sequence similarity 110, member D
  Uniprot ID: Q8TAY7
  ENST ID: ENST00000374268
  CDS Start-End: 188-1003
gagtgaggtttggctgccaccaaagttacttctagtccttgctgtccactcctgccctcagtctggacctgcccaaggacccctgcaattaggcctcccatgcagaggtcagtgagagcccaagccaattgctctaggccccgtggctggctacttatggggcactgtcctgaccagctctgctaagatgctcctggcccctccctccaccccgtccagaggacggacccccagcgccgtggagaggctggaagccgacaaagccaagtatgtcaagacgcaccaggtgatagctaggcgacaggagccagccctgcgtgggagtcctgggccgctcacgccgcacccctgcaacgagctggggccccctgcatcgcccaggacgcccaggccggtccgccggggaagcggcaggcggctgccgaggcctgattccctcatcttctaccgccagaagcgggactgcaaggcttcggtgaacaaagagaacgccaagggccagggtctggtgcggcgcctctttctgggtgccccgcgggacgctgccccgagcagcccggcctccacagagcgacctgcggcttcagggggttgggctgcgccccaggatgccccggaagcggcgggaaagcgggcgctgtgtcccacgtgctcgctgcccctgtcggagaaggagcgcttcttcaactactgcggcctggagcgcgcgctggtggaggtgctgggcgcagagcgcttctccccgcagagctggggagccgacgccagcccgcaggccggaacttcgccgccgcccggctccggggacgccagcgactggacatccagcgacaggggcgtggacagcccgggcggcgcgggcggcggcggcggctcggaggcagcgggctcggcgcgggaccggcgccccccggtgtcggtggtggagcgcaacgcgcgcgtcatccagtggctgtacggctgccagcgcgcccgcggaccgccgcgcgagtccgaggtgtgaccgccgcggctccggactggccccgggactggccccgggcacggaaaaggacacccctcttctggcgcgctgggtgcctttgcgtaagcccttccttctggaactcagtttcgcgtctgaaccttggggaggtggaacaagttgctgccgaaggcccttccctgctcccgcggcgaagggggagggagaggcctcttggtccctgtggagacccggtctggggagtcacgattggggtgggagatgagcaaacctgctgaataaagttaaaacgttatttaaatggggagctgaggaaggagcaaacgggttttcgcggttaaacccgtgggttttggaatgtgtgttcccggctgtgtgatcctgggcaagaacttgacctccctggacgcagcggcacccctcggttattaaggagggaggagtaggggatagaagtatttcaaaatagttgtaatgcgcatggcaaagtgcccagcatatagaaagtgctcaataaacgataactgctgtgacttctaccgaatgagtactaacactgttgtgatctccactggcctccaggtcgatccaaactagagctgggagctgggaataatgcgctttgggagcccgaggaggcgtctgctccagaaatctgggctccaccagatcctaaaaggccccattcccggagttttgctgccccagttgtggtcactgggtatgaagggctgagatccaacctttcggacacaaaaagaagggaaccgggccgggcgcggtggctcaggcctgtaatcccagcactttgggaggctgaggagggtagatcacgagatcaggagttcgagaccagcctggccaacatgggctctactaaaaatacaaaaattagctgagcttggaggcgcgcgcctgtaatcccagctactcgggaggctgaggcaggagaatcgcttgaatcccagaggcggaggttgcagtgagccgagatcgagccattgcactccagcctgggcaacagggccagactccgtctcaaaaaataaaaataaaaataaaaaaagaaaagaaggaaacctttcctgccagccggcaggctcctgccactgcctccctttcctgcaaggacacacaagttcgcctattttcatcacaggttcgcacctccaagcctgcatccttcatgcacctccttcctttgcctgggttgccgttccttttctctctgctcttccttctcttttttttttttttttttttttttttttttgagacggagtctcgctctgtcgcccaggctggagtgcagtggcgggatctcggctcactgcaagctccgcctcccgggttcacgccattctcctgcctcagcctcccaagtagctgggactacaggcgcccgccactacgcccggctaattttttgtatttttagtagagacggggtttcaccgttttagccgggatggtctcgatctcctgacctcgtgatccgcccgcctcggcctcccaaagtgctgggattacaggcgtgagccaccgcgcccggcccccttcttccttctcggagataacgtatattctcctccaggaagccgtcctgaatgcccccagtcagcctcacctgctctgagctcccaagtacagtcctatttttgggcctcaatttgtcaccttttgtgggacccgctggtactctgggttctctagttaatctttgacctttttcctagtacagggacggcgcacatagtagggccacaggcacagtttgttgaattaaatgaggctggagagggcgatggacgcagtcctctggagctctccaacttcctggaaagttgtaccttaaataaaaaacccatcctga

SEQ ID NO: 131838 - DNA, 3592 bp, Homo sapiens
  Payload ID: 5737
  Gene Symbol: FAM111A
  Gene Name: family with sequence similarity 111, member A
  Uniprot ID: Q96PZ2
  ENST ID: ENST00000361723
  CDS Start-End: 225-2060
ctagccccacctgctccgtttcccgcccagctggagctctggagcctttgcttcctcaaatacgagcgggaactgcgttgagcgctggattccaggccgagtgctggcgaggcgcgcagttctctgctgtttaaaaagtatccctgtgctttgaagatactgctataatttgaaaatttgaaattagtgtttcagctgaaccatccgttcatcttcaagccatcatgagctgtaagaagcagaggtcacggaagcactcagtcaatgaaaaatgtaatatgaaaatcgagcactatttttctccggtctctaaagagcaacagaataattgcagtacttctctaatgaggatggagtctagaggagacccaagagccacaactaatacccaggctcaaagattccattcacctaagaaaaatccagaagaccagaccatgccccaaaataggacaatatatgttaccttgaaggtaaaccacaggagaaaccaagatatgaaacttaagctcacacatagtgagaatagtagcttatatatggctctcaacactctccaggctgtcagaaaagagatagaaactcaccaaggccaagaaatgcttgtgcgtggcacagaaggaatcaaagagtacataaaccttggaatgcccctcagttgtttccctgaaggtggccaggtggtcattacattttcccaaagtaaaagtaagcagaaggaagataaccacatatttggcaggcaggacaaagcatcgactgaatgtgtcaaattttacattcatgcaattggaattgggaagtgtaaaagaaggattgttaaatgtgggaagcttcacaaaaaggggcgcaaactctgtgtttatgctttcaaaggagaaaccatcaaggatgcactgtgcaaggatggcagatttctttcctttctggagaatgatgattggaaactcattgaaaacaatgacaccattttagaaagcacccagccagttgatgaattagaaggcagatactttcaggttgaggttgagaaaagaatggtccccagtgcagcagcttctcagaatcctgagtcagagaaaagaaacacctgtgtgttgagagaacaaatcgtggctcagtaccccagtttgaaaagagaaagtgaaaaaatcattgaaaacttcaagaaaaaaatgaaagtaaaaaatggggaaacattatttgaattgcatagaacaacgtttgggaaagtaacaaaaaattcttcttcgattaaagtagtgaaacttcttgtacgtctcagtgactcagttgggtacttattctgggacagtgcaactacgggttacgccacctgctttgtttttaaaggattgttcattttaacttgtcggcatgtaatagatagcattgtgggagacggaatagagccaagtaagtgggcaaccataattggtcaatgtgtaagggtgacatttggttatgaagagctaaaagacaaggaaacaaactacttttttgttgaaccttggtttgagatacataatgaagagcttgactatgctgtcctgaaactgaaggaaaatggacaacaagtacctatggaactatataatggaattactcctgtgccacttagtgggttgatacatattattggccatccatatggagaaaaaaagcagattgatgcttgtgctgtgatccctcagggtcagcgagcaaagaaatgtcaggaacgtgttcagtctaaaaaagcagaaagtccagagtatgtccatatgtatactcaaagaagtttccagaaaatagttcacaaccctgatgtgattacctatgacactgaatttttctttggggcttccggctcccctgtgtttgattcaaaaggttcattggtggccatgcatgctgctggctttgcttatacttaccaaaatgagactcgtagtatcattgagtttggctctaccatggaatccatcctccttgatattaagcaaagacataaaccatggtatgaagaagtatttgtaaatcagcaggatgtagaaatgatgagtgatgaggacttgtgagaattcagtctactggatttaagggaatggcttatggagttgttatttcataggcattgaaaatggttttctaaactccaaaatggtcatcttatcaataataataatattgaccatttcctatctgccaggcatttttctaagcacatgaagaaattagtcctaacaacactatgagatggactataacttgcccaaattttttttttttttttgagactgagtctcactctgtcgcctgggctggagtacagtggtgcgatctcagctcactgcaacttccacctcccaggttcaagcgattcttatgcctcagtctcctgagcagctgggattacaggcaaacgccaccacacccagctaaatttttttttttttttttgtatttttagtagagacagggtttcaccatgttggtcaggcgggtctcgaactcctgacctcgtgatccacctgcctcggccttccaaagtgctgggattacaagtttgagccactgcacctggctaacttgccctattttaaagtcaagcaatgggaagaataacaagattatatagtaatcagtttcatgacactaaaagtcatatagtcatagggttttttcatctttcatatctttgcctaaattcatttgctacagtgcaggaaccaaaacttgttcatctcatgattccctacatctgacataaggaaagtaagtgctcagaaaaatgtgcaggtcaataagttgcaaaagttggggctgcaattaatgctaacataagagctaaatgcttgattagaaatgatctcaaaaccttttagaatttccaaaatcttcatattactgaaactgtcggaatatatgggtcttgaaattcagaagatgatagtcactcttcccatatttataggctattaaggcaagggatatcttaaacatcatattactttatttagatttctactactccaattattaatgttatgtatttctcattgttttacttcttcatggtattatgaagactatatagatgattcaaccaagcctgcaaatctccctcttgtggaattccactggacccaatctgttttccatttccattgcaatactactaaagccatacaatatcaagcaccctccctctaggtccagggactatcacagaagaagcaggcatgtaagattttaaggactggtttcgaggggtcgagtgtaggaaaacagcctgttgcattgtaagagtgatgtcatcttgaagagcagctggcatgatgactgctgtttgactcctgcataccaagatattctgcagcaatgtctttaaacagtgccggtagtacagataacccctcataaagatgcttatctaacctccccagtgttcaggtgtttcacaagaaagtctgagatatgactagctacacgttttgccaaaaatgcttgttatataaagggtacttttgggagggtgagtgccgccatttagtggctgctagaaacattgcttctgtttgtaagttcctattaaatgtttctttctgag

SEQ ID NO: 131839 - DNA, 3780 bp, Homo sapiens
  Payload ID: 5737
  Gene Symbol: FAM111A
  Gene Name: family with sequence similarity 111, member A
  Uniprot ID: Q96PZ2
  ENST ID: ENST00000420244
  CDS Start-End: 415-2250
ctccagcccggcccaggccagcctaccggcgactaggatgctttcgctttcgctctcgctttccaatactcgggactggggaaaccgggagaatagaagcaggcaaggaccgccgtgggcacggggtgtccccagcgcagccaatcggcttccgaagtaggtgagttgctgcctgaagagaaaagacaaactccagtatctttcattccattggccagacgcgccattccccaagtgagttctgttctccaaccaaagtgctggattccaagggactggaagggaaagtccctaaaaatcacgagttcaggcgtctgagacttggtgggaacggaccttcctcttaggttctctgctgtttaaaaagtatccctgtgtgtttcagctgaaccatccgttcatcttcaagccatcatgagctgtaagaagcagaggtcacggaagcactcagtcaatgaaaaatgtaatatgaaaatcgagcactatttttctccggtctctaaagagcaacagaataattgcagtacttctctaatgaggatggagtctagaggagacccaagagccacaactaatacccaggctcaaagattccattcacctaagaaaaatccagaagaccagaccatgccccaaaataggacaatatatgttaccttgaaggtaaaccacaggagaaaccaagatatgaaacttaagctcacacatagtgagaatagtagcttatatatggctctcaacactctccaggctgtcagaaaagagatagaaactcaccaaggccaagaaatgcttgtgcgtggcacagaaggaatcaaagagtacataaaccttggaatgcccctcagttgtttccctgaaggtggccaggtggtcattacattttcccaaagtaaaagtaagcagaaggaagataaccacatatttggcaggcaggacaaagcatcgactgaatgtgtcaaattttacattcatgcaattggaattgggaagtgtaaaagaaggattgttaaatgtgggaagcttcacaaaaaggggcgcaaactctgtgtttatgctttcaaaggagaaaccatcaaggatgcactgtgcaaggatggcagatttctttcctttctggagaatgatgattggaaactcattgaaaacaatgacaccattttagaaagcacccagccagttgatgaattagaaggcagatactttcaggttgaggttgagaaaagaatggtccccagtgcagcagcttctcagaatcctgagtcagagaaaagaaacacctgtgtgttgagagaacaaatcgtggctcagtaccccagtttgaaaagagaaagtgaaaaaatcattgaaaacttcaagaaaaaaatgaaagtaaaaaatggggaaacattatttgaattgcatagaacaacgtttgggaaagtaacaaaaaattcttcttcgattaaagtagtgaaacttcttgtacgtctcagtgactcagttgggtacttattctgggacagtgcaactacgggttacgccacctgctttgtttttaaaggattgttcattttaacttgtcggcatgtaatagatagcattgtgggagacggaatagagccaagtaagtgggcaaccataattggtcaatgtgtaagggtgacatttggttatgaagagctaaaagacaaggaaacaaactacttttttgttgaaccttggtttgagatacataatgaagagcttgactatgctgtcctgaaactgaaggaaaatggacaacaagtacctatggaactatataatggaattactcctgtgccacttagtgggttgatacatattattggccatccatatggagaaaaaaagcagattgatgcttgtgctgtgatccctcagggtcagcgagcaaagaaatgtcaggaacgtgttcagtctaaaaaagcagaaagtccagagtatgtccatatgtatactcaaagaagtttccagaaaatagttcacaaccctgatgtgattacctatgacactgaatttttctttggggcttccggctcccctgtgtttgattcaaaaggttcattggtggccatgcatgctgctggctttgcttatacttaccaaaatgagactcgtagtatcattgagtttggctctaccatggaatccatcctccttgatattaagcaaagacataaaccatggtatgaagaagtatttgtaaatcagcaggatgtagaaatgatgagtgatgaggacttgtgagaattcagtctactggatttaagggaatggcttatggagttgttatttcataggcattgaaaatggttttctaaactccaaaatggtcatcttatcaataataataatattgaccatttcctatctgccaggcatttttctaagcacatgaagaaattagtcctaacaacactatgagatggactataacttgcccaaattttttttttttttttgagactgagtctcactctgtcgcctgggctggagtacagtggtgcgatctcagctcactgcaacttccacctcccaggttcaagcgattcttatgcctcagtctcctgagcagctgggattacaggcaaacgccaccacacccagctaaatttttttttttttttttgtatttttagtagagacagggtttcaccatgttggtcaggcgggtctcgaactcctgacctcgtgatccacctgcctcggccttccaaagtgctgggattacaagtttgagccactgcacctggctaacttgccctattttaaagtcaagcaatgggaagaataacaagattatatagtaatcagtttcatgacactaaaagtcatatagtcatagggttttttcatctttcatatctttgcctaaattcatttgctacagtgcaggaaccaaaacttgttcatctcatgattccctacatctgacataaggaaagtaagtgctcagaaaaatgtgcaggtcaataagttgcaaaagttggggctgcaattaatgctaacataagagctaaatgcttgattagaaatgatctcaaaaccttttagaatttccaaaatcttcatattactgaaactgtcggaatatatgggtcttgaaattcagaagatgatagtcactcttcccatatttataggctattaaggcaagggatatcttaaacatcatattactttatttagatttctactactccaattattaatgttatgtatttctcattgttttacttcttcatggtattatgaagactatatagatgattcaaccaagcctgcaaatctccctcttgtggaattccactggacccaatctgttttccatttccattgcaatactactaaagccatacaatatcaagcaccctccctctaggtccagggactatcacagaagaagcaggcatgtaagattttaaggactggtttcgaggggtcgagtgtaggaaaacagcctgttgcattgtaagagtgatgtcatcttgaagagcagctggcatgatgactgctgtttgactcctgcataccaagatattctgcagcaatgtctttaaacagtgccggtagtacagataacccctcataaagatgcttatctaacctccccagtgttcaggtgtttcacaagaaagtctgagatatgactagctacacgttttgccaaaaatgcttgttatataaagggtacttttgggagggtgagtgccgccatttagtggctgctagaaacattgcttctgtttgtaagttcctattaaatgtttctttctg

SEQ ID NO: 131840 - DNA, 3996 bp, Homo sapiens
  Payload ID: 5737
  Gene Symbol: FAM111A
  Gene Name: family with sequence similarity 111, member A
  Uniprot ID: Q96PZ2
  ENST ID: ENST00000531147
  CDS Start-End: 629-2464
gactatcatccctagcaaactttccagatttctttttaaaatctcattccaagtttctttcctcagctctatcctcaccacttccctgtaattttatctccccttgccatcttcatcttaaatgaataacagattttaacatcaatgtaactagaacagctttttgaaatttccaactgaaaattattctattatttatacttgcatttgaattccatctctgccacatagctctggccttgggcagttcgtctaccttctctaagctatactttccccatcagcaaagtgtagctatacctaatttgcatagcatccgcaggaatttgcagctagagataattttcataaagtgtttagtataattttcatgaagtgcctgacacgcagtgttctcgaaaagagagcttttattgttaaggtgattatagttggtgaataaactatctatttgctaaggtaccatctccagggagagcaaggttggagcctaaggggaaagatgggacgcaggacaccagctaatcttttcctctgtacaattaatgacagctttgaagatactgctataatttgaaaatttgaaattagtgtttcagctgaaccatccgttcatcttcaagccatcatgagctgtaagaagcagaggtcacggaagcactcagtcaatgaaaaatgtaatatgaaaatcgagcactatttttctccggtctctaaagagcaacagaataattgcagtacttctctaatgaggatggagtctagaggagacccaagagccacaactaatacccaggctcaaagattccattcacctaagaaaaatccagaagaccagaccatgccccaaaataggacaatatatgttaccttgaaggtaaaccacaggagaaaccaagatatgaaacttaagctcacacatagtgagaatagtagcttatatatggctctcaacactctccaggctgtcagaaaagagatagaaactcaccaaggccaagaaatgcttgtgcgtggcacagaaggaatcaaagagtacataaaccttggaatgcccctcagttgtttccctgaaggtggccaggtggtcattacattttcccaaagtaaaagtaagcagaaggaagataaccacatatttggcaggcaggacaaagcatcgactgaatgtgtcaaattttacattcatgcaattggaattgggaagtgtaaaagaaggattgttaaatgtgggaagcttcacaaaaaggggcgcaaactctgtgtttatgctttcaaaggagaaaccatcaaggatgcactgtgcaaggatggcagatttctttcctttctggagaatgatgattggaaactcattgaaaacaatgacaccattttagaaagcacccagccagttgatgaattagaaggcagatactttcaggttgaggttgagaaaagaatggtccccagtgcagcagcttctcagaatcctgagtcagagaaaagaaacacctgtgtgttgagagaacaaatcgtggctcagtaccccagtttgaaaagagaaagtgaaaaaatcattgaaaacttcaagaaaaaaatgaaagtaaaaaatggggaaacattatttgaattgcatagaacaacgtttgggaaagtaacaaaaaattcttcttcgattaaagtagtgaaacttcttgtacgtctcagtgactcagttgggtacttattctgggacagtgcaactacgggttacgccacctgctttgtttttaaaggattgttcattttaacttgtcggcatgtaatagatagcattgtgggagacggaatagagccaagtaagtgggcaaccataattggtcaatgtgtaagggtgacatttggttatgaagagctaaaagacaaggaaacaaactacttttttgttgaaccttggtttgagatacataatgaagagcttgactatgctgtcctgaaactgaaggaaaatggacaacaagtacctatggaactatataatggaattactcctgtgccacttagtgggttgatacatattattggccatccatatggagaaaaaaagcagattgatgcttgtgctgtgatccctcagggtcagcgagcaaagaaatgtcaggaacgtgttcagtctaaaaaagcagaaagtccagagtatgtccatatgtatactcaaagaagtttccagaaaatagttcacaaccctgatgtgattacctatgacactgaatttttctttggggcttccggctcccctgtgtttgattcaaaaggttcattggtggccatgcatgctgctggctttgcttatacttaccaaaatgagactcgtagtatcattgagtttggctctaccatggaatccatcctccttgatattaagcaaagacataaaccatggtatgaagaagtatttgtaaatcagcaggatgtagaaatgatgagtgatgaggacttgtgagaattcagtctactggatttaagggaatggcttatggagttgttatttcataggcattgaaaatggttttctaaactccaaaatggtcatcttatcaataataataatattgaccatttcctatctgccaggcatttttctaagcacatgaagaaattagtcctaacaacactatgagatggactataacttgcccaaattttttttttttttttgagactgagtctcactctgtcgcctgggctggagtacagtggtgcgatctcagctcactgcaacttccacctcccaggttcaagcgattcttatgcctcagtctcctgagcagctgggattacaggcaaacgccaccacacccagctaaatttttttttttttttttgtatttttagtagagacagggtttcaccatgttggtcaggcgggtctcgaactcctgacctcgtgatccacctgcctcggccttccaaagtgctgggattacaagtttgagccactgcacctggctaacttgccctattttaaagtcaagcaatgggaagaataacaagattatatagtaatcagtttcatgacactaaaagtcatatagtcatagggttttttcatctttcatatctttgcctaaattcatttgctacagtgcaggaaccaaaacttgttcatctcatgattccctacatctgacataaggaaagtaagtgctcagaaaaatgtgcaggtcaataagttgcaaaagttggggctgcaattaatgctaacataagagctaaatgcttgattagaaatgatctcaaaaccttttagaatttccaaaatcttcatattactgaaactgtcggaatatatgggtcttgaaattcagaagatgatagtcactcttcccatatttataggctattaaggcaagggatatcttaaacatcatattactttatttagatttctactactccaattattaatgttatgtatttctcattgttttacttcttcatggtattatgaagactatatagatgattcaaccaagcctgcaaatctccctcttgtggaattccactggacccaatctgttttccatttccattgcaatactactaaagccatacaatatcaagcaccctccctctaggtccagggactatcacagaagaagcaggcatgtaagattttaaggactggtttcgaggggtcgagtgtaggaaaacagcctgttgcattgtaagagtgatgtcatcttgaagagcagctggcatgatgactgctgtttgactcctgcataccaagatattctgcagcaatgtctttaaacagtgccggtagtacagataacccctcataaagatgcttatctaacctccccagtgttcaggtgtttcacaagaaagtctgagatatgactagctacacgttttgccaaaaatgcttgttatataaagggtacttttgggagggtgagtgccgccatttagtggctgctagaaacattgcttctgtttgtaagttcctattaaatgtttctttctgag

SEQ ID NO: 131841 - DNA, 423 bp, Homo sapiens
  Payload ID: 5737
  Gene Symbol: FAM111A
  Gene Name: family with sequence similarity 111, member A
  ENST ID: ENST00000531408
  CDS Start-End: 136-423
tcccgcccagctggagctctggagcctttgcttcctcaaatacgagcgggaactgcgttgagcgctggattccaggccgagtgctggcgaggcgcgcatgtttcagctgaaccatccgttcatcttcaagccatcatgagctgtaagaagcagaggtcacggaagcactcagtcaatgaaaaatgtaatatgaaaatcgagcactatttttctccggtctctaaagagcaacagaataattgcagtacttctctaatgaggatggagtctagaggagacccaagagccacaactaatacccaggctcaaagattccattcacctaagaaaaatccagaagaccagaccatgccccaaaataggacaatatatgttaccttgaaggtaaaccacaggagaaaccaagatatgaaacttaagctc

SEQ ID NO: 131842 - DNA, 4202 bp, Homo sapiens
  Payload ID: 5737
  Gene Symbol: FAM111A
  Gene Name: family with sequence similarity 111, member A
  Uniprot ID: Q96PZ2
  ENST ID: ENST00000533703
  CDS Start-End: 832-2667
tagtgctgcaagtccccttgtgtgctggggggagcggggcggcgtggtaggattggaagaggcttagagttggcctcgacccctgcccttgcccctggaaaggcagaaagtgggggttggggtgcggagaagcaggaagagagggagagtgaaggaggggaggaaagggagagaggaagagggagagtgaaggaggggaggaaagggagagaggcagagagggggaaggagagagggaaggaaggagagattgagagacagagaaattcctaaggggagctgtcaggtgggctggacatgggccccaggctgcactgctttatccctttgctgtaggaagtcaagcaagttctttaggtaagtagaaccttgatgtcaagtataaaacaggggttggtataggatagctaagagcactttatattttgatataatctgatttatcctggatactgaaaacaatgtagggagacggaggatattggagtgttttcttaacctcttgcccctttccactgtgattgctcaagtacatgcaaaattaatgtttctttctgcccattttattttcctttttttgtctgtgtctattaatcattcctaaagcacccggatcctctctcaaacttcgtaagatgagacatcatgaacagacacagtgaatccctagattttcttaatagttgggcaacaagttcttgcatttagggatgttgcaacatagcccagttccgcaattgtacattttctattttttttcctaggttctctgctgtttaaaaagtatccctgtgtgtttcagctgaaccatccgttcatcttcaagccatcatgagctgtaagaagcagaggtcacggaagcactcagtcaatgaaaaatgtaatatgaaaatcgagcactatttttctccggtctctaaagagcaacagaataattgcagtacttctctaatgaggatggagtctagaggagacccaagagccacaactaatacccaggctcaaagattccattcacctaagaaaaatccagaagaccagaccatgccccaaaataggacaatatatgttaccttgaaggtaaaccacaggagaaaccaagatatgaaacttaagctcacacatagtgagaatagtagcttatatatggctctcaacactctccaggctgtcagaaaagagatagaaactcaccaaggccaagaaatgcttgtgcgtggcacagaaggaatcaaagagtacataaaccttggaatgcccctcagttgtttccctgaaggtggccaggtggtcattacattttcccaaagtaaaagtaagcagaaggaagataaccacatatttggcaggcaggacaaagcatcgactgaatgtgtcaaattttacattcatgcaattggaattgggaagtgtaaaagaaggattgttaaatgtgggaagcttcacaaaaaggggcgcaaactctgtgtttatgctttcaaaggagaaaccatcaaggatgcactgtgcaaggatggcagatttctttcctttctggagaatgatgattggaaactcattgaaaacaatgacaccattttagaaagcacccagccagttgatgaattagaaggcagatactttcaggttgaggttgagaaaagaatggtccccagtgcagcagcttctcagaatcctgagtcagagaaaagaaacacctgtgtgttgagagaacaaatcgtggctcagtaccccagtttgaaaagagaaagtgaaaaaatcattgaaaacttcaagaaaaaaatgaaagtaaaaaatggggaaacattatttgaattgcatagaacaacgtttgggaaagtaacaaaaaattcttcttcgattaaagtagtgaaacttcttgtacgtctcagtgactcagttgggtacttattctgggacagtgcaactacgggttacgccacctgctttgtttttaaaggattgttcattttaacttgtcggcatgtaatagatagcattgtgggagacggaatagagccaagtaagtgggcaaccataattggtcaatgtgtaagggtgacatttggttatgaagagctaaaagacaaggaaacaaactacttttttgttgaaccttggtttgagatacataatgaagagcttgactatgctgtcctgaaactgaaggaaaatggacaacaagtacctatggaactatataatggaattactcctgtgccacttagtgggttgatacatattattggccatccatatggagaaaaaaagcagattgatgcttgtgctgtgatccctcagggtcagcgagcaaagaaatgtcaggaacgtgttcagtctaaaaaagcagaaagtccagagtatgtccatatgtatactcaaagaagtttccagaaaatagttcacaaccctgatgtgattacctatgacactgaatttttctttggggcttccggctcccctgtgtttgattcaaaaggttcattggtggccatgcatgctgctggctttgcttatacttaccaaaatgagactcgtagtatcattgagtttggctctaccatggaatccatcctccttgatattaagcaaagacataaaccatggtatgaagaagtatttgtaaatcagcaggatgtagaaatgatgagtgatgaggacttgtgagaattcagtctactggatttaagggaatggcttatggagttgttatttcataggcattgaaaatggttttctaaactccaaaatggtcatcttatcaataataataatattgaccatttcctatctgccaggcatttttctaagcacatgaagaaattagtcctaacaacactatgagatggactataacttgcccaaattttttttttttttttgagactgagtctcactctgtcgcctgggctggagtacagtggtgcgatctcagctcactgcaacttccacctcccaggttcaagcgattcttatgcctcagtctcctgagcagctgggattacaggcaaacgccaccacacccagctaaatttttttttttttttttgtatttttagtagagacagggtttcaccatgttggtcaggcgggtctcgaactcctgacctcgtgatccacctgcctcggccttccaaagtgctgggattacaagtttgagccactgcacctggctaacttgccctattttaaagtcaagcaatgggaagaataacaagattatatagtaatcagtttcatgacactaaaagtcatatagtcatagggttttttcatctttcatatctttgcctaaattcatttgctacagtgcaggaaccaaaacttgttcatctcatgattccctacatctgacataaggaaagtaagtgctcagaaaaatgtgcaggtcaataagttgcaaaagttggggctgcaattaatgctaacataagagctaaatgcttgattagaaatgatctcaaaaccttttagaatttccaaaatcttcatattactgaaactgtcggaatatatgggtcttgaaattcagaagatgatagtcactcttcccatatttataggctattaaggcaagggatatcttaaacatcatattactttatttagatttctactactccaattattaatgttatgtatttctcattgttttacttcttcatggtattatgaagactatatagatgattcaaccaagcctgcaaatctccctcttgtggaattccactggacccaatctgttttccatttccattgcaatactactaaagccatacaatatcaagcaccctccctctaggtccagggactatcacagaagaagcaggcatgtaagattttaaggactggtttcgaggggtcgagtgtaggaaaacagcctgttgcattgtaagagtgatgtcatcttgaagagcagctggcatgatgactgctgtttgactcctgcataccaagatattctgcagcaatgtctttaaacagtgccggtagtacagataacccctcataaagatgcttatctaacctccccagtgttcaggtgtttcacaagaaagtctgagatatgactagctacacgttttgccaaaaatgcttgttatataaagggtacttttgggagggtgagtgccgccatttagtggctgctagaaacattgcttctgtttgtaagttcctattaaatgtttctttctgagaaa

SEQ ID NO: 131843 - DNA, 6189 bp, Homo sapiens
  Payload ID: 5737
  Gene Symbol: FAM111A
  Gene Name: family with sequence similarity 111, member A
  Uniprot ID: Q96PZ2
  ENST ID: ENST00000528737
  CDS Start-End: 2819-4654
ctccgcttcctgcgcgcgcgagactcaagctgccacagtggctctgccgccagcgtcccagctcctcccacacccgagtttttatttcctgctccctctccagcccggcccaggccagcctaccggcgactaggatgctttcgctttcgctctcgctttccaatactcgggactggggaaaccgggagaatagaagcaggtgtccccagcgcagccaatcggcttccgaagtaggtgagttgctgcctgaagagaaaagacaaactccagtatctttcattccattggccagacgcgccattccccaagtgagttctgttctccaaccaaagtgctggattccaagggactggaagggaaagtccctaaaaatcacgagttcaggcgtctgagacttggtgggaacggaccttcctcttagtgcccaagcctgttctaatttttaaaaactgatgtctattaagacccaatgttaactttatgaaaatggttcctaaggagattcacatctctgtgtccgaattctgtgtgcagcaaacatcatctcaagtgcgttttcccaactacgcttctttccaggataaaatactctaagtgacaaatgttgagtacattatcaggtatgttcactattgtgagaactgaagccatctacactcacatagcttgccaactacattaacctgacttcttattccattattttcatcaacatacatttactatttcaagaaacttttgccagggaccggaaagttgcaaatatctttattgcttaatccagtatcttcttcaaagatccaaccactcttcaatggaaaacatcaaagaacagtttacattctaagactttgaacctttacctcaaaatcctagccttgttttatctaccaatcctaaacttttacccgtagctgactcaattctaaccaattcccctcattaaatattagacttacaatgggacttcaaaatctcaatacatatagcccaaacttgctcttccctctctgagacaccacttaaattctgtcaagttattgttctccattacctaagtgagcaagaaacttagctttgtcttatcaacaggttgctttgatattactgggagccaacatttgacattcttggaggctccagcaagacctaatcaacctcccaaccctcaactcagaatcagtgtgtgccctgaagtcccttcaaccttcttgaggctctccctgatctcaaaggtggagaaagtagatcttgcatcaggttgaactccagtttctttttgctcagtttttcaagcgctgagtttattttgtccctaggcataaagaaatctttctaggaacccctttggttatgggaccagatttttaaaagctttttaggcttggtgaaaaatctgccttatcactagcaacactacgacttgtctctgttcttgttttttgttgtactcgtgtaaaagaaaagttcaagggaagagaacaggctcaagtctacttctcacgctggctctggggattaggaaattcagaaagttttgtttcagactggcagtgctgtctgatataaacacagcgtcaagtactgcacgctgtagctacctgaggtttaggccggaagaggcacggctgatttaaaagtgaaagaaagtaaccaattggttcgcagacaaccttttcccaaaaggcgggcgattcaaacccctagccccacctgctccgtttcccgcccagctggagctctggagcctttgcttcctcaaatacgagcgggaactgcgttgagcgctggattccaggccgagtgctggcgaggcgcgcagtgagtgagcacacagggcgctggggtgctccgcggggcgcggtcacgggcgcggccgcggcgggctcgagtcccggctgggaggagaaggagctgggtgtcaggaagccggggactgacagcgccacccatctggggagccgggaggacacaggttttattttggtagtgctgcaagtccccttgtgtgctggggggagcggggcggcgtggtaggattggaagaggcttagagttggcctcgacccctgcccttgcccctggaaaggcagaaagtgggggttggggtgcggagaagcaggaagagagggagagtgaaggaggggaggaaagggagagaggaagagggagagtgaaggaggggaggaaagggagagaggcagagagggggaaggagagagggaaggaaggagagattgagagacagagaaattcctaaggggagctgtcaggtgggctggacatgggccccaggctgcactgctttatccctttgctgtaggaagtcaagcaagttctttaggtaagtagaaccttgatgtcaagtataaaacaggggttggtataggatagctaagagcactttatattttgatataatctgatttatcctggatactgaaaacaatgtagggagacggaggatattggagtgttttcttaacctcttgcccctttccactgtgattgctcaagtacatgcaaaattaatgtttctttctgcccattttattttcctttttttgtctgtgtctattaatcattcctaaagcacccggatcctctctcaaacttcgtaagatgagacatcatgaacagacacagtgaatccctagattttcttaatagttgggcaacaagttcttgcatttagggatgttgcaacatagcccagttccgcaattgtacattttctattttttttcctaggttctctgctgtttaaaaagtatccctgtgtgtttcagctgaaccatccgttcatcttcaagccatcatgagctgtaagaagcagaggtcacggaagcactcagtcaatgaaaaatgtaatatgaaaatcgagcactatttttctccggtctctaaagagcaacagaataattgcagtacttctctaatgaggatggagtctagaggagacccaagagccacaactaatacccaggctcaaagattccattcacctaagaaaaatccagaagaccagaccatgccccaaaataggacaatatatgttaccttgaaggtaaaccacaggagaaaccaagatatgaaacttaagctcacacatagtgagaatagtagcttatatatggctctcaacactctccaggctgtcagaaaagagatagaaactcaccaaggccaagaaatgcttgtgcgtggcacagaaggaatcaaagagtacataaaccttggaatgcccctcagttgtttccctgaaggtggccaggtggtcattacattttcccaaagtaaaagtaagcagaaggaagataaccacatatttggcaggcaggacaaagcatcgactgaatgtgtcaaattttacattcatgcaattggaattgggaagtgtaaaagaaggattgttaaatgtgggaagcttcacaaaaaggggcgcaaactctgtgtttatgctttcaaaggagaaaccatcaaggatgcactgtgcaaggatggcagatttctttcctttctggagaatgatgattggaaactcattgaaaacaatgacaccattttagaaagcacccagccagttgatgaattagaaggcagatactttcaggttgaggttgagaaaagaatggtccccagtgcagcagcttctcagaatcctgagtcagagaaaagaaacacctgtgtgttgagagaacaaatcgtggctcagtaccccagtttgaaaagagaaagtgaaaaaatcattgaaaacttcaagaaaaaaatgaaagtaaaaaatggggaaacattatttgaattgcatagaacaacgtttgggaaagtaacaaaaaattcttcttcgattaaagtagtgaaacttcttgtacgtctcagtgactcagttgggtacttattctgggacagtgcaactacgggttacgccacctgctttgtttttaaaggattgttcattttaacttgtcggcatgtaatagatagcattgtgggagacggaatagagccaagtaagtgggcaaccataattggtcaatgtgtaagggtgacatttggttatgaagagctaaaagacaaggaaacaaactacttttttgttgaaccttggtttgagatacataatgaagagcttgactatgctgtcctgaaactgaaggaaaatggacaacaagtacctatggaactatataatggaattactcctgtgccacttagtgggttgatacatattattggccatccatatggagaaaaaaagcagattgatgcttgtgctgtgatccctcagggtcagcgagcaaagaaatgtcaggaacgtgttcagtctaaaaaagcagaaagtccagagtatgtccatatgtatactcaaagaagtttccagaaaatagttcacaaccctgatgtgattacctatgacactgaatttttctttggggcttccggctcccctgtgtttgattcaaaaggttcattggtggccatgcatgctgctggctttgcttatacttaccaaaatgagactcgtagtatcattgagtttggctctaccatggaatccatcctccttgatattaagcaaagacataaaccatggtatgaagaagtatttgtaaatcagcaggatgtagaaatgatgagtgatgaggacttgtgagaattcagtctactggatttaagggaatggcttatggagttgttatttcataggcattgaaaatggttttctaaactccaaaatggtcatcttatcaataataataatattgaccatttcctatctgccaggcatttttctaagcacatgaagaaattagtcctaacaacactatgagatggactataacttgcccaaattttttttttttttttgagactgagtctcactctgtcgcctgggctggagtacagtggtgcgatctcagctcactgcaacttccacctcccaggttcaagcgattcttatgcctcagtctcctgagcagctgggattacaggcaaacgccaccacacccagctaaatttttttttttttttttgtatttttagtagagacagggtttcaccatgttggtcaggcgggtctcgaactcctgacctcgtgatccacctgcctcggccttccaaagtgctgggattacaagtttgagccactgcacctggctaacttgccctattttaaagtcaagcaatgggaagaataacaagattatatagtaatcagtttcatgacactaaaagtcatatagtcatagggttttttcatctttcatatctttgcctaaattcatttgctacagtgcaggaaccaaaacttgttcatctcatgattccctacatctgacataaggaaagtaagtgctcagaaaaatgtgcaggtcaataagttgcaaaagttggggctgcaattaatgctaacataagagctaaatgcttgattagaaatgatctcaaaaccttttagaatttccaaaatcttcatattactgaaactgtcggaatatatgggtcttgaaattcagaagatgatagtcactcttcccatatttataggctattaaggcaagggatatcttaaacatcatattactttatttagatttctactactccaattattaatgttatgtatttctcattgttttacttcttcatggtattatgaagactatatagatgattcaaccaagcctgcaaatctccctcttgtggaattccactggacccaatctgttttccatttccattgcaatactactaaagccatacaatatcaagcaccctccctctaggtccagggactatcacagaagaagcaggcatgtaagattttaaggactggtttcgaggggtcgagtgtaggaaaacagcctgttgcattgtaagagtgatgtcatcttgaagagcagctggcatgatgactgctgtttgactcctgcataccaagatattctgcagcaatgtctttaaacagtgccggtagtacagataacccctcataaagatgcttatctaacctccccagtgttcaggtgtttcacaagaaagtctgagatatgactagctacacgttttgccaaaaatgcttgttatataaagggtacttttgggagggtgagtgccgccatttagtggctgctagaaacattgcttctgtttgtaagttcctattaaatgtttctttctgagaaa

SEQ ID NO: 131844 - DNA, 867 bp, Homo sapiens
  Payload ID: 5737
  Gene Symbol: FAM111A
  Gene Name: family with sequence similarity 111, member A
  ENST ID: ENST00000527629
  CDS Start-End: 318-867
ctagccccacctgctccgtttcccgcccagctggagctctggagcctttgcttcctcaaatacgagcgggaactgcgttgagcgctggattccaggccgagtgctggcgaggcgcgcagttctctgctgtttaaaaagtatccctgtggtaccatctccagggagagcaaggttggagcctaaggggaaagatgggacgcaggacaccagctaatcttttcctctgtacaattaatgacagctttgaagatactgctataatttgaaaatttgaaattagtgtttcagctgaaccatccgttcatcttcaagccatcatgagctgtaagaagcagaggtcacggaagcactcagtcaatgaaaaatgtaatatgaaaatcgagcactatttttctccggtctctaaagagcaacagaataattgcagtacttctctaatgaggatggagtctagaggagacccaagagccacaactaatacccaggctcaaagattccattcacctaagaaaaatccagaagaccagaccatgccccaaaataggacaatatatgttaccttgaaggtaaaccacaggagaaaccaagatatgaaacttaagctcacacatagtgagaatagtagcttatatatggctctcaacactctccaggctgtcagaaaagagatagaaactcaccaaggccaagaaatgcttgtgcgtggcacagaaggaatcaaagagtacataaaccttggaatgcccctcagttgtttccctgaaggtggccaggtggtcattacattttcccaaagtaaaagtaagcagaaggaagataaccacatatttggcaggcaggacaaagcatcgactgaatgtgtcaaat

SEQ ID NO: 131845 - DNA, 3488 bp, Homo sapiens
  Payload ID: 5738
  Gene Symbol: FAM111B
  Gene Name: family with sequence similarity 111, member B
  Uniprot ID: Q6SJ93
  ENST ID: ENST00000343597
  CDS Start-End: 192-2396
aaatccagagcggcgggcactgacgggcacttgcaccgtgtggacagactctccggttctggggaaatccagtccctgttactccattttggccagaaattcaagacatttcaggtggcagaataaattcaatccttgtttctccatcttatcgagtagtagaagttagttacattctctttgaactcatcatgaattccatgaagactgaagaaaacaagtcatttagcgctatggaagatgaccagaggactagacctgaagtttcaaaggatactgtcatgaagcagacacatgctgacacacctgttgatcattgtctatctggcataagaaagtgtagcagcacctttaagcttaaaagtgaagtcaacaagcatgaaacagcccttgaaatgcagaatccaaatttgaacaataaagaatgttgtttcacctttacgttgaatggaaactccagaaaattagaccgtagtgtgtttacagcatatggtaaacccagcgagagtatctactcagccctgagtgctaatgactatttcagtgaaaggataaagaatcagtttaataagaacattattgtttatgaagaaaagacaatagatggacatataaatttaggaatgcctctcaagtgcctgcctagtgattctcattttaaaattacatttggtcaaagaaagagtagcaaagaagatggacacatattacgccaatgtgaaaatccaaacatggaatgcattctttttcatgttgttgctataggaaggacaagaaagaagattgttaagatcaacgaacttcatgaaaaaggaagtaaactttgtatttatgccttgaagggtgagactattgaaggagccttatgcaaggatggccgttttcggtctgacataggtgaatttgaatggaaactaaaggaaggtcataagaaaatttatggaaaacagtccatggtggatgaagtatctggaaaagtcttagaaatggacatttcaaaaaaaaaagcattacaacagaaagatatccataaaaaaattaaacagaatgaaagtgccactgatgaaattaatcaccagagtctgatacagtctaagaaaaaagtccacaaaccaaagaaagatggagagaccaaagatgtagaacacagcagagagcaaattctcccacctcaggatctaagccattatattaaagataaaactcgccagacaattcccaggattagaaattattacttttgtagtttgccccgaaaatataggcaaataaactcacaagttagacggaggccgcatctgggtaggcggtatgctattaatctggatgtccaaaaggaggcaattaatctcttaaagaattatcaaacgttgaatgaagccataatgcatcagtatccgaattttaaagaggaggcacagtgggtaagaaaatattttcgggaagaacaaaagagaatgaatctttcaccagctaagcaattcaacatatataaaaaggacttcggaaaaatgactgcaaattctgtttcagttgcaacctgcgaacagcttacatattatagcaagtcagttgggttcatgcaatgggacaataatggaaacacaggtaatgctacttgctttgtcttcaatggtggttatattttcacctgtcgacatgttgtacatcttatggtgggtaaaaacacacatccaagtttgtggccagatataattagcaaatgtgcgaaggtaaccttcacttatacagagttctgccctactcctgacaattggttttccattgagccatggcttaaagtgtccaatgaaaatctagattatgccattttaaaactaaaagaaaatggaaatgcgtttcctccaggactatggcgacagatttctcctcaaccatctactggtttgatttatttaattggtcatcctgaaggccagatcaagaaaatagatggttgtactgtgattcctctaaacgaacgattgaaaaaatatccaaacgattgtcaagatgggttggtagatctctatgataccaccagtaatgtatactgtatgtttacccaaagaagtttcctatcagaggtttggaacacacacacgcttagttatgatacttgtttctctgatgggtcctcaggctccccagtgtttaatgcatctggcaaattggttgctttgcatacctttgggcttttttatcaacgaggatttaatgtgcatgcccttattgaatttggttattctatggattctattctttgtgatattaaaaagacaaatgagagcttgtataaatcattaaatgatgagaaacttgagacctacgatgaagagaaaggtaaacaagagtcatcacttcaagatcatcagattgaacccatggaatgttagaaaagagatgctgtcttcaagaaaatatgccaataattcctggcaaagatttcatgacaaagacacttaaagcaattgcaacaaaagtgaaaattggcaaatgagacctaattaaatcttctgcacagcaaaagaaactatcaacagggtaaacacacaacctacggaatgggagaaaatatttgcaaactatgcatacagcaaagatctaatattcagaatccattaggaacttaaacagattaacaagcaaaaaaaacaagcaaccccattaaaaagtgggcaaaggacatgaacaaacacttttcaaaagaagatatacacatggccaacaaggatatgaaaaaatacctgatatcactaatcattagagaaatgcaaatcaaaaaaatgccatcacactaatcagaatggctgttattaaaatgccaaaaaattacagatgctggcgaggttgcagagaaaggggaatgcttatacactgctagtgggaaaataaattagttcagccattgtggaaagcagttgggtgatttctaaaagaacttaaaacagctaccattcaagccagcaatctcatgactgggtatatgtccaaaggaatataaattgttctaccataaagacatgcacatatatgttcactgcagcactattcacaatagcaaaacatgaaatcaacctaaatgcccatcaatggtagactggataaagaaaatgtgacacatatacaccatagcatactacacagccataaaaaagtacaagatcatgtgctttgcagcaacatggatggaactgaaggtcattatcctaagcgaactaatgcaggaacagaaagccaagtaccacatgttctctcataagtggaagctaaatattgagtacacatggacacaaagaagaaaacaacagatatggggcctacttgagggtggagggtgggaggagggtgaagactgaaaaactgcctatggggtactatgcttattacctgggtgatgaaataatctgaacacaaaaccctggtgacatgcagtttacctatataacaaaactgcacatggactcttaaacctaaataaaagttta

SEQ ID NO: 131846 - DNA, 3344 bp, Homo sapiens
  Payload ID: 5738
  Gene Symbol: FAM111B
  Gene Name: family with sequence similarity 111, member B
  Uniprot ID: Q6SJ93
  ENST ID: ENST00000411426
  CDS Start-End: 122-2236
gcgggaaaagttcagctgagagatataaaagagcagtctttccagcacctgcaaatccagagcggcgggcactgacgggcacttgcaccgtgtggacagactctccggttctgatactgtcatgaagcagacacatgctgacacacctgttgatcattgtctatctggcataagaaagtgtagcagcacctttaagcttaaaagtgaagtcaacaagcatgaaacagcccttgaaatgcagaatccaaatttgaacaataaagaatgttgtttcacctttacgttgaatggaaactccagaaaattagaccgtagtgtgtttacagcatatggtaaacccagcgagagtatctactcagccctgagtgctaatgactatttcagtgaaaggataaagaatcagtttaataagaacattattgtttatgaagaaaagacaatagatggacatataaatttaggaatgcctctcaagtgcctgcctagtgattctcattttaaaattacatttggtcaaagaaagagtagcaaagaagatggacacatattacgccaatgtgaaaatccaaacatggaatgcattctttttcatgttgttgctataggaaggacaagaaagaagattgttaagatcaacgaacttcatgaaaaaggaagtaaactttgtatttatgccttgaagggtgagactattgaaggagccttatgcaaggatggccgttttcggtctgacataggtgaatttgaatggaaactaaaggaaggtcataagaaaatttatggaaaacagtccatggtggatgaagtatctggaaaagtcttagaaatggacatttcaaaaaaaaaagcattacaacagaaagatatccataaaaaaattaaacagaatgaaagtgccactgatgaaattaatcaccagagtctgatacagtctaagaaaaaagtccacaaaccaaagaaagatggagagaccaaagatgtagaacacagcagagagcaaattctcccacctcaggatctaagccattatattaaagataaaactcgccagacaattcccaggattagaaattattacttttgtagtttgccccgaaaatataggcaaataaactcacaagttagacggaggccgcatctgggtaggcggtatgctattaatctggatgtccaaaaggaggcaattaatctcttaaagaattatcaaacgttgaatgaagccataatgcatcagtatccgaattttaaagaggaggcacagtgggtaagaaaatattttcgggaagaacaaaagagaatgaatctttcaccagctaagcaattcaacatatataaaaaggacttcggaaaaatgactgcaaattctgtttcagttgcaacctgcgaacagcttacatattatagcaagtcagttgggttcatgcaatgggacaataatggaaacacaggtaatgctacttgctttgtcttcaatggtggttatattttcacctgtcgacatgttgtacatcttatggtgggtaaaaacacacatccaagtttgtggccagatataattagcaaatgtgcgaaggtaaccttcacttatacagagttctgccctactcctgacaattggttttccattgagccatggcttaaagtgtccaatgaaaatctagattatgccattttaaaactaaaagaaaatggaaatgcgtttcctccaggactatggcgacagatttctcctcaaccatctactggtttgatttatttaattggtcatcctgaaggccagatcaagaaaatagatggttgtactgtgattcctctaaacgaacgattgaaaaaatatccaaacgattgtcaagatgggttggtagatctctatgataccaccagtaatgtatactgtatgtttacccaaagaagtttcctatcagaggtttggaacacacacacgcttagttatgatacttgtttctctgatgggtcctcaggctccccagtgtttaatgcatctggcaaattggttgctttgcatacctttgggcttttttatcaacgaggatttaatgtgcatgcccttattgaatttggttattctatggattctattctttgtgatattaaaaagacaaatgagagcttgtataaatcattaaatgatgagaaacttgagacctacgatgaagagaaaggtaaacaagagtcatcacttcaagatcatcagattgaacccatggaatgttagaaaagagatgctgtcttcaagaaaatatgccaataattcctggcaaagatttcatgacaaagacacttaaagcaattgcaacaaaagtgaaaattggcaaatgagacctaattaaatcttctgcacagcaaaagaaactatcaacagggtaaacacacaacctacggaatgggagaaaatatttgcaaactatgcatacagcaaagatctaatattcagaatccattaggaacttaaacagattaacaagcaaaaaaaacaagcaaccccattaaaaagtgggcaaaggacatgaacaaacacttttcaaaagaagatatacacatggccaacaaggatatgaaaaaatacctgatatcactaatcattagagaaatgcaaatcaaaaaaatgccatcacactaatcagaatggctgttattaaaatgccaaaaaattacagatgctggcgaggttgcagagaaaggggaatgcttatacactgctagtgggaaaataaattagttcagccattgtggaaagcagttgggtgatttctaaaagaacttaaaacagctaccattcaagccagcaatctcatgactgggtatatgtccaaaggaatataaattgttctaccataaagacatgcacatatatgttcactgcagcactattcacaatagcaaaacatgaaatcaacctaaatgcccatcaatggtagactggataaagaaaatgtgacacatatacaccatagcatactacacagccataaaaaagtacaagatcatgtgctttgcagcaacatggatggaactgaaggtcattatcctaagcgaactaatgcaggaacagaaagccaagtaccacatgttctctcataagtggaagctaaatattgagtacacatggacacaaagaagaaaacaacagatatggggcctacttgagggtggagggtgggaggagggtgaagactgaaaaactgcctatggggtactatgcttattacctgggtgatgaaataatctgaacacaaaaccctggtgacatgcagtttacctatataacaaaactgcacatggactcttaaacctaaataaaagtttaaaatatatataatgcc

SEQ ID NO: 131847 - DNA, 557 bp, Homo sapiens
  Payload ID: 5738
  Gene Symbol: FAM111B
  Gene Name: family with sequence similarity 111, member B
  ENST ID: ENST00000534403
  CDS Start-End: 70-557
aaatccagagcggcgggcactgacgggcacttgcaccgtgtggacagactctccggttctgatactgtcatgaagcagacacatgctgacacacctgttgatcattgtctatctggcataagaaagtgtagcagcacctttaagcttaaaagtgaagtcaacaagcatgaaacagcccttgaaatgcagaatccaaatttgaacaataaagaatgttgtttcacctttacgttgaatggaaactccagaaaattagaccgtagtgtgtttacagcatatggtaaacccagcgagagtatctactcagccctgagtgctaatgactatttcagtgaaaggataaagaatcagtttaataagaacattattgtttatgaagaaaagacaatagatggacatataaatttaggaatgcctctcaagtgcctgcctagtgattctcattttaaaattacatttggtcaaagaaagagtagcaaagaagatggacacatattacgccaatgtgaaaatccaaacatggaatgcattctttttcatgttgttgctataggaag

SEQ ID NO: 131848 - DNA, 2364 bp, Homo sapiens
  Payload ID: 5738
  Gene Symbol: FAM111B
  Gene Name: family with sequence similarity 111, member B
  Uniprot ID: Q6SJ93
  ENST ID: ENST00000529618
  CDS Start-End: 116-2230
caaatccagagcggcgggcactgacgggcacttgcaccgtgtggacagactctccggttctggggaaatccagtccctgttactccattttggccagaaattcaaggatactgtcatgaagcagacacatgctgacacacctgttgatcattgtctatctggcataagaaagtgtagcagcacctttaagcttaaaagtgaagtcaacaagcatgaaacagcccttgaaatgcagaatccaaatttgaacaataaagaatgttgtttcacctttacgttgaatggaaactccagaaaattagaccgtagtgtgtttacagcatatggtaaacccagcgagagtatctactcagccctgagtgctaatgactatttcagtgaaaggataaagaatcagtttaataagaacattattgtttatgaagaaaagacaatagatggacatataaatttaggaatgcctctcaagtgcctgcctagtgattctcattttaaaattacatttggtcaaagaaagagtagcaaagaagatggacacatattacgccaatgtgaaaatccaaacatggaatgcattctttttcatgttgttgctataggaaggacaagaaagaagattgttaagatcaacgaacttcatgaaaaaggaagtaaactttgtatttatgccttgaagggtgagactattgaaggagccttatgcaaggatggccgttttcggtctgacataggtgaatttgaatggaaactaaaggaaggtcataagaaaatttatggaaaacagtccatggtggatgaagtatctggaaaagtcttagaaatggacatttcaaaaaaaaaagcattacaacagaaagatatccataaaaaaattaaacagaatgaaagtgccactgatgaaattaatcaccagagtctgatacagtctaagaaaaaagtccacaaaccaaagaaagatggagagaccaaagatgtagaacacagcagagagcaaattctcccacctcaggatctaagccattatattaaagataaaactcgccagacaattcccaggattagaaattattacttttgtagtttgccccgaaaatataggcaaataaactcacaagttagacggaggccgcatctgggtaggcggtatgctattaatctggatgtccaaaaggaggcaattaatctcttaaagaattatcaaacgttgaatgaagccataatgcatcagtatccgaattttaaagaggaggcacagtgggtaagaaaatattttcgggaagaacaaaagagaatgaatctttcaccagctaagcaattcaacatatataaaaaggacttcggaaaaatgactgcaaattctgtttcagttgcaacctgcgaacagcttacatattatagcaagtcagttgggttcatgcaatgggacaataatggaaacacaggtaatgctacttgctttgtcttcaatggtggttatattttcacctgtcgacatgttgtacatcttatggtgggtaaaaacacacatccaagtttgtggccagatataattagcaaatgtgcgaaggtaaccttcacttatacagagttctgccctactcctgacaattggttttccattgagccatggcttaaagtgtccaatgaaaatctagattatgccattttaaaactaaaagaaaatggaaatgcgtttcctccaggactatggcgacagatttctcctcaaccatctactggtttgatttatttaattggtcatcctgaaggccagatcaagaaaatagatggttgtactgtgattcctctaaacgaacgattgaaaaaatatccaaacgattgtcaagatgggttggtagatctctatgataccaccagtaatgtatactgtatgtttacccaaagaagtttcctatcagaggtttggaacacacacacgcttagttatgatacttgtttctctgatgggtcctcaggctccccagtgtttaatgcatctggcaaattggttgctttgcatacctttgggcttttttatcaacgaggatttaatgtgcatgcccttattgaatttggttattctatggattctattctttgtgatattaaaaagacaaatgagagcttgtataaatcattaaatgatgagaaacttgagacctacgatgaagagaaaggtaaacaagagtcatcacttcaagatcatcagattgaacccatggaatgttagaaaagagatgctgtcttcaagaaaatatgccaataattcctggcaaagatttcatgacaaagacacttaaagcaattgcaacaaaagtgaaaattggcaaatgagacctaattaaatcttctgcacagcaaaag

SEQ ID NO: 131849 - DNA, 3405 bp, Homo sapiens
  Payload ID: 5738
  Gene Symbol: FAM111B
  Gene Name: family with sequence similarity 111, member B
  Uniprot ID: Q6SJ93
  ENST ID: ENST00000620384
  CDS Start-End: 93-2297
ttttagacatttcaggtggcagaataaattcaatccttgtttctccatcttatcgagtagtagaagttagttacattctctttgaactcatcatgaattccatgaagactgaagaaaacaagtcatttagcgctatggaagatgaccagaggactagacctgaagtttcaaaggatactgtcatgaagcagacacatgctgacacacctgttgatcattgtctatctggcataagaaagtgtagcagcacctttaagcttaaaagtgaagtcaacaagcatgaaacagcccttgaaatgcagaatccaaatttgaacaataaagaatgttgtttcacctttacgttgaatggaaactccagaaaattagaccgtagtgtgtttacagcatatggtaaacccagcgagagtatctactcagccctgagtgctaatgactatttcagtgaaaggataaagaatcagtttaataagaacattattgtttatgaagaaaagacaatagatggacatataaatttaggaatgcctctcaagtgcctgcctagtgattctcattttaaaattacatttggtcaaagaaagagtagcaaagaagatggacacatattacgccaatgtgaaaatccaaacatggaatgcattctttttcatgttgttgctataggaaggacaagaaagaagattgttaagatcaacgaacttcatgaaaaaggaagtaaactttgtatttatgccttgaagggtgagactattgaaggagccttatgcaaggatggccgttttcggtctgacataggtgaatttgaatggaaactaaaggaaggtcataagaaaatttatggaaaacagtccatggtggatgaagtatctggaaaagtcttagaaatggacatttcaaaaaaaaaagcattacaacagaaagatatccataaaaaaattaaacagaatgaaagtgccactgatgaaattaatcaccagagtctgatacagtctaagaaaaaagtccacaaaccaaagaaagatggagagaccaaagatgtagaacacagcagagagcaaattctcccacctcaggatctaagccattatattaaagataaaactcgccagacaattcccaggattagaaattattacttttgtagtttgccccgaaaatataggcaaataaactcacaagttagacggaggccgcatctgggtaggcggtatgctattaatctggatgtccaaaaggaggcaattaatctcttaaagaattatcaaacgttgaatgaagccataatgcatcagtatccgaattttaaagaggaggcacagtgggtaagaaaatattttcgggaagaacaaaagagaatgaatctttcaccagctaagcaattcaacatatataaaaaggacttcggaaaaatgactgcaaattctgtttcagttgcaacctgcgaacagcttacatattatagcaagtcagttgggttcatgcaatgggacaataatggaaacacaggtaatgctacttgctttgtcttcaatggtggttatattttcacctgtcgacatgttgtacatcttatggtgggtaaaaacacacatccaagtttgtggccagatataattagcaaatgtgcgaaggtaaccttcacttatacagagttctgccctactcctgacaattggttttccattgagccatggcttaaagtgtccaatgaaaatctagattatgccattttaaaactaaaagaaaatggaaatgcgtttcctccaggactatggcgacagatttctcctcaaccatctactggtttgatttatttaattggtcatcctgaaggccagatcaagaaaatagatggttgtactgtgattcctctaaacgaacgattgaaaaaatatccaaacgattgtcaagatgggttggtagatctctatgataccaccagtaatgtatactgtatgtttacccaaagaagtttcctatcagaggtttggaacacacacacgcttagttatgatacttgtttctctgatgggtcctcaggctccccagtgtttaatgcatctggcaaattggttgctttgcatacctttgggcttttttatcaacgaggatttaatgtgcatgcccttattgaatttggttattctatggattctattctttgtgatattaaaaagacaaatgagagcttgtataaatcattaaatgatgagaaacttgagacctacgatgaagagaaaggtaaacaagagtcatcacttcaagatcatcagattgaacccatggaatgttagaaaagagatgctgtcttcaagaaaatatgccaataattcctggcaaagatttcatgacaaagacacttaaagcaattgcaacaaaagtgaaaattggcaaatgagacctaattaaatcttctgcacagcaaaagaaactatcaacagggtaaacacacaacctacggaatgggagaaaatatttgcaaactatgcatacagcaaagatctaatattcagaatccattaggaacttaaacagattaacaagcaaaaaaaacaagcaaccccattaaaaagtgggcaaaggacatgaacaaacacttttcaaaagaagatatacacatggccaacaaggatatgaaaaaatacctgatatcactaatcattagagaaatgcaaatcaaaaaaatgccatcacactaatcagaatggctgttattaaaatgccaaaaaattacagatgctggcgaggttgcagagaaaggggaatgcttatacactgctagtgggaaaataaattagttcagccattgtggaaagcagttgggtgatttctaaaagaacttaaaacagctaccattcaagccagcaatctcatgactgggtatatgtccaaaggaatataaattgttctaccataaagacatgcacatatatgttcactgcagcactattcacaatagcaaaacatgaaatcaacctaaatgcccatcaatggtagactggataaagaaaatgtgacacatatacaccatagcatactacacagccataaaaaagtacaagatcatgtgctttgcagcaacatggatggaactgaaggtcattatcctaagcgaactaatgcaggaacagaaagccaagtaccacatgttctctcataagtggaagctaaatattgagtacacatggacacaaagaagaaaacaacagatatggggcctacttgagggtggagggtgggaggagggtgaagactgaaaaactgcctatggggtactatgcttattacctgggtgatgaaataatctgaacacaaaaccctggtgacatgcagtttacctatataacaaaactgcacatggactcttaaacctaaataaaagtttaaaatatatataatgcc

SEQ ID NO: 131850 - DNA, 4050 bp, Homo sapiens
  Payload ID: 5739
  Gene Symbol: FAM114A1
  Gene Name: family with sequence similarity 114, member A1
  Uniprot ID: Q8IWE2
  ENST ID: ENST00000358869
  CDS Start-End: 177-1868
gtactcggccgcctgagcgccgacccacgccctgcctgctcttccagtccagccaacactctaagcaggcaccgcctccactcgcagcccccgggatgggtcccactccctaccgcagatccccaggccccctccacccagtcggctagccctcgcctctgccatccgatactaaaatgtctgatgatgctggtgacaccttagccactggagacaaagcagaagttactgagatgcctaatagtgattctttacctgaggatgcagaagtgcattgtgattcagctgcagtttcacatgagccaacaccagctgaccccagaggggaggggcatgaaaatgcagctgtgcagggtgcaggggctgccgccattgggccccctgtgcagcctcaggatgccaacgccctggagccccctctcaatggagacgtgactgaggatacacttgctgaatgtattgattccgtcagccttgaggcagaacccagatccgaaatacccctgcaagaacagaattatctggctgtggattcccctccaagtggaggaggatgggcaggctggggatcctggggcaaatctctgctgtcgtcagcatctgccacagtaggtcatggattgacggcagtcaaggaaaaagcaggagccactctacggattcatggtgtaaattctggatcttctgaaggagcccaaccaaatactgaaaacggagtccctgaaataacagatgcagccacagatcagggccctgcagaaagcccacccacttccccttcatcagcctctcggggtatgctgtctgccatcaccaatgtggttcaaaacacaggtaaaagtgtcttaactggaggccttgatgcgttggaattcatcggcaagaaaaccatgaatgtccttgcagaaagtgacccgggctttaagcggaccaagacgctcatggagagaactgtttccttgtctcagatgttaagggaagctaaggagaaggagaagcagagactggcacagcagctcacgatggagagaaccgcgcactacgggatgctgtttgatgaatatcaaggcttgtcacacctggaagccctggaaattctgtccaatgaaagcgaaagcaaggttcagtcatttttagcatcacttgatggagagaagctggaactcttaaaaaatgacctaatttccattaaagacatctttgcagccaaagaattagagaatgaagaaaatcaagaagaacaaggcttagaagaaaagggagaagaatttgctcgcatgcttacagagcttctctttgaattacatgtggcggccacacctgacaaactcaataaggccatgaagagggctcatgactgggtggaagaggatcaaaccgtggtgtcagtagatgtggcaaaagtgtccgaagaagaaacaaagaaggaagaaaaggaagagaaatctcaagaccctcaagaagacaaaaaggaggaaaagaaaactaagaccatagaggaagtatacatgtcgtccattgaaagtctggcggaggtaacagcgcgctgtattgagcagcttcataaagtagcagaattaattcttcatggacaagaagaggaaaaaccagctcaggaccaagcaaaagttctaataaaattaactactgcaatgtgcaatgaagtggcctctttatcaaagaagtttacgaattctttaaccactgttgggagcaacaagaaggccgaggtccttaaccccatgatcagtagtgtattgttagagggctgcaacagtacaacgtacatacaggatgccttccagctgctgctgcctgttctgcaggtctcacatatccagaccagttgtttgaaagcacagccgtgacctggccagactccatctagttaaaggagacagctggccgccttgcctcaatatgtaccatttaaggggatgttctctgtgcgcctggccacagacatccatttgaggacactacaagcaattttgcacagacaatattgagaatgcaaatttagagagagttatcatttctctcaatgtgtataattgtttttacaaacaattgtgttttctttatgttaatttaaacttacacagcttatattgaaaatttcctttcatctgaaatttatttacaaatattcgtgttcattttcctggttaagcatgctatatttagaaactcatggggagaccttagacttttgtttaatcctttatgtttcaacctttaaatgttccattcttatagtattactttaaatcaattctaaaactgaactttgttttgttacataaatgtcgcaggcaaaaataacactacttatagattttacctattatggtaaaaaataggaacatattgtcattctttttttttttttttttttgagacagagtctcactctgtcgccaggctggagtgcgttggcacaatctcggctcactgcaacctccgcctcctgggttcaatcgattctcctgcctcagcctcctgagtagctgggactacaggtgtgtgccaccacgcccagccaattttttttgtatttttagtagagacagggtttcaccatgttggccaggatggtctcgatctcctgacctcgtgatctgcccgcctcagcctcccaaagtgctgggattacaggcttgagccaccgcgcccggccggtcattcattcttgcaacaagcatttattgagcacctactgtgtgctcacagtaaagaaacgtgatcttatcccagtagaggtagatattctgaaaaagaataattcttaaactgcttaaaacaggggtccccacccccaggccacagaccagtaccagtccgtggcactggttaggaaccaggccacacagcagggggtgagcggtgggtgagtgagcacagcttcatctgtatttacagctgctccccagagcttgcattactgcctgagctctgcctcccgtcaggtcagcagcagcattagagtctcatgggagtgcgaaccctgttgtgaactgcacatgcgagggatctaggttgtgcactccttatgagaatctaatgcctgatgaatctaatgcctcatgatctgaggttgaatagcttcgtgccgaaaccatcccccacccccatcccgctaccccgagtccgtgaaaaaattgtcttccatgaaaccggtccctggtaccagaaaggttggggaccactggcttaaaataccaataaatttttgaaccttaaaaactttgaagaacaaggtaaattggtgttttatttaatgtcctaccctttaatttgttgcattttcctatactctttacactattttatcccaaactatgtatatgaggtgaaaatatatatgaaaagggatactgaagaatatttagtttaaaattaatttcttacgatcacgagcacatggtggcataattacaaagcttggaagtattcaaatagaaaatcaaaggtgtttcaatacagtagaatcccaggactgcattttaaaatcgcctcacagatcacactcgctggtggcaaatatcatcatcgttgctaaaggacagaaaatactgatgtgtgttttaactaactggtatattgatccatgggaggctgcacagaagaccctgcggccaggaggggcattgtcagtggctgcttctcctgagctccacgccttcattgcagctgcatgttcgatacaatacacctgcttcacagccccatggacatccctacaggtactgtcatgtgaagccttgcctagtagttctctccagggcaaatgaagctcacagttttgcaaggtggaaacctcttattcacatttgctttgattccccgatggagtagactgcctttgttccatacaggcaaagtaaggatattttaatatcatcctacttcttattagcatttcatttgtctatgtactgtatttcatttgtatgtctcctgaaacatccaaatagagaacataagaacactttatgtacaatctggaaaaaaattacctgagaaatcaattaaagatttttccccttt

SEQ ID NO: 131851 - DNA, 567 bp, Homo sapiens
  Payload ID: 5739
  Gene Symbol: FAM114A1
  Gene Name: family with sequence similarity 114, member A1
  ENST ID: ENST00000510213
  CDS Start-End: 167-567
ggccgggcgtccccgcggcgctcctcgtggggcggggcgcaggcggggcggggccccctctccagccgcccgccctccggccgcgtccccgccggccctgcagacgtggcggggcgggacccgctgggcactcccgcgcgtactcggccgcctgagcgatactaaaatgtctgatgatgctggtgacaccttagccactggagacaaagcagaagttactgagatgcctaatagtgattctttacctgaggatgcagaagtgcattgtgattcagctgcagtttcacatgagccaacaccagctgaccccagaggggaggggcatgaaaatgcagctgtgcagggtgcaggggctgccgccattgggccccctgtgcagcctcaggatgccaacgccctggagccccctctcaatggagacgtgactgaggatacacttgctgaatgtattgattccgtcagccttgaggcagaacccagatccgaaatacccctgcaagaacagaattatctggctgtggattcccctccaagtggaggaggatgggcaggctggggatcctgggg

SEQ ID NO: 131852 - DNA, 1431 bp, Homo sapiens
  Payload ID: 5739
  Gene Symbol: FAM114A1
  Gene Name:: family with sequence similarity 114, member A1
  Uniprot ID: Q8IWE2
  ENST ID: ENST00000515037
  CDS Start-End: 358-1428
ctccggccgcgtccccgccggccctgcagacgtggcggggcgggacccgctgggcactcccgcgcgtactcggccgcctgagcggctgtggattcccctccaagtggaggaggatgggcaggctggggatcctggggcaaatctctgctgtcgtcagcatctgccacagtaggtcatggattgacggcagtcaaggaaaaagcaggagccactctacggattcatggtgtaaattctggatcttctgaaggagcccaaccaaatactgaaaacggagtccctgaaataacagatgcagccacagatcagggccctgcagaaagcccacccacttccccttcatcagcctctcggggtatgctgtctgccatcaccaatgtggttcaaaacacaggtaaaagtgtcttaactggaggccttgatgcgttggaattcatcggcaagaaaaccatgaatgtccttgcagaaagtgacccgggctttaagcggaccaagacgctcatggagagaactgtttccttgtctcagatgttaagggaagctaaggagaaggagaagcagagactggcacagcagctcacgatggagagaaccgcgcactacgggatgctgtttgatgaatatcaaggcttgtcacacctggaagccctggaaattctgtccaatgaaagcgaaagcaaggttcagtcatttttagcatcacttgatggagagaagctggaactcttaaaaaatgacctaatttccattaaagacatctttgcagccaaagaattagagaatgaagaaaatcaagaagaacaaggcttagaagaaaagggagaagaatttgctcgcatgcttacagagcttctctttgaattacatgtggcggccacacctgacaaactcaataaggccatgaagagggctcatgactgggtggaagaggatcaaaccgtggtgtcagtagatgtggcaaaagtgtccgaagaagaaacaaagaaggaagaaaaggaagagaaatctcaagaccctcaagaagacaaaaaggaggaaaagaaaactaagaccatagaggaagtatacatgtcgtccattgaaagtctggcggaggtaacagcgcgctgtattgagcagcttcataaagtagcagaattaattcttcatggacaagaagaggaaaaaccagctcaggaccaagcaaaagttctaataaaattaactactgcaatgtgcaatgaagtggcctctttatcaaagaagtttacgaattctttaaccactgttgggagcaacaagaaggccgaggtccttaaccccatgatcagtagtgtattgttagagggctgcaacagtacaacgtacatacaggatgccttccagctgctgctgcctgttctgcaggtctcacatatccagaccagttgtttgaaagcacagccgtgacct

SEQ ID NO: 131853 - DNA, 4443 bp, Homo sapiens
  Payload ID: 5740
  Gene Symbol: FAM114A2
  Gene Name: family with sequence similarity 114, member A2
  Uniprot ID: Q9NRY5
  ENST ID: ENST00000351797
  CDS Start-End: 78-1595
ttccggggcagtaggaacgccgagtcggctgccgtggctgtgctgagggtggcggccggatagctgatgttctaatcatgtcagataaagatgatattgagactccactgctaactgaagcagcccccatccttgaagatggaaactgtgagccagccaagaattctgagtctgttgaccaaggtgccaaaccagagagtaaatcagaacctgtagtttccactcggaaaagaccagagaccaaaccttccagtgaccttgagacttcaaaagttctccctattcaggataatgtttccaaagatgtaccccagaccagatggggttattgggggagctggggcaagtccatactctcctcagcctcggctacagtagctacagtaggacaaggcatttcaaatgtcatcgagaaggcagagacttcccttggaatccctggtcccagtgaaatttcaactgaagtcaagtatgtagcaggagagacaaatgccaaagagaatgaaaactcctccccagtggctggggcatttggtgtattctctaccatctctactgctgttcagagcacaggaaagagtgttataagtgggggtttggatgccttagaattcattggaaaaaagacaatggatgtgatagcagaaggggatcctggatttaaaagaaccaagggtctgatgaaccgaaatgctacactatctcaggttttacgagaggcgaaggagaaagaagagatacggacctccaatgaggttaccgtggaaacagacaagaaaactcattatgggctactctttgatgaatttcaaggcctttcacatctagaagctctggagatgctttcccaagaaagtgaaataaaggtgaaatctatccttaattctctgagtggagaagaattagagactctaaaagttgaattagagcaactcaaagaaacattttctctagcagaattttgtgaagaagaggaagaagagaaaaaaggggatgaagattttaccaaggacataacagagctgttttcccagctgcacgtttcctccaaaccagagaaacttgccagggcaagaaataccgcccacgaatggatcaggaagtctctgaccaagccattagcagagaatgaagaaggagaaaaacagtcggaagcagaaaatactgagcaagtcaacaaaaattcaatagaggatatccatgcgtttgcaatccggagcctggctgaactgactgcctgctcaattgaactattccacaaaacagctgcattggttctgcatggcaggaagcaggaagtgacagccatagaaaggagccaaactctttcccagatgacaattgtgttgtgtaaagagttgtcctctctgtctaaagagttcactacctgcctaacaactgctggggtcaaagaaatggcagatgtccttaacccattaatcactgcagtatttctagaggcatcaaacagtgcctcctacatccaggacgcctttcagctactcttacctgtgctagagatctctctcattgagaacaagattgaatcacacagacatgagctgcagggccagaaacctttgttagaacattgaagaatggagacgttttgacctgggacttgtgacggccaaggaatgccaccttattctggctactcctgcagaaatgaaggagtggggttattttagtatataaaaattcaggcaggagagatggtttaaagaggaagattgttgccttcagtgtttgattgaagtattcaggttctcacagtattctttccagttgttgtaattcataaattatttgaaaagaaacttttgtagaaagtccaagaataataactctagataaagattagtgggacactcaggcaaaaatgttggtctttctttgacatgttgcaaaatgttatcaattttgtcatggatataatttgcagcccatggatataactggttgataagccagagaaaaataatttagtgttctaaaattcatggcatgtgtggtttattaatgccatgtactttctcctttctggaataaaatctatggctttaagaaaactgagcatatgtaaactctgtgatgattaccctttatcacatgaattcttggaaatagaaagtttcatctgcttttttaaattcttagtagatatttggcattgaggagaaacttgtagactattatagccatgtgaattaactgtagcaaagtgccctttttcttcaaattgctccccctccccaggatgacacacttcatgtcatagctgaaccctactctactggattcaaggccagtaaatgcaatttagagaagcagttttatgtttgcagatattctgagtctcttcaggatgtgtttcgtgtctaccatatatgcaggataaattctttaacagcaaactccaaaggaatgttgaagctgttttagcaatgaggatttttttgtttgagtgttgaagtgggccatagtcctttagaaatgatgttcatttatgataggatttaacttctaaggcatagtttattttttcctctttcctttttgtttgttttaatgtattctttagcatgtttttgatataacttttatcctccagatcttaagctttcttttgctctcttcagcaatttaagagactattaagctgtcgtcttcctaaaagctattttggtatccactctttttaaaaaaattctccaactttgtggttttttaatgattaaggtaatttgttagctctgcccctcatcttctaaaacctttgtaataaaatgtattaatcatgttatttgatcctttcatttacttttgtaaacacgagccctaatatcttacttagaccaaaaaaaaaaaaaaaaaatagcaaagcaaagccataacatagattagtataaagactgtttctacgtaatcttctttggggcaggagtcagttagtaagcaaggaagagaaataaatttggtttaaaaaggtataccaacagcactacaatgttactctgcctatattctgtcttaatatgatcagaaagtttttgaatattcctttttaaagacaaatttcaccctttccagcttgaatatttctgaagtttcagaaaaacagttgccttctggttacaaaggctggtgtcaccagttctgaattgttgcctcaagcttggttgatgtgtctgaacctgtatcccttgagggcaaagtttagaaactggtcactctgcctactgtctgttcagcctcttgtacaatggcagtttggcagctttaaatccttaacctagaaatgtatttaaggtttttctttcaagaaatggggtatacatatgaaggagagagtaacaactctttttatacacctattcagatttcagccctgaatttggcaaattttagattaggtctcacataaggtaaatatgactcactaactctttttttctcatcttccccacccccccatatatatttatttattttaatggagttagggaccactagtgaaatgatgaaaggcccaattctgagtaacaattgtctactcttcacataaaatatactgaaaaagaattaagattccttgatccagtagacatagagaaacataaacattcatgacagatgagtaggtaaattcagggatcactttggaacttgctggattatggtgatggtttttggatagtatgtgcttcattattttatttggggtagttacagtgttttagttttttgttaacagctacacttttggtactattttccttttaaatttttggtgtctaagatttaccactaattactaatatatgcctttccaattcacttaaaaccttaataagtgaaatgttcaggtattgctagggtaaatgtgtcttttcctactattgagattttaaaaggctgtgattaagagagactttattaatttgatctgaaagaagtagaaacctctatgaaacaatttttattttcctttgcataataccttagaaatgtgttaaggacaagctatattttccttacttgcttttgatagtttttttttttttttttaagcatagatatccaggttggcaggcctctgaaatgtgaaattgtaatttttatagatggcattactatgaatctgaaatcagtgctaggtgtacaaatgtgaatttttcaatcctgtaatcaaagaacaagatcttgtgggttcctactgctgaaaaaggatgctttcttttgtacttgtttttagtgaaagacctttttgagggagagctattttataggtagttgctattgatatctccatttgagaaatagacatttttctgtatttctagaggtgttctgaattttaaacctgaattcttcagtttagaaaacccagaataaaattatacccacagtgggcactcaacaagtgtgatatttcacaaa

SEQ ID NO: 131854 - DNA, 550 bp, Homo sapiens
  Payload ID: 5740
  Gene Symbol: FAM114A2
  Gene Name: family with sequence similarity 114, member A2
  ENST ID: ENST00000518102
  CDS Start-End: 241-550
agtaggaacgccgagtcggctgccgtggctgtgctgagggtggcggccggataggtgcggagcttcctgaacgaggcaggagggggacccagaactccatttgacagatgaggaaacggagaggcagacaggtgacctgacttccccacaatcgctgcaggacaggaagaaagtaaactccagagcccgtgctcttagctactaagctgtactgctcttcattttgctgatgttctaatcatgtcagataaagatgatattgagactccactgctaactgaagcagcccccatccttgaagatggaaactgtgagccagccaagaattctgagtctgttgaccaaggtgccaaaccagagagtaaatcagaacctgtagtttccactcggaaaagaccagagaccaaaccttccagtgaccttgagacttcaaaagttctccctattcaggataatgtttccaaagatgtaccccagaccagatggggttattgggggagctggggcaagtccatactctcctcagcctcggctacagtagctacagtag

SEQ ID NO: 131855 - DNA, 576 bp, Homo sapiens
  Payload ID: 5740
  Gene Symbol: FAM114A2
  Gene Name: family with sequence similarity 114, member A2
  ENST ID: ENST00000523705
  CDS Start-End: 78-576
gagtcggctgccgtggctgtgctgagggtggcggccggataggtgcggagcttcctgaacgagctgatgttctaatcatgtcagataaagatgatattgagactccactgctaactgaagcagcccccatccttgaagatggaaactgtgagccagccaagaattctgagtctgttgaccaaggtgccaaaccagagagtaaatcagaacctgtagtttccactcggaaaagaccagagaccaaaccttccagtgaccttgagacttcaaaagttctccctattcaggataatgtttccaaagatgtaccccagaccagatggggttattgggggagctggggcaagtccatactctcctcagcctcggctacagtagctacagtaggacaaggcatttcaaatgtcatcgagaaggcagagacttcccttggaatccctggtcccagtgaaatttcaactgaagtcaagtatgtagcaggagagacaaatgccaaagagaatgaaaactcctccccagtggctggggcatttggtgtattctctaccatctctactgctgttcagagcacaggaa

SEQ ID NO: 131856 - DNA, 562 bp, Homo sapiens
  Payload ID: 5740
  Gene Symbol: FAM114A2
  Gene Name: family with sequence similarity 114, member A2
  ENST ID: ENST00000522634
  CDS Start-End: 325-562
gtgctgagggtggcggccggatagggacccagaactccatttgacagatgaggaaacggagaggcagacaggtgacctgacttccccacaatcgctgcaggacaggaagaaagtaaactccagagcccgtgctcttagctactaagctgtactgctcttcattttgagacaccaatagtatcttggctttaattgccaaagagctctacatctggaaggaattgaattgagtaacactggtattcaaaagttgatctgacataaagccaatctgatggcttaaatttcatgatgtcctggaaaaattgagctgatgttctaatcatgtcagataaagatgatattgagactccactgctaactgaagcagcccccatccttgaagatggaaactgtgagccagccaagaattctgagtctgttgaccaaggtgccaaaccagagagtaaatcagaacctgtagtttccactcggaaaagaccagagaccaaaccttccagtgaccttgagacttcaaaagttctccctattcaggataatgtttccaaagatgtaccccaga

SEQ ID NO: 131857 - DNA, 1394 bp, Homo sapiens
  Payload ID: 5740
  Gene Symbol: FAM114A2
  Gene Name: family with sequence similarity 114, member A2
  ENST ID: ENST00000520313
  CDS Start-End: 66-1373
aggaacgccgagtcggctgccgtggctgtgctgagggtggcggccggatagctgatgttctaatcatgtcagataaagatgatattgagactccactgctaactgaagcagcccccatccttgaagatggaaactgtgagccagccaagaattctgagtctgttgaccaaggcatttcaaatgtcatcgagaaggcagagacttcccttggaatccctggtcccagtgaaatttcaactgaagtcaagtatgtagcaggagagacaaatgccaaagagaatgaaaactcctccccagtggctggggcatttggtgtattctctaccatctctactgctgttcagagcacaggaaagagtgttataagtgggggtttggatgccttagaattcattggaaaaaagacaatggatgtgatagcagaaggggatcctggatttaaaagaaccaagggtctgatgaaccgaaatgctacactatctcaggttttacgagaggcgaaggagaaagaagagatacggacctccaatgaggttaccgtggaaacagacaagaaaactcattatgggctactctttgatgaatttcaaggcctttcacatctagaagctctggagatgctttcccaagaaagtgaaataaaggtgaaatctatccttaattctctgagtggagaagaattagagactctaaaagttgaattagagcaactcaaagaaacattttctctagcagaattttgtgaagaagaggaagaagagaaaaaaggggatgaagattttaccaaggacataacagagctgttttcccagctgcacgtttcctccaaaccagagaaacttgccagggcaagaaataccgcccacgaatggatcaggaagtctctgaccaagccattagcagagaatgaagaaggagaaaaacagtcggaagcagaaaatactgagcaagtcaacaaaaattcaatagaggatatccatgcgtttgcaatccggagcctggctgaactgactgcctgctcaattgaactattccacaaaacagctgcattggttctgcatggcaggaagcaggaagtgacagccatagaaaggagccaaactctttcccagatgacaattgtgttgtgtaaagagttgtcctctctgtctaaagagttcactacctgcctaacaactgctggggtcaaagaaatggcagatgtccttaacccattaatcactgcagtatttctagaggcatcaaacagtgcctcctacatccaggacgcctttcagctactcttacctgtgctagagatctctctcattgagaacaagattgaatcacacagacatgagctgcagggccagaaacctttgttagaacattgaagaatggagacgttttgacct

SEQ ID NO: 131858 - DNA, 571 bp, Homo sapiens
  Payload ID: 5740
  Gene Symbol: FAM114A2
  Gene Name: family with sequence similarity 114, member A2
  ENST ID: ENST00000524246
  CDS Start-End: 526-571
gagtcggctgccgtggctgtgctgagggtggcggccggataggtgcggagcttcctgaacgaggcaggaggggtgcgaggttcaggggcagggcccgggcagccgaagtcgttagggaggcggtgacctgacggtgggcggcggacatctcgcggcagggtcgagggctgtgaaagcggtttagtgattgaagcgctacgtttgtgtgaggaattcttgtcgttgtcagcgcctgagaacttagttgggagcggacgtttacgtcgaatctctcgtttgggaccccattcttgaatgtgggaagaagtgagagcgcatgtttgctcatctagagacagccgtattaataacgataggatacaaaccatcaccccaccaagtgatagcagctgttaacctgtgggcggttacgtgccggtcactgttccaagcccctcacatatcgcgtcactgaatctttatagggacccagaactccatttgacagatgaggaaacggagaggcagacagctgatgttctaatcatgtcagataaagatgatattgagactccactgctaactgaagcag

SEQ ID NO: 131859 - DNA, 609 bp, Homo sapiens
  Payload ID: 5740
  Gene Symbol: FAM114A2
  Gene Name: family with sequence similarity 114, member A2
  ENST ID: ENST00000519808
  CDS Start-End: 233-609
gctgaaggagcacttccggggcagtaggaacgccgagtcggctgccgtggctgtgctgagggtggcggccggatagggacccagaactccatttgacagatgaggaaacggagaggcagacaggtgacctgacttccccacaatcgctgcaggacaggaagaaagtaaactccagagcccgtgctcttagctactaagctgtactgctcttcattttgctgatgttctaatcatgtcagataaagatgatattgagactccactgctaactgaagcagcccccatccttgaagatggaaactgtgagccagccaagaattctgagtctgttgaccaaggtgccaaaccagagagtaaatcagaacctgtagtttccactcggaaaagaccagagaccaaaccttccagtgaccttgagacttcaaaagttctccctattcaggataatgtttccaaagatgtaccccagaccagatggggttattgggggagctggggcaagtccatactctcctcagcctcggctacagtagctacagtaggacaaggcatttcaaatgtcatcgagaaggcagagacttcccttggaatccctggtcccagtgaaat

SEQ ID NO: 131860 - DNA, 794 bp, Homo sapiens
  Payload ID: 5740
  Gene Symbol: FAM114A2
  Gene Name: family with sequence similarity 114, member A2
  ENST ID: ENST00000517605
  CDS Start-End: 604-794
atattatatgcccatatattctgaactccatagtgttgtcttaatctacctttctagcttcatgccttcccattgttcttctctctgccatggtaactactccctactgtaactgtccatgttccatactgtcagacctcaggcctttggctgtaccctcatgttatttccatatccttgaatcctgtcattggcatcatcatctgtcaaaatcataagcttcttttaaggcaggtgttgccaactcagatgcctacagaggttaatcaggtagcataatttgagtgaagtggatttgcgtgggggattgtagggagctggagagcaactgccctagctaaaagggcccagcggctatttagcacaagctagttattacagagttgaatgtgggcccggtgttgctagatcttttaattttacaagttagaagttggaagcctatatttttatatgaagtctgatttttaaatgttggcatctagtttttgcaaaggttaaatactgtgcaggccaaataaaaacatctgtaggctggatttggcacttaaattcccagtttgtgaccactactctaggcttatttcagctgatgttctaatcatgtcagataaagatgatattgagactccactgctaactgaagcagcccccatccttgaagatggaaactgtgagccagccaagaattctgagtctgttgaccaaggtgccaaaccagagagtaaatcagaacctgtagtttccactcggaaaagaccagagaccaaaccttccagtgaccttgagacttc

SEQ ID NO: 131861 - DNA, 754 bp, Homo sapiens
  Payload ID: 5740
  Gene Symbol: FAM114A2
  Gene Name: family with sequence similarity 114, member A2
  ENST ID: ENST00000522395
  CDS Start-End: 125-754
ctgcgctgaaggagcacttccggggcagtaggaacgccgagtcggctgccgtggctgtgctgagggtggcggccggataggtgcggagcttcctgaacgaggcaggagggctgatgttctaatcatgtcagataaagatgatattgagactccactgctaactgaagcagcccccatccttgaagatggaaactgtgagccagccaagaattctgagtctgttgaccaaggtgccaaaccagagagtaaatcagaacctgtagtttccactcggaaaagaccagagaccaaaccttccagtgaccttgagacttcaaaagttctccctattcaggataatgtttccaaagatgtaccccagaccagatggggttattgggggagctggggcaagtccatactctcctcagcctcggctacagtagctacagtaggacaaggcatttcaaatgtcatcgagaaggcagagacttcccttggaatccctggtcccagtgaaatttcaactgaagtcaagtatgtagcaggagagacaaatgccaaagagaatgaaaactcctccccagtggctggggcatttggtgtattctctaccatctctactgctgttcagagcacaggaaagagtgttataagtgggggtttggatgccttagaattcattggaaaaaagacaatggatgtgatagcagaaggggatcctggatttaaaagaaccaagggtctgatgaaccgaaatgctacactatctcag

SEQ ID NO: 131862 - DNA, 2121 bp, Homo sapiens
  Payload ID: 5740
  Gene Symbol: FAM114A2
  Gene Name: family with sequence similarity 114, member A2
  Uniprot ID: Q9NRY5
  ENST ID: ENST00000520667
  CDS Start-End: 127-1644
acttccggggcagtaggaacgccgagtcggctgccgtggctgtgctgagggtggcggccggatagggacccagaactccatttgacagatgaggaaacggagaggcagacagctgatgttctaatcatgtcagataaagatgatattgagactccactgctaactgaagcagcccccatccttgaagatggaaactgtgagccagccaagaattctgagtctgttgaccaaggtgccaaaccagagagtaaatcagaacctgtagtttccactcggaaaagaccagagaccaaaccttccagtgaccttgagacttcaaaagttctccctattcaggataatgtttccaaagatgtaccccagaccagatggggttattgggggagctggggcaagtccatactctcctcagcctcggctacagtagctacagtaggacaaggcatttcaaatgtcatcgagaaggcagagacttcccttggaatccctggtcccagtgaaatttcaactgaagtcaagtatgtagcaggagagacaaatgccaaagagaatgaaaactcctccccagtggctggggcatttggtgtattctctaccatctctactgctgttcagagcacaggaaagagtgttataagtgggggtttggatgccttagaattcattggaaaaaagacaatggatgtgatagcagaaggggatcctggatttaaaagaaccaagggtctgatgaaccgaaatgctacactatctcaggttttacgagaggcgaaggagaaagaagagatacggacctccaatgaggttaccgtggaaacagacaagaaaactcattatgggctactctttgatgaatttcaaggcctttcacatctagaagctctggagatgctttcccaagaaagtgaaataaaggtgaaatctatccttaattctctgagtggagaagaattagagactctaaaagttgaattagagcaactcaaagaaacattttctctagcagaattttgtgaagaagaggaagaagagaaaaaaggggatgaagattttaccaaggacataacagagctgttttcccagctgcacgtttcctccaaaccagagaaacttgccagggcaagaaataccgcccacgaatggatcaggaagtctctgaccaagccattagcagagaatgaagaaggagaaaaacagtcggaagcagaaaatactgagcaagtcaacaaaaattcaatagaggatatccatgcgtttgcaatccggagcctggctgaactgactgcctgctcaattgaactattccacaaaacagctgcattggttctgcatggcaggaagcaggaagtgacagccatagaaaggagccaaactctttcccagatgacaattgtgttgtgtaaagagttgtcctctctgtctaaagagttcactacctgcctaacaactgctggggtcaaagaaatggcagatgtccttaacccattaatcactgcagtatttctagaggcatcaaacagtgcctcctacatccaggacgcctttcagctactcttacctgtgctagagatctctctcattgagaacaagattgaatcacacagacatgagctgcagggccagaaacctttgttagaacattgaagaatggagacgttttgacctgggacttgtgacggccaaggaatgccaccttattctggctactcctgcagaaatgaaggagtggggttattttagtatataaaaattcaggcaggagagatggtttaaagaggaagattgttgccttcagtgtttgattgaagtattcaggttctcacagtattctttccagttgttgtaattcataaattatttgaaaagaaacttttgtagaaagtccaagaataataactctagataaagattagtgggacactcaggcaaaaatgttggtctttctttgacatgttgcaaaatgttatcaattttgtcatggatataatttgcagcccatggatataactggttgataagccagagaaaaataatttagtgttctaaaattcatggcatgtgtggtttattaatgccatgtactttctcctttctggaataaaatctatggctttaagaaaa

SEQ ID NO: 131863 - DNA, 3379 bp, Homo sapiens
  Payload ID: 5740
  Gene Symbol: FAM114A2
  Gene Name: family with sequence similarity 114, member A2
  Uniprot ID: Q9NRY5
  ENST ID: ENST00000522858
  CDS Start-End: 589-2106
ggccggataggtgcggagcttcctgaacgaggcaggaggggtgcgaggttcaggggcagggcccgggcagccgaagtcgttagggaggcggtgacctgacggtgggcggcggacatctcgcggcagggtcgagggctgtgaaagcggtttagtgattgaagcgctacgtttgtgtgaggaattcttgtcgttgtcagcgcctgagaacttagttgggagcggacgtttacgtcgaatctctcgtttgggaccccattcttgaatgtgggaagaagtgagagcgcatgtttgctcatctagagacagccgtattaataacgataggatacaaaccatcaccccaccaagtgatagcagctgttaacctgtgggcggttacgtgccggtcactgttccaagcccctcacatatcgcgtcactgaatctttatagggacccagaactccatttgacagatgaggaaacggagaggcagacaggtgacctgacttccccacaatcgctgcaggacaggaagaaagtaaactccagagcccgtgctcttagctactaagctgtactgctcttcattttgctgatgttctaatcatgtcagataaagatgatattgagactccactgctaactgaagcagcccccatccttgaagatggaaactgtgagccagccaagaattctgagtctgttgaccaaggtgccaaaccagagagtaaatcagaacctgtagtttccactcggaaaagaccagagaccaaaccttccagtgaccttgagacttcaaaagttctccctattcaggataatgtttccaaagatgtaccccagaccagatggggttattgggggagctggggcaagtccatactctcctcagcctcggctacagtagctacagtaggacaaggcatttcaaatgtcatcgagaaggcagagacttcccttggaatccctggtcccagtgaaatttcaactgaagtcaagtatgtagcaggagagacaaatgccaaagagaatgaaaactcctccccagtggctggggcatttggtgtattctctaccatctctactgctgttcagagcacaggaaagagtgttataagtgggggtttggatgccttagaattcattggaaaaaagacaatggatgtgatagcagaaggggatcctggatttaaaagaaccaagggtctgatgaaccgaaatgctacactatctcaggttttacgagaggcgaaggagaaagaagagatacggacctccaatgaggttaccgtggaaacagacaagaaaactcattatgggctactctttgatgaatttcaaggcctttcacatctagaagctctggagatgctttcccaagaaagtgaaataaaggtgaaatctatccttaattctctgagtggagaagaattagagactctaaaagttgaattagagcaactcaaagaaacattttctctagcagaattttgtgaagaagaggaagaagagaaaaaaggggatgaagattttaccaaggacataacagagctgttttcccagctgcacgtttcctccaaaccagagaaacttgccagggcaagaaataccgcccacgaatggatcaggaagtctctgaccaagccattagcagagaatgaagaaggagaaaaacagtcggaagcagaaaatactgagcaagtcaacaaaaattcaatagaggatatccatgcgtttgcaatccggagcctggctgaactgactgcctgctcaattgaactattccacaaaacagctgcattggttctgcatggcaggaagcaggaagtgacagccatagaaaggagccaaactctttcccagatgacaattgtgttgtgtaaagagttgtcctctctgtctaaagagttcactacctgcctaacaactgctggggtcaaagaaatggcagatgtccttaacccattaatcactgcagtatttctagaggcatcaaacagtgcctcctacatccaggacgcctttcagctactcttacctgtgctagagatctctctcattgagaacaagattgaatcacacagacatgagctgcagggccagaaacctttgttagaacattgaagaatggagacgttttgacctgggacttgtgacggccaaggaatgccaccttattctggctactcctgcagaaatgaaggagtggggttattttagtatataaaaattcaggcaggagagatggtttaaagaggaagattgttgccttcagtgtttgattgaagtattcaggttctcacagtattctttccagttgttgtaattcataaattatttgaaaagaaacttttgtagaaagtccaagaataataactctagataaagattagtgggacactcaggcaaaaatgttggtctttctttgacatgttgcaaaatgttatcaattttgtcatggatataatttgcagcccatggatataactggttgataagccagagaaaaataatttagtgttctaaaattcatggcatgtgtggtttattaatgccatgtactttctcctttctggaataaaatctatggctttaagaaaactgagcatatgtaaactctgtgatgattaccctttatcacatgaattcttggaaatagaaagtttcatctgcttttttaaattcttagtagatatttggcattgaggagaaacttgtagactattatagccatgtgaattaactgtagcaaagtgccctttttcttcaaattgctccccctccccaggatgacacacttcatgtcatagctgaaccctactctactggattcaaggccagtaaatgcaatttagagaagcagttttatgtttgcagatattctgagtctcttcaggatgtgtttcgtgtctaccatatatgcaggataaattctttaacagcaaactccaaaggaatgttgaagctgttttagcaatgaggatttttttgtttgagtgttgaagtgggccatagtcctttagaaatgatgttcatttatgataggatttaacttctaaggcatagtttattttttcctctttcctttttgtttgttttaatgtattctttagcatgtttttgatataacttttatcctccagatcttaagctttcttttgctctcttcagcaatttaagagactattaagctgtcgtcttcctaaaagctattttggtatccactctttttaaaaaaattctccaactttgtggttttttaatgattaaggtaatttgttagctctgcccctcatcttctaaaacctttgtaataaaatgtattaatcatgttatttgatcctttcatttacttttgtaaacacgagccctaatatcttacttagaccaaaaaaaa

SEQ ID NO: 131864 - DNA, 2044 bp, Homo sapiens
  Payload ID: 5740
  Gene Symbol: FAM114A2
  Gene Name: family with sequence similarity 114, member A2
  ENST ID: ENST00000616320
  CDS Start-End: 58-807
cgagtcggctgccgtggctgtgctgagggtggcggccggatagctgatgttctaatcatgtcagataaagatgatattgagactccactgctaactgaagcagcccccatccttgaagatggaaactgtgagccagccaagaattctgagtctgttgaccaaggtgccaaaccagagagtaaatcagaacctgtagtttccactcggaaaagaccagagaccaaaccttccagtgaccttgagacttcaaaagttctccctattcaggataatgtttccaaagatgtaccccagaccagatggggttattgggggagctggggcaagtccatactctcctcagcctcggctacagtagctacagtaggacaaggcatttcaaatgtcatcgagaaggcagagacttcccttggaatccctggtcccagtgaaatttcaactgaagtcaagtatgtagcaggagagacaaatgccaaagagaatgaaaactcctccccagtggctggggcatttggtgtattctctaccatctctactgctgttcagagcacaggaaagagtgttataagtgggggtttggatgccttagaattcattggaaaaaagacaatggatgtgatagcagaaggggatcctggatttaaaagaaccaagggtctgatgaaccgaaatgctacactatctcaggttttacgagaggcgaaggagaaagaagagatacggacctccaatgaggttaccgtggaaacagacaagaaaactcattatgggctactctttgatgaatttcaaggccttcacatctagaagctctggagatgctttcccaagaaagtgaaataaaggtgaaatctatccttaattctctgagtggagaagaattagagactctaaaagttgaattagagcaactcaaagaaacattttctctagcagaattttgtgaagaagaggaagaagagaaaaaaggggatgaagattttaccaaggacataacagagctgttttcccagctgcacgtttcctccaaaccagagaaacttgccagggcaagaaataccgcccacgaatggatcaggaagtctctgaccaagccattagcagagaatgaagaaggagaaaaacagtcggaagcagaaaatactgagcaagtcaacaaaaattcaatagaggatatccatgcgtttgcaatccggagcctggctgaactgactgcctgctcaattgaactattccacaaaacagctgcattggttctgcatggcaggaagcaggaagtgacagccatagaaaggagccaaactctttcccagatgacaattgtgttgtgtaaagagttgtcctctctgtctaaagagttcactacctgcctaacaactgctggggtcaaagaaatggcagatgtccttaacccattaatcactgcagtatttctagaggcatcaaacagtgcctcctacatccaggacgcctttcagctactcttacctgtgctagagatctctctcattgagaacaagattgaatcacacagacatgagctgcagggccagaaacctttgttagaacattgaagaatggagacgttttgacctgggacttgtgacggccaaggaatgccaccttattctggctactcctgcagaaatgaaggagtggggttattttagtatataaaaattcaggcaggagagatggtttaaagaggaagattgttgccttcagtgtttgattgaagtattcaggttctcacagtattctttccagttgttgtaattcataaattatttgaaaagaaacttttgtagaaagtccaagaataataactctagataaagattagtgggacactcaggcaaaaatgttggtctttctttgacatgttgcaaaatgttatcaattttgtcatggatataatttgcagcccatggatataactggttgataagccagagaaaaataatttagtgttctaaaattcatggcatgtgtggtttattaatgccatgtactttctcctttctggaataaaatctatggcttt

SEQ ID NO: 131865 - DNA, 2365 bp, Homo sapiens
  Payload ID: 5741
  Gene Symbol: FAM117A
  Gene Name: family with sequence similarity 117, member A
  Uniprot ID: Q9C073
  ENST ID: ENST00000240364
  CDS Start-End: 81-1442
cagcagataagcagcggcctcgggggttggggggctgtgtgagtctcgcagtggggctgaggcaggcagccgggagagccatggcgggggccgcagcgggcggcagaggcggaggtgcctgggggccggggcgcggaggggccggggggctccggcggggctgctctcccccagcccccgccggctccccccgggctgggctgcagccgctcagggccacgatccccttccagctgcagcagccgcaccagcgccgggacgggggtggccgtgcagccagcgtcccatgctcggtggccccagaaaagtcagtgtgtaggcctcagccacttcaggtccggcgtacattctccctggacaccatcctcagctcctaccttctgggccagtggccacgagatgctgatggggccttcacctgctgcaccaatgacaaggccacccagacgcccctgtcctggcaagagctagaaggtgagcgtgccagttcctgtgcacacaagcgctcagcatcctggggcagcacagaccaccgaaaagagatttccaagttgaagcaacaactgcagaggacgaagctgagccgcagtgggaaagagaaggagcgaggttcaccactcctaggggaccacgcagtgcggggagcactgagggcgtcccctcccagcttcccctcagggtcccctgtcttgcgactcagcccctgcctgcacaggagcctggaagggctcaaccaagagctggaggaggtatttgtgaaggagcagggagaagaggagctgctgaggatccttgatatccctgatgggcaccgggccccagctcctccccagagtggcagctgtgatcatcccctcctcctcctggagcctggcaaccttgccagctctccttccatgtccttggcatctccccagccttgtggcctggccagtcatgaggaacatcggggtgccgccgaggagctggcatccacccccaacgacaaagcctcctctccaggacacccagcctttcttgaagatggcagcccatctccagtccttgcctttgctgcctcccctcgacctaatcatagctacatcttcaaacgggagcccccagaaggctgtgagaaagtgcgtgtgtttgaagaagccacgtctccaggtcctgacctggccttcctgacttcctgtcctgacaagaacaaagtccatttcaacccgactggctcagccttctgccccgtcaacctgatgaagcccctcttccccggcatgggcttcatcttccgtaactgcccctcaaacccgggatctccccttcccccggccagccccaggccaccacctcggaaggatccggaagcctccaaggcctccccactgccattcgagccatggcagcgcaccccaccatcagaagagcctgtgcttttccagagctccctgatggtctgagggtcccacccctgccccactttaccatagagaccagtgccttggtggcaggtccctccccaggtcccctgagatggggtatggaggggcccttccctctcggccttcgagcactttctttcacttactgtgtcaaagccctgggtcctctttttgatgggcaccggcccctctgaacgtgatgggacctgccttctccactagtagctgggcagctcacaattcacacctgtgtacctgccacatccctcacttggtggaaaacacccagaaggtcttgagtcccccacccctgggtgtcagtccaaatgactgtataggaggcccttatttttgtcacagagcaagctggccatgaacgaaggagagaagacgccacagatttccttccctctcctccaggagaccataagatagatcccccatcctctcagccctattcccatgcctccctctcattggaggagctgaccaaagcagccctaacgggccataacacttgaccaattcagctgctggcagagggaggaaacaagtgttttcccaagtggcattttcatctcgctttcaccctgactaaagattgtcttaagtagcagcccagcccgcccagccccaggtgggtagtggggaggagagctggcattcctccaggtggcaaatggcgactctatactctccgcccgccccagggctggatggattagaaaaatgcctatttttcttgtatcgatgtagagactctattttctcccaaagacactatttttgcagctgtttgaagtttgtatattttccgtactgcagagcttacacaaaattgaagaatgttaatgttcgagttttcttatcttgtgtttagaggttgttttttgcagatcttggtgttaatagaccaaataaataaataaatattcccagca

SEQ ID NO: 131866 - DNA, 714 bp, Homo sapiens
  Payload ID: 5741
  Gene Symbol: FAM117A
  Gene Name: family with sequence similarity 117, member A
  ENST ID: ENST00000506156
  CDS Start-End: 45-714
gtgtgagtctcgcagtggggctgaggcaggcagccgggagagccatggcgggggccgcagcgggcggcagaggcggaggtgcctgggggccggggcgcggaggggccggggggctccggcggggctgctctcccccagcccccgccggctccccccgggctgggctgcagccgctcagggccacgatccccttccagctgcagcagccgcaccagcgccgggacgggggtggccgtgcagccagcgtcccatgctcggtggccccagaaaagtcagtgtgtaggcctcagccacttcaggtccggcgtacattctccctggacaccatcctcagctcctaccttctgggccagtggccacgagatgctgatggggccttcacctgctgcaccaatgacaaggccacccagatttccaagttgaagcaacaactgcagaggacgaagctgagccgcagtgggaaagagaaggagcgaggttcaccactcctaggggaccacgcagtgcggggagcactgagggcgtcccctcccagcttcccctcagggtcccctgtcttgcgactcagcccctgcctgcacaggagcctggaagggctcaaccaagagctggaggaggtatttgtgaaggagcagggagaagaggagctgctgaggatccttgatatccctgatgggcaccgggccccagctcctccccagagtggcagctgtg

SEQ ID NO: 131867 - DNA, 789 bp, Homo sapiens
  Payload ID: 5741
  Gene Symbol: FAM117A
  Gene Name: family with sequence similarity 117, member A
  ENST ID: ENST00000511743
  CDS Start-End: 99-789
ctagcctgcatttctctttccatcctctcgcatatcccagaagaaagaggtacttgaagagtttgcaagagatattagtagtacccgtggcggcctgaatgtggctgttttttcctctctgttaccacccacctacgcccctgtcctggcaagagctagaaggtgagcgtgccagttcctgtgcacacaagcgctcagcatcctggggcagcacagaccaccgaaaagagatttccaagttgaagcaacaactgcagaggacgaagctgagccgcagtgggaaagagaaggagcgaggttcaccactcctaggggaccacgcagtgcggggagcactgagggcgtcccctcccagcttcccctcagggtcccctgtcttgcgactcagcccctgcctgcacaggagcctggaagggctcaaccaagagctggaggaggtatttgtgaaggagcagggagaagaggagctgctgaggatccttgatatccctgatgggcaccgggccccagctcctccccagagtggcagctgtgatcatcccctcctcctcctggagcctggcaaccttgccagctctccttccatgtccttggcatctccccagccttgtggcctggccagtcatgaggaacatcggggtgccgccgaggagctggcatccacccccaacgacaaagcctcctctccaggacacccagcctttcttgaagatggcagcccatctccagtccttgcctttgctgcctcccctcgacctaatcatagctacatcttcaaacgggagcccc

SEQ ID NO: 131868 - DNA, 1522 bp, Homo sapiens
  Payload ID: 5741
  Gene Symbol: FAM117A
  Gene Name: family with sequence similarity 117, member A
  Uniprot ID: Q9C073
  ENST ID: ENST00000513602
  CDS Start-End: 717-1262
agttcgatccttttggtgaagctagtgggcgccattttgaagttgggcagaaagtgactccagtggtggaacccggagccaaccatttttagttacccagcgtcccatgctcggtggccccagaaaagtcagtgtgtaggcctcagccacttcaggtccggcgtacattctccctggacaccatcctcagctcctaccttctgggccagtggccacgagatgctgatggggccttcacctgctgcaccaatgacaaggccacccagacgcccctgtcctggcaagagctagaaggtgagcgtgccagttcctgtgcacacaagcgctcagcatcctggggcagcacagaccaccgaaaagagatttccaagttgaagcaacaactgcagaggacgaagctgagccgcagtgggaaagagaaggagcgaggttcaccactcctaggggaccacgcagtgcggggagcactgagggcgtcccctcccagcttcccctcagggtcccctgtcttgcgactcagcccctgcctgcacaggagcctggaagggctcaaccaagagctggaggaggtatttgtgaaggagcagggagaagaggagctgctgaggatccttgatatccctgatgggcaccgggccccagctcctccccagagtggcagctgtgatcatcccctcctcctcctggagcctggcaaccttgccagctctccttccatgtccttggcatctccccagccttgtggcctggccagtcatgaggaacatcggggtgccgccgaggagctggcatccacccccaacgacaaagcctcctctccaggacacccagcctttcttgaagatggcagcccatctccagtccttgcctttgctgcctcccctcgacctaatcatagctacatcttcaaacgggagcccccagaaggctgtgagaaagtgcgtgtgtttgaagaagccacgtctccaggtcctgacctggccttcctgacttcctgtcctgacaagaacaaagtccatttcaacccgactggctcagccttctgccccgtcaacctgatgaagcccctcttccccggcatgggcttcatcttccgtaactgcccctcaaacccgggatctccccttcccccggccagccccaggccaccacctcggaaggatccggaagcctccaaggcctccccactgccattcgagccatggcagcgcaccccaccatcagaagagcctgtgcttttccagagctccctgatggtctgagggtcccacccctgccccactttaccatagagaccagtgccttggtggcaggtccctccccaggtcccctgagatggggtatggaggggcccttccctctcggccttcgagcactttctttcacttactgtgtcaaagccctgggtcctctttttgatgggcaccggcccctctgaacgtgatgggacctgccttctccactagtagctgggcagctcacaattcacacctgtgtacctgccacatccctcacttggtgg

SEQ ID NO: 131869 - DNA, 776 bp, Homo sapiens
  Payload ID: 5741
  Gene Symbol: FAM117A
  Gene Name: family with sequence similarity 117, member A
  ENST ID: ENST00000503573
  CDS Start-End: 1-168
gcgtcccctcccagcttcccctcagggtcccctgtcttgcgactcagcccctgcctgcacaggagcctggaagggctcaaccaagagctggaggaggtatttgtgaaggagcagggagaagaggagctgctgaggagcccagggcacagaaggtccctgccctcatgaggcttatagtcttatggggacaacacattgatcaagccctacagatccttgatatccctgatgggcaccgggccccagctcctccccagagtggcagctgtgatcatcccctcctcctcctggagcctggcaaccttgccagctctccttccatgtccttggcatctccccagccttgtggcctggccagtcatgaggaacatcggggtgccgccgaggagctggcatccacccccaacgacaaagcctcctctccaggacacccagcctttcttgaagatggcagcccatctccagtccttgcctttgctgcctcccctcgacctaatcatagctacatcttcaaacgggagcccccagaaggctgtgagaaagtgcgtgtgtttgaagaagccacgtctccaggtcctgacctggccttcctgacttcctgtcctgacaagaacaaagtccatttcaacccgactggctcagccttctgccccgtcaacctgatgaagcccctcttccccggcatgggcttcatcttccgtaactgcccctcaaacccgggatctccccttcccccggccagccccaggccaccacctcggaaggatccggaagcc

SEQ ID NO: 131870 - DNA, 5763 bp, Homo sapiens
  Payload ID: 5742
  Gene Symbol: FAM117B
  Gene Name: family with sequence similarity 117, member B
  Uniprot ID: Q6P1L5
  ENST ID: ENST00000392238
  CDS Start-End: 1-1770
atgtcccagcgggtgaggcgcaatgggtcccccacgccggccggctcccttgggggtggtgcggtggccacggccgggggacccgggagccgcttgcagcccatgagggcgacggttccgttccagctgaagcagcagcagcagcagcaacatggcagccccacgcggagcggcggcggcggcggcggcaacaacaacggtggctgctgtggtggcgcctcaggccccgcaggcggcggcggcggcggtggcccgcgcaccgcctcgcgcagcaccagccccacgcgcggcggcgggaacgcggccgcgcgcaccagccccacggtggccacgcagacgggcgcgtccgcgacgtccacgcgaggcaccagccccacgcgcagcgccgcgcctggagctcgcgggagccccccacggccgccgccgccgccgccgctgctgggcaccgtgtcgtcgcccagctcgtcgcccacccacctgtggaccggcgaggtgagcgcggccccacccccagcccgcgtccggcatcggaggaggtctccggagcagagccgaagctcgccggagaagaggagccccagcgccccggtttgcaaagcaggtgacaaaacacgacagccttcttcaagcccctccagtattatccgacgcacttcctccctggatactcttgctgcaccgtatcttgctggacactggcctcgggatagccatgggcaagctgcaccttgcatgagggacaaagctacacagacagagagtgcatgggctgaagaatactctgaaaagaagaaagggtctcacaagcgctcagcatcttggggcagtacagatcaacttaaggagattgcaaaattacgccagcagttgcagagaagtaaacacagcagtcggcatcatcgagataaagaaagacagtctccatttcatggcaaccatgcagctattaaccagtgtcaggctcctgttccaaagagtgcacttattcctgtaattcccatcaccaaatcaacaggctcccggttccggaatagcgtggaaggattgaatcaggagattgaaataataattaaagagactggggaaaaggaagagcaacttataccgcaagatattccagatggccatcgtgctccacccccccttgtacagagaagtagcagcacgcgcagcattgacacacagacgcctggtggggcagacaggggaagcaacaacagcagccgttcccagtccgtgtccccaacatcgttcctcaccatttccaatgaaggtagcgaggagagtccttgctcagcggatgacctgcttgttgatcccagagataaagagaatgggaacaattctcctttgcccaaatatgcaacctcaccaaaacctaacaacagttatatgttcaaaagggaacctcctgagggctgtgaaagggtcaaagtctttgaggaatgctcgccaaaacagcttcatgaaatcccagccttttattgtcctgacaaaaacaaggtgaatttcattcctaaaagtggatctgctttctgcctcgtcagcatcctcaagccactccttcctaccccggatcttacactcaagggctctggccacagcctgacagtcaccactggcatgacaaccactctgctgcagcctattgctgtggcctccctgtctacaaacacagagcaagaccgagtctctcgaggaacaagtacagtcatgccatcagcttctctactcccaccaccagaaccaattgaggaagctgaaggataggtcacagtgcaacgtggctgttgttctgggaaattgggaacctcctcagatcactggattctgatggcatcgtgcgcttctggtcggctgtgatgtgctccagctttccagtgacatgtgacggcgaggcttctggaagaaaggatcccccgtgacggctctgccccacttgtgaacgccaaccctcagtgcttagcctgctttttatcaaagcactgattgaaacaagaaaggtctcattctttacctttggagagacaatatcacgtttttgttttcgaattagacttctttaaaacacacacacacacacacacacacacacacacacacacacacacacccctgatccttgccaacatgattcctaaagggagatgtgactgatgctgcaagaaccatcttttctatgaaaatgactattttataatataccaatgttacattttctgaaacgtagcaaacaggatattcaaaagattctttggtggcctctgtttcttgttccctttctagatgtgtgcttttctcagctgttttcagctttgggaccaaagggattgttgacgttttcccagcaatcttaatctcatgactatgttcttctcccaaacaaggattgataggtaaatgcattgaacaagtatatataaaaagagattaaaaagcaatattcgtacattatgtgatttatgtttttgatgtcaaaagtttgtgctttgggtgaaatatttgtataactgctgttttcttcactactcctgtacacatttcaccatgtggtcagaaaagttgtagtctgaagacaagtgctttaatatgttctcacccatattggaacttgatttaaaagtcagtgagccaaaaggaagctatccagcgttgattgctagctaagagtaaggagcccctttggttttctgtgatatatatatatatcacacgctctccctcctttaccacaggtgtcattctacctttaatcatcactgtatcatagccccaaagagatcctgaaatggctgtgcatggatttcctcctttgcccttgtgatgttgttgtcttgtggatttggttgggctagtagtttgccaggagtgtaatccagtggatagtgatccaaactgtagccgcagaatcctgtgactgacatttttctttgtggtggtggttggccctgagatttgttgcctacagattttgctaatttacccccctaacgcttcacatagtggggaaaatacacaagaagaacttgagtatgaacgataagcacctttgaaaactccatacagttttggattagggctcatcctaatataaatcactgccagtatcacatgacatcagtatgtgatttctgggtatgtggtagtgagattaaggagcagcttttttttttttttttttttgagacggagtttcactcttgttgcccaggctggagtgcaatggcgcaatctcggctcactgcgacctctgtctcccaggttcaagcagttctcctgcctcagcctcccaagtagctgggattacaggcatgcaccaccacacccagctaattttgtatttttagtatatatggggtttcaccatgttggtcaggctgttcttgaactcctggcctcaggtgatctgctcgtcttggcctcccaaagtgctgggattacaggtgtgagccaccacgcccatccaggagcagctctttttttaaaagtgagtttcagcaaacagtattgaataaaagcatccttttcatatcttcatatactactttatgatgcaataatttactgttcctatacatattataaggtagaaaaaagtttttaaatccttataaagaggatgcagtttagaaggttaatatgtcagcttacccagacatattctatcaaggaaaacctagtggtagcaataaatctttggaaaggacttcttatactcatgtacctttaaaacatctaagcaatttaaaataatccctgttgagtttaaattcgagatgcatttaggtaaattggataaattcaacatttgaataaatccgtcaggttttagatggtgggattgatgaactttggtactttctcaatccaaaactaatttatttggaactagtacgttatggcttctcagtcatgaaaagctcagttatttggggtctacattttctcactgagagccttgatattttgccttctttgttatgcattataacttgactgtatcaccactgagtatctgctgtatcagaagttcagaagaaaaggtaaaactgaaatcagaatgggggtagaggaagttaaaaacaagttatttaaaaagaactcttggtttttggatgacttgaattctgttaaatctgtgttcttggccttgcacttccgttcctcttccatctctatccctgctagtcacaatggcattttagaactagaatgccactctgtagaggttttcccttttgctctgttgtgcctatttgtctaattcatatctttctgtggagtttcatatgtccttaatctaaagtaacttaaaattggaatggaagaacaagtttcagaattatttacagtcttatacatagaacttctagtgtaatgtttggttgtaaggagaatgtgaatttgcaggtaaatgaattgtatggcaaccagacagatccctggggtttgggagaaatagagcttgagatttgaaaaaaaggtacaaggtacaaaacaactctaactgccagtgccaaagggctaatttttaagcatgtaagctttaccacagtcttgaaaaaaatattaaccataggttcattcagctgttttatttaacccttagttccctggtggttgattttttttttaaatgggtctccagctttccagtgaaatgtgacactctcaatagaatgcataatgttggtttctaaagttacactccataattattgttattctgtagaaaactgtacagaaggtaaatagaatagcttcaatgggaatataatttaaatttttttaattttataaaaatttatttccattgcattaaaagaaatgggtagcatgtgtctttcagagaaaggagctatttggttattcactttgtcaatcttaggtttttttaaatctttaaacaatttcttctttgtgatgataaaaataatataaatttactgtttctgatcatgactgagtctattacttgtcatggcttttgtacgcaactgtgttttaaaaataccggttttgcctctttggttacatgtggtgagcatggatgtcaagattatttttcaactagattattcaatttgttttatatttcttatacttaatacttatgactacagtccaaatcagtcttttagaaggtgctcttgctaactgtggaatatttgacgacatgaaagtcctttttctttgctttcagtggttggctttcactgaaagaaagtgtaaaaaaagtcagaatttatagctttcactatgtccaagactaggactgggttataaagattttcttttgtgaaggaaaataaaagaaaatttgccactactgcatttactttactattgtaaacttaagattcattccttagtctttggaattttgatgtctcaaaaccagatgagtggaagtgctgaatttgcaaaataaagctaagaatgcttaactctgcactttaagttctactctgaccaaattgaagatgagcagagcagccctgaacagcattttgtttatacagtcttgtttaagaatagaatttttttaactcttcattttttgtctctgtggaagctgtgtaactctttttaaaatgcaatttaaaacattttgttattctaacaattctctcaaaaaacagcatttccaatggtaatcggtattgttacgctgtacttatgtattccctgtacctgaacacttgttgctgcctcacaagaaaatagaacttttatgttaaaaataaagtctgttcttcttga

SEQ ID NO: 131871 - DNA, 3458 bp, Homo sapiens
  Payload ID: 5743
  Gene Symbol: FAM118A
  Gene Name: family with sequence similarity 118, member A
  Uniprot ID: Q9NWS6
  ENST ID: ENST00000216214
  CDS Start-End: 835-1908
aaaagacttcagtggcagacaaaggaggagtaataagatcgctagggggcccgtgcccagcccacccacgcacaatctcagtcctcgcaatacccacaaggtaggtgctaggatcacaccctttacggacgcggcacctgcgacagggatgcgcgaggagtcagggggcctcgccggatcgaacctaagctggggaagagtatttcttgtatttttaggagaaattctcagcctcggggaagagtatttcttgatgagggaagagcgcggggaagacactcacgcacgcacaaacatgtgggcggccatggtgtgcccagcgccgtgctggcttctgggaacccccagtggacaagacggacaaggtaccggctctcaggggaagtgggagccagtcacaagcgtacctaatttcggagagtgacaagtactctgaaaaagaaagaaggtagggctggtgactggccaatttaagcgggcaggagtctgctgggggacggagaccagcctcaggtctgggttggggacagaagctgtgcctaagtgtggtgcaggatgcagttgcaaaggagcgcttccgatcgcacttgatgctcgccacgtccctgcaaagtgctcccgccccctttctgcaaatgaggaaacgggacgcgcggctcgccgggccagcccgcgtgcctgcgcagtcccctccccgagaaccatccccttgccccgcccagcgtcaggggtgcgcggccgccgagagaccccggaggcgtagccggctgcggaggcgaagaggtggcagcgcgagctgggaccagcgtctcggaggcgccgcagaattcacagatggattcagtggaaaagacaacaaatagaagtgaacaaaaatccagaaagtttttaaaaagcctcatccggaaacagccccaggaactgctcctggttatcgggactggcgtcagcgcagcagtggcccccggaatccctgccctttgctcgtggagaagctgcatcgaggccgtcatcgaggctgcagagcagctggaggtgctgcaccccggagacgtcgccgagttccggaggaaagtgacaaaggaccgggacctgttggttgtcgcccatgatctgatccggaagatgtcacctcgcacaggcgatgccaagcccagcttcttccaggactgcctgatggaggtgtttgacgacctggagcagcacatccggagtcctgtggtgctgcagtcgatcctcagcctgatggacaggggcgccatggtcctgaccaccaactatgacaacctgctggaggcctttggccggcggcagaacaagcccatggagtccctggacttgaaggacaagaccaaggtccttgaatgggcaagagggcacatgaagtacggcgtcctccacattcacggcctctacacggacccctgcggggtggtgctggacccatcggggtataaagacgtcactcaagacgcagaagtcatggaagtcctccagaacttataccgcaccaagtcctttctgtttgtgggctgtggggagacccttcgtgatcagatattccaggccctctttctttactccgtgccgaataaggtggatttggagcactacatgcttgtgctgaaggagaatgaagaccatttctttaagcatcaggcagatatgcttctgcacggaatcaaagttgtatcctacggggactgttttgaccactttccaggatatgtgcaagaccttgccactcagatctgcaaacagcaaagcccagatgctgatcgcgtggacagcaccacattattgggtaatgcatgccaggactgtgcaaagaggaagttagaagagaatggaattgaagtttcaaaaaaacgcacacaatcagatactgatgatgctggagggtcttgaaatctttacagtaaaacctgcaacttgaaaactagccttctgtaaccacagtgcccaaacgaagaggaatgtatggagaactccacgtggatctctgattgcgaaaccgtcacatacaccaagagagccacatgggcatgtggccctcaaggctgggtgagagggctcccctgtgtgttgaactatgcaggagggtgacgcggacacatttcaggtggactttgcaaggactgatggatagctacctcagggaccagaatccgtgggaagggatggacctggtgttcccgttcccatctgacaggctctcttttgtcaaggtggtatttttcgtaataaaaggggaagagtaaagactgtccaagcaacagtagctgccaaagagaaaatacgaaatagacactttttttttttgagtcagagtctcactctgtcacccaggacagagtgcagtggtacgatctcaagctcactgcagccaccaccgcctgggctcaagtgattctcctgcctcagcctcccgagtagctgggattacaggcgtccaccaccatgcccagctaatttttttatttttagtagagttggagtttcaccatgttggccaggatggtctcgaactcttgacctcaggtgatccacccgccttggcctcccaaagtgctaggattacaggcatgagccactgcgcccagcaaaataaacacattttataatttgtatgtggaaacatgttactatagaaagcattttaaaggtacgttttaaaggtccactgttaaatagtaaagaatgaatccgctagcgaaaatgtttttagggagaacagctggatcaaaagggcttctttggaattaggttgttttagtaacttctgttccaaagaaacacaggtctgatattgctaagaactgaaatcggaggagccagaggcccttttcagtccaggccaacattgtgcacggccactgtgggactgacaaccgggatagctcaagttcgagagaccaggtttcaaacattataagttccaggctttgcaagtctttattctctggggtaatatccagtctttctgttattgtctcttaaaattctcttccatggcccacattaagggagtttgcagagagtgagggaggcaaaacttgaaaagggcctgcaacactttaaaccttctcaggttcacccacatgaaacggctgtgctgagtgtgctgccggtgcccggggagcttctctgactgtgacccggcagaggcttctgtggcggtgcatgagcggccctacagtggagggttctctttggaaacaaacagccctgcttggtttcagtttgaggccacttatcttcaatgtgacatttcttgccaagccctgtgacactccccattgatgactcccataggtacagataaagttaagaacaggaaacagaagggtaggatgcatagggagggagagaagccctgaaaactttttttttctttttgaagcatggaaaacaaatcttttatgccactccagccataaataaaattttaacttcaa

SEQ ID NO: 131872 - DNA, 1612 bp, Homo sapiens
  Payload ID: 5743
  Gene Symbol: FAM118A
  Gene Name: family with sequence similarity 118, member A
  ENST ID: ENST00000405673
  CDS Start-End: 70-678
ggctgcggaggcgaagaggtggcagcgcgagctgggaccagcgtctcggaggcgccgcagaattcacagatggattcagtggaaaagacaacaaatagaagtgaacaaaaatccagaaagtttttaaaaagcctcatccggaaacagccccaggaactgctcctggttatcgggactggcgtcagcgcagcagtggcccccggaatccctgccctttgctcgtggagaagctgcatcgaggccgtcatcgaggctgcagagcagctggaggtgctgcaccccggagacgtcgccgagttccggaggaaagtgacaaaggaccgggacctgttggttgtcgcccatgatctgatccggaagatgtcacctcgcacaggcgatgccaagcccagcttcttccaggactgcctgatggaggtgtttgacgacctggagcagcacatccggagtcctgtggtgctgcagtcgatcctcagcctgatggacaggggcgccatggtcctgaccaccaactatgacaacctgctggaggcctttggccggcggcagaacaagcccatggagtccctggacttgaaggacaagaccaaggtgtgggctggggctgcgggcagcctgcaggtgtggggagttctgtgccctgggagctgctctcactttgtagcagtgaattactaataaagtagccaggcatggtggcgcctgcctgcagtccccgctactggggaggccgaggtgggaggattgcttgagcccaggagttccagactgaaatgagctatgatcatgccacttattccagcctgggtgacagagtaagaccctttctcttaaaaaaaaaaaagtaataatggaaagtggcacactggcaacttgggaggctgaggcaggagaatagctggaactgggagggagatggttgcagtgagctgagatcactgtactccagcctgggcaagagagtgagaccctgtctcaaaaaacaaaagaaaaaaaaaaagaaatacctgagactgggtaatatataaagaaaagagctgtaattggctcacggttccacagctgtctaggaagcatagcagcatctgcttccggggaggcctcaggaagtttccaatagtggcagaaggcagagtgggagcaggcatgccacatggcaacagagagagtggcaggggggtggtgccacatgcttttaaatgaccagatttctcaagaagtcactgtcacgaagatggcacgaagccatgagggatgatcctgccccgtgatccaagcacctcccaccaggccccacctccagcactggggatcacagttcagcatgagattttcgtggggacaaatgtccagactatatcagttagcatatatttacagttataaataacactacagggtcctcatacttttatgtcctgttttcaagatgaattcctagaagagttttatggtcaaaaggtatgaatgttttaaagactgatgatgtaaattaccaaattgttttccagaaggagcaccagttacactcccggtagtggctgagtgtgggagtatccatttcctgtatcttgccaacacatggtgttattaagaaacaaaatgaaataca

SEQ ID NO: 131873 - DNA, 583 bp, Homo sapiens
  Payload ID: 5743
  Gene Symbol: FAM118A
  Gene Name: family with sequence similarity 118, member A
  ENST ID: ENST00000452238
  CDS Start-End: 495-583
agcttgctgtcctgctgaaacttctaggacctggtgccgagtgcttttgagatcaccttacttggattttggtttaaaaacaagggggagatttagggtaatttctagattattgtgagatttgactctgatgtttaggctgctgtaaaacaggaaatgagagacaggatcttgctgtattgcccaggccggtcttgaactcctgagttcaagcagtccaccttggcctcccaaaatgctgggattacaagcatgagccaccatgcctggtctgattttggaaaaattaaagaatatggagatagcttggtgaaagagacccagatggtttgggatttctgtttttatataagagcagtgtcccaagagacagcgaaaaccccagctcggagcccacagagcccatccttcatctgctcctgtgtgtgcgttttccttctgtgctgtcccgtgtagaacagcgagagtccaaccagcctgatgagtctcatgagatgaggaatggtggcttaggaagcattttggataattcacagatggattcagtggaaaagacaacaaatagaagtgaacaaaaatccag

SEQ ID NO: 131874 - DNA, 549 bp, Homo sapiens
  Payload ID: 5743
  Gene Symbol: FAM118A
  Gene Name: family with sequence similarity 118, member A
  ENST ID: ENST00000424557
  CDS Start-End: 504-549
agtattaaagtctagaggcccatctgcctattgaggttggactccgtgtggttgtgtttgaaatactgtctgaggagccagcaccagacctgcagttcaggctgagaaagaggttttgagcacttaagcgagccacagaccacccaggagtgcgagctgtggcctgttacagacaggatcttgctgtattgcccaggccggtcttgaactcctgagttcaagcagtccaccttggcctcccaaaatgctgggattacaagcatgagccaccatgcctggtctgattttggaaaaattaaagaatatggagatagcttggtgaaagagacccagatggtttgggatttctgtttttatataagagcagtgtcccaagagacagcgaaaaccccagctcggagcccacagagcccatccttcatctgctcctgtgtgtgcgttttccttctgtgctgtcccgtgtagaacagcgagagtccaaccagcctgatgagtctcatgagatgaggaatggtggcttaggaagcattttggataattcacagatgg

SEQ ID NO: 131875 - DNA, 521 bp, Homo sapiens
  Payload ID: 5743
  Gene Symbol: FAM118A
  Gene Name: family with sequence similarity 118, member A
  ENST ID: ENST00000427777
  CDS Start-End: 103-521
gttactgttttctgggatctgattggcttagacggtgtttggatgggagcagaacgctggagcttgctgtcctgctgaaacttctaggacctgaattcacagatggattcagtggaaaagacaacaaatagaagtgaacaaaaatccagaaagtttttaaaaagcctcatccggaaacagccccaggaactgctcctggttatcgggactggcgtcagcgcagcagtggcccccggaatccctgccctttgctcgtggagaagctgcatcgaggccgtcatcgaggctgcagagcagctggaggtgctgcaccccggagacgtcgccgagttccggaggaaagtgacaaaggaccgggacctgttggttgtcgcccatgatctgatccggaagatgtcacctcgcacaggcgatgccaagcccagcttcttccaggactgcctgatggaggtgtttgacgacctggagcagcacatccggagtcctgtggtgctgcagtcgatcctcagcctgatggacag

SEQ ID NO: 131876 - DNA, 1776 bp, Homo sapiens
  Payload ID: 5743
  Gene Symbol: FAM118A
  Gene Name: family with sequence similarity 118, member A
  Uniprot ID: Q9NWS6
  ENST ID: ENST00000441876
  CDS Start-End: 347-1420
cggggcggggcctccggggaccgcggggccgttggtttcgggacggaacgttcacgcggctggggcgggcgcgcgggggaagggtttgcggcggcgccgctgccggctaacgcggaggggcgcctggaggcggcgtggcgtccgctctggctccgactccggctctcgctctcgcttctagcccgcgtgcctgcgcagtcccctccccgagaaccatccccttgccccgcccagcgtcaggggtgcgcggccgccgagagaccccggaggcgtagccggctgcggaggcgaagaggtggcagcgcgagctgggaccagcgtctcggaggcgccgcagaattcacagatggattcagtggaaaagacaacaaatagaagtgaacaaaaatccagaaagtttttaaaaagcctcatccggaaacagccccaggaactgctcctggttatcgggactggcgtcagcgcagcagtggcccccggaatccctgccctttgctcgtggagaagctgcatcgaggccgtcatcgaggctgcagagcagctggaggtgctgcaccccggagacgtcgccgagttccggaggaaagtgacaaaggaccgggacctgttggttgtcgcccatgatctgatccggaagatgtcacctcgcacaggcgatgccaagcccagcttcttccaggactgcctgatggaggtgtttgacgacctggagcagcacatccggagtcctgtggtgctgcagtcgatcctcagcctgatggacaggggcgccatggtcctgaccaccaactatgacaacctgctggaggcctttggccggcggcagaacaagcccatggagtccctggacttgaaggacaagaccaaggtccttgaatgggcaagagggcacatgaagtacggcgtcctccacattcacggcctctacacggacccctgcggggtggtgctggacccatcggggtataaagacgtcactcaagacgcagaagtcatggaagtcctccagaacttataccgcaccaagtcctttctgtttgtgggctgtggggagacccttcgtgatcagatattccaggccctctttctttactccgtgccgaataaggtggatttggagcactacatgcttgtgctgaaggagaatgaagaccatttctttaagcatcaggcagatatgcttctgcacggaatcaaagttgtatcctacggggactgttttgaccactttccaggatatgtgcaagaccttgccactcagatctgcaaacagcaaagcccagatgctgatcgcgtggacagcaccacattattgggtaatgcatgccaggactgtgcaaagaggaagttagaagagaatggaattgaagtttcaaaaaaacgcacacaatcagatactgatgatgctggagggtcttgaaatctttacagtaaaacctgcaacttgaaaactagccttctgtaaccacagtgcccaaacgaagaggaatgtatggagaactccacgtggatctctgattgcgaaaccgtcacatacaccaagagagccacatgggcatgtggccctcaaggctgggtgagagggctcccctgtgtgttgaactatgcaggagggtgacgcggacacatttcaggtggactttgcaaggactgatggatagctacctcagggaccagaatccgtgggaagggatggacctggtgttcccgttcccatctgacaggctctcttttgtcaaggtggtatttttcgtaataaaaggggaagagtaaaga

SEQ ID NO: 131877 - DNA, 1616 bp, Homo sapiens
  Payload ID: 5744
  Gene Symbol: FAM118B
  Gene Name: family with sequence similarity 118, member B
  ENST ID: ENST00000360194
  CDS Start-End: 66-1118
agtgcggctgcgccggccggtagctgcagctggagcagtggcgtttggaggagactcgaaactggatggcttctacagggagccaggcctctgatatagacgagatttttggattcttcaacgatggcgaacctcccaccaaaaagcccaggaagctgcttccaagcttaaaaactaagaagcctcgagaacttgtgctagtgattggaacaggcattagtgctgcagttgcgccccaagttccagccctcaaatcctggaaggggttaattcaggccttactggatgctgccattgattttgatcttttagaagatgaggagagcaaaaagtttcagaaatgtctccatgaagacaagaacctggtccatgttgcccatgaccttatccagaaactctctcctcgtaccagtaatgttcgatccacatttttcaaggactgtttatatgaagtatttgatgacttggagtcaaagatggaagattctggaaaacagctacttcagtcagttctccacctgatggaaaatggagccctcgtattaactacaaattttgataatctcttggaactgtatgcagcagatcaggggaaacagcttgaatcccttgaccttactgatgagaaaaaggtcctcgagtgggctcaggagaagcgtaagctgagcgtgttgcatattcacggagtctacaccaaccctagtggcattgtccttcatccggctggatatcagaacgtgctcaggaacactgaagtcatgagagaaattcagaaactctacgaaaacaagtcatttcttttcctgggctgtggctggactgtggatgacaccactttccaggcccttttcttggaggctgtcaagcataaatctgacctagaacatttcatgctggttcggagaggagacgtagatgagttcaaaaagcttcgagaaaacatgctggacaaggggattaaagtcatctcctatggagatgactatgccgatcttccagaatatttcaagcgactgacatgtgagatctccacaaggggtacatcagggatggtgagagaaggtcagctaaatggctcatctgcagcacacagtgaaataagaggctgtagtacatgagcgagctagagaaatcaccaccgtttagaccaagctgtaaggccctactacagacagtgtttaacaagtaaacttacaagaacccaacacaattcccagaaagtaacaatagccagaggttgaagggcggggtagaagaggggggaatgttgcagcgtaatccttcataccacctggttcttgatattctgccgcctgttcaagttcaagaataaaagcgacagcaggacccaaatgcagctcccaacccactccccaggctagacatgcttgtgtccacacagcacaccaatgtgatacttccactgaccggctgcagctctgcatgaaggactcggggtctggatgccatggaatcactgtggctcttgttgcagttttgtactctatacttggtttttcaattaagcttaatggcttttttaaaacatgacttgaagctctagttttctagatcttttacagtgtacagtattttacataactaagctgtattaa

SEQ ID NO: 131878 - DNA, 1028 bp, Homo sapiens
  Payload ID: 5744
  Gene Symbol: FAM118B
  Gene Name: family with sequence similarity 118, member B
  ENST ID: ENST00000529731
  CDS Start-End: 66-893
agtgcggctgcgccggccggtagctgcagctggagcagtggcgtttggaggagactcgaaactggatggcttctacagggagccaggcctctgatatagacgagatttttggattcttcaacgatggcgaacctcccaccaaaaagcccaggaagctgcttccaagcttaaaaactaagaagcctcgagaacttgtgctagtgattggaacaggcattagtgctgcagttgcgccccaagttccagccctcaaatcctggaaggggttaattcaggccttactggatgctgccattgattttgatcttttagaagatgaggagagcaaaaagtttcagaaatgtctccatgaagacaagaacctggtccatgttgcccatgaccttatccagaaactctctcctgtcctcgagtgggctcaggagaagcgtaagctgagcgtgttgcatattcacggagtctacaccaaccctagtggcattgtccttcatccggctggatatcagaacgtgctcaggaacactgaagtcatgagagaaattcagaaactctacgaaaacaagtcatttcttttcctgggctgtggctggactgtggatgacaccactttccaggcccttttcttggaggctgtcaagcataaatctgacctagaacatttcatgctggttcggagaggagacgtagatgagttcaaaaagcttcgagaaaacatgctggacaaggggattaaagtcatctcctatggagatgactatgccgatcttccagaatatttcaagcgactgacatgtgagatctccacaaggggtacatcagcagggatggtgagagaaggtcagctaaatggctcatctgcagcacacagtgaaataagaggctgtagtacatgagcgagctagagaaatcaccaccgtttagaccaagctgtaaggccctactacagacagtgtttaacaagtaaacttacaagaacccaacacaattcccagaaagtaacaatagccagaggttgaagggcggggtag

SEQ ID NO: 131879 - DNA, 2402 bp, Homo sapiens
  Payload ID: 5744
  Gene Symbol: FAM118B
  Gene Name: family with sequence similarity 118, member B
  Uniprot ID: Q9BPY3
  ENST ID: ENST00000533050
  CDS Start-End: 494-1549
actgcctctagggagttctggtccctttggactcaccggctccttctttgtgtcttgttcccgtttctgggctcggagcttctccgctaatctctgggcatttatggccgtagaggcagcggcagcggcacaaaatggctttgagacgagagtgaagagactcccgcaaccttggccgtttccccggatccaggggcccgacgcgctccacctgggcgccgccatcttacaaggaagggcggggcgagccaagaccacgtggagaagggcgactacaatgaggcgggagtgggtgggccctgcaggtcacgtggtgcggggtggggcctgggcgagtcacgtggggacggtgcgcgctcagtgcggctgcgccggccggtagctgcagctggagcagtggcgtttggaggagactcggatataccttctcagaagctgcacaggaggaaagcagtgacaaagaaagaagttgtcattctttgcacgaaactggatggcttctacagggagccaggcctctgatatagacgagatttttggattcttcaacgatggcgaacctcccaccaaaaagcccaggaagctgcttccaagcttaaaaactaagaagcctcgagaacttgtgctagtgattggaacaggcattagtgctgcagttgcgccccaagttccagccctcaaatcctggaaggggttaattcaggccttactggatgctgccattgattttgatcttttagaagatgaggagagcaaaaagtttcagaaatgtctccatgaagacaagaacctggtccatgttgcccatgaccttatccagaaactctctcctcgtaccagtaatgttcgatccacatttttcaaggactgtttatatgaagtatttgatgacttggagtcaaagatggaagattctggaaaacagctacttcagtcagttctccacctgatggaaaatggagccctcgtattaactacaaattttgataatctcttggaactgtatgcagcagatcaggggaaacagcttgaatcccttgaccttactgatgagaaaaaggtcctcgagtgggctcaggagaagcgtaagctgagcgtgttgcatattcacggagtctacaccaaccctagtggcattgtccttcatccggctggatatcagaacgtgctcaggaacactgaagtcatgagagaaattcagaaactctacgaaaacaagtcatttcttttcctgggctgtggctggactgtggatgacaccactttccaggcccttttcttggaggctgtcaagcataaatctgacctagaacatttcatgctggttcggagaggagacgtagatgagttcaaaaagcttcgagaaaacatgctggacaaggggattaaagtcatctcctatggagatgactatgccgatcttccagaatatttcaagcgactgacatgtgagatctccacaaggggtacatcagcagggatggtgagagaaggtcagctaaatggctcatctgcagcacacagtgaaataagaggctgtagtacatgagcgagctagagaaatcaccaccgtttagaccaagctgtaaggccctactacagacagtgtttaacaagtaaacttacaagaacccaacacaattcccagaaagtaacaatagccagaggttgaagggcggggtagaagaggggggaatgttgcagcgtaatccttcataccacctggttcttgatattctgccgcctgttcaagttcaagaataaaagcgacagcaggacccaaatgcagctcccaacccactccccaggctagacatgcttgtgtccacacagcacaccaatgtgatacttccactgaccggctgcagctctgcatgaaggactcggggtctggatgccatggaatcactgtggctcttgttgcagttttgtactctatacttggtttttcaattaagcttaatggcttttttaaaacatgacttgaagctctagttttctagatcttttacagtgtacagtattttacataactaagctgtattaaaagcttgttcatttacttgccaggaccctggctctacttttagagtcattgtaagaaactctaacttgcatcaaggtactaataagcttaattttaataacccaaagtttaaaggttccgatctttctccttggggtggagtgatctcattctcaggacaaccgtttacttacctgattcctcggagcattatcaacttctgctctgttgtcctgaccatacatatgtcctagaactacagttaagtgtgttgtggaattttagttttgaatcctgtataaaagaactccaagacctaaaaggcaatttatttatgaaatttattttcttatataaattacttatttctctgggc

SEQ ID NO: 131880 - DNA, 1311 bp, Homo sapiens
  Payload ID: 5744
  Gene Symbol: FAM118B
  Gene Name: family with sequence similarity 118, member B
  ENST ID: ENST00000528985
  CDS Start-End: 272-1311
cagtgcggctgcgccggccggtagctgcagctggagcagtggcgtttggaggagactcggatataccttctcagaagctgcacaggaggaaagcagtgacaaagaaagaagttgtcattctttgcacgctttctcaccaacagaatcaaagatttgactggaaacatgatctacttcctaactcactactgtgactgtattatttctatttaccttatgattatgatataaagaagaattacactgcgtgtgatggactatgggaaactggatggcttctacagggagccaggcctctgatatagacgagatttttggattcttcaacgatggcgaacctcccaccaaaaagcccaggaagctgcttccaagcttaaaaactaagaagcctcgagaacttgtgctagtgattggaacaggcattagtgctgcagttgcgccccaagttccagccctcaaatcctggaaggggttaattcaggccttactggatgctgccattgattttgatcttttagaagatgaggagagcaaaaagtttcagaaatgtctccatgaagacaagaacctggtccatgttgcccatgaccttatccagaaactctctcctcgtaccagtaatgttcgatccacatttttcaaggactgtttatatgaagtatttgatgacttggagtcaaagatggaagattctggaaaacagctacttcagtcagttctccacctgatggaaaatggagccctcgtattaactacaaattttgataatctcttggaactgtatgcagcagatcaggggaaacagcttgaatcccttgaccttactgatgagaaaaaggtcctcgagtgggctcaggagaagcgtaagctgagcgtgttgcatattcacggagtctacaccaaccctagtggcattgtccttcatccggctggatatcagaacgtgctcaggaacactgaagtcatgagagaaattcagaaactctacgaaaacaagtcatttcttttcctgggctgtggctggactgtggatgacaccactttccaggcccttttcttggaggctgtcaagcataaatctgacctagaacatttcatgctggttcggagaggagacgtagatgagttcaaaaagcttcgagaaaacatgctggacaaggggattaaagtcatctcctatggagatgactatgccgatcttccagaatatttcaagcgactgacatgtgagatctccacaaggggtacatcagggatggtgagagaaggtcagctaaatggctcatctgcagcacacagtgaaataagagg

SEQ ID NO: 131881 - DNA, 784 bp, Homo sapiens
  Payload ID: 5744
  Gene Symbol: FAM118B
  Gene Name: family with sequence similarity 118, member B
  ENST ID: ENST00000525338
  CDS Start-End: 78-784
ggatataccttctcagaagctgcacaggaggaaagcagtgacaaagaaagaagttgtcattctttgcacgaaactggatggcttctacagggagccaggcctctgatatagacgagatttttggattcttcaacgatggcgaacctcccaccaaaaagcccaggaagctgcttccaagcttaaaaactaagaagcctcgagaacttgtgctagtgattggaacaggcattagtgctgcagttgcgccccaagttccagccctcaaatcctggaaggggttaattcaggccttactggatgctgccattgattttgatcttttagaagatgaggagagcaaaaagtttcagaaatgtctccatgaagacaagaacctggtccatgttgcccatgaccttatccagaaactctctcctgtcctcgagtgggctcaggagaagcgtaagctgagcgtgttgcatattcacggagtctacaccaaccctagtggcattgtccttcatccggctggatatcagaacgtgctcaggaacactgaagtcatgagagaaattcagaaactctacgaaaacaagtcatttcttttcctgggctgtggctggactgtggatgacaccactttccaggcccttttcttggaggctgtcaagcataaatctgacctagaacatttcatgctggttcggagaggagacgtagatgagttcaaaaagcttcgagaaaacatgctggacaaggggattaaagtcatctcctatggagatgactatgccgatcttccaga

SEQ ID NO: 131882 - DNA, 632 bp, Homo sapiens
  Payload ID: 5744
  Gene Symbol: FAM118B
  Gene Name: family with sequence similarity 118, member B
  ENST ID: ENST00000530043
  CDS Start-End: 174-632
cggctgcgccggccggtagctgcagctggagcagtggcgtttggaggagactcggatataccttctcagaagctgcacaggaggaaagcagtgacaaagaaagaagttgtcattctttgcacggtaaaatcatcacctccagtcaccaacttctaattcaaattagaaactggatggcttctacagggagccaggcctctgatatagacgagatttttggattcttcaacgatggcgaacctcccaccaaaaagcccaggaagctgcttccaagcttaaaaactaagaagcctcgagaacttgtgctagtgattggaacaggcattagtgctgcagttgcgccccaagttccagccctcaaatcctggaaggggttaattcaggccttactggatgctgccattgattttgatcttttagaagatgaggagagcaaaaagtttcagaaatgtctccatgaagacaagaacctggtccatgttgcccatgaccttatccagaaactctctcctcgtaccagtaatgttcgatccacatttttcaaggactgtttatatgaagtatttgatgacttggagtcaaagatggaagattctggaaaacagctacttcagtcagttctccacctgatg

SEQ ID NO: 131883 - DNA, 1862 bp, Homo sapiens
  Payload ID: 5744
  Gene Symbol: FAM118B
  Gene Name: family with sequence similarity 118, member B
  ENST ID: ENST00000627851
  CDS Start-End: 184-1011
gtggtgcggggtggggcctgggcgagtcacgtggggacggtgcgcgctcagtgcggctgcgccggccggtagctgcagctggagcagtggcgtttggaggagactcggatataccttctcagaagctgcacaggaggaaagcagtgacaaagaaagaagttgtcattctttgcacgaaactggatggcttctacagggagccaggcctctgatatagacgagatttttggattcttcaacgatggcgaacctcccaccaaaaagcccaggaagctgcttccaagcttaaaaactaagaagcctcgagaacttgtgctagtgattggaacaggcattagtgctgcagttgcgccccaagttccagccctcaaatcctggaaggggttaattcaggccttactggatgctgccattgattttgatcttttagaagatgaggagagcaaaaagtttcagaaatgtctccatgaagacaagaacctggtccatgttgcccatgaccttatccagaaactctctcctgtcctcgagtgggctcaggagaagcgtaagctgagcgtgttgcatattcacggagtctacaccaaccctagtggcattgtccttcatccggctggatatcagaacgtgctcaggaacactgaagtcatgagagaaattcagaaactctacgaaaacaagtcatttcttttcctgggctgtggctggactgtggatgacaccactttccaggcccttttcttggaggctgtcaagcataaatctgacctagaacatttcatgctggttcggagaggagacgtagatgagttcaaaaagcttcgagaaaacatgctggacaaggggattaaagtcatctcctatggagatgactatgccgatcttccagaatatttcaagcgactgacatgtgagatctccacaaggggtacatcagcagggatggtgagagaaggtcagctaaatggctcatctgcagcacacagtgaaataagaggctgtagtacatgagcgagctagagaaatcaccaccgtttagaccaagctgtaaggccctactacagacagtgtttaacaagtaaacttacaagaacccaacacaattcccagaaagtaacaatagccagaggttgaagggcggggtagaagaggggggaatgttgcagcgtaatccttcataccacctggttcttgatattctgccgcctgttcaagttcaagaataaaagcgacagcaggacccaaatgcagctcccaacccactccccaggctagacatgcttgtgtccacacagcacaccaatgtgatacttccactgaccggctgcagctctgcatgaaggactcggggtctggatgccatggaatcactgtggctcttgttgcagttttgtactctatacttggtttttcaattaagcttaatggcttttttaaaacatgacttgaagctctagttttctagatcttttacagtgtacagtattttacataactaagctgtattaaaagcttgttcatttacttgccaggaccctggctctacttttagagtcattgtaagaaactctaacttgcatcaaggtactaataagcttaattttaataacccaaagtttaaaggttccgatctttctccttggggtggagtgatctcattctcaggacaaccgtttacttacctgattcctcggagcattatcaacttctgctctgttgtcctgaccatacatatgtcctagaactacagttaagtgtgttgtggaattttagttttgaatcctgtataaaagaactccaagacctaaaaggcaatttatttatgaaatttattttcttatataaattacttatttctctgg

SEQ ID NO: 131884 - DNA, 5118 bp, Homo sapiens
  Payload ID: 5745
  Gene Symbol: FAM120A
  Gene Name: family with sequence similarity 120A
  Uniprot ID: Q9NZB2
  ENST ID: ENST00000277165
  CDS Start-End: 195-3551
gtccctccccagacatggccctgggaggcggcagcacatggcggccgcggcggccatgagcgcgcccccgacccgccccagtcccccctagaggccgccgcccccgcccgccagcccgcccgcgcgccacggccccaccacccccggccccgccgccccccgcccgcacccgcgcccgcgcccccgccgccgccatgggcgtgcagggcttccaggactacatcgagaagcactgcccgagcgccgtggtgccggtggagctgcagaagctggcccggggcagcctggtgggcggcgggcggcagcggcccccgcagaccccgctgcgcctgctggtggacgccgacaactgcctgcaccgcctctacggcggcttctacaccgactgggtcagcggcggccagtggaaccacatgcttggctacctggcggcgctggccaaggcctgcttcggcggcaacatcgagctcttcgtcttcttcaacggcgcgctcgagaaggcccggctgcacgagtgggtcaagcggcagggcaacgagcgccagacggcacagcagatcgtcagccatgtccagaacaagggcaccccgccgccaaaggtctggttcctgccgcccgtctgcatggcccactgcatccgcctggcgctcatccgcttccacgtcaaggttgcacagagcattgaggatcaccatcaggaagtgattggtttctgcagagagaatggtttccatggcttggttgcgtatgactctgattatgcactgtgcaacatcccctactatttcagtgcccatgccctaaaactgagccggaacgggaaaagtctcaccacaagccaatatctgatgcatgaagttgccaagcaactggacctgaatccaaatcgttttcctatttttgctgctctcttaggaaatcacattctgcctgatgaagatctggcttcctttcactggagtttacttggtccagaacatccactagcctcactaaaggtccgggcccaccagctggtcttgccaccttgcgacgtagtgatcaaagccgttgctgactatgtacgcaacattcaggacacctctgacttggatgccatagctaaagatgttttccagcattcacagtctagaacagatgacaaagttattcgatttaagagagcaattggatattattcagcgactagtaagcctatgtcatttcatccaccacattacttagcagccagacccggtccgtttggaatgcctgggatggtgccgccgcatgttcctcctcagatgctcaacattccgcagacctctctgcaagcaaagcccgtggccccacaggtgcccagcccagggggcgccccgggccagggtccatacccgtacagcctctctgagccagcacctctcactttggacacgagcgggaagaatctgacggagcagaacagctacagcaacattcctcacgaagggaagcacacgccgctgtatgagcggtcctcgcccatcaacccggcccagagcggcagccccaaccacgtggattccgcctacttccctggctcttctacatcgtcatcttccgacaacgacgagggcagcggaggggcgacaaaccatatcagcgggaacaagattggctgggagaagacgggaagccactcagagcctcaggcacgaggagacccaggagaccaaacaaaggcagaaggctcgtccactgcctcttcaggaagccaactagccgaaggcaagggaagccagatgggcactgtccagccaatcccgtgcctcctgtcgatgcccaccaggaaccacatggacatcaccacacctcccctgccccccgtcgcacctgaggtgctgagagtggccgagcacaggcacaagaaggggctgatgtacccctacatcttccatgtcctgacgaagggtgaaatcaaaattgctgtttctattgaagatgaagccaacaaggacctgcctccggccgctctgctctataggccagttcgtcagtatgtttacggagtcctgtttagtttggcagaaagcagaaagaaaactgagagacttgcttttagaaagaacagacttccaccagaattttcaccagtgatcattaaagaatgggcagcttacaaaggaaagtctcctcaaaccccggaactggttgaagctcttgccttcagggagtggacctgccccaacctgaagaggctgtggttgggtaaggcggtagaggacaagaaccgcaggatgagggccttcctggcctgcatgaggtcggacaccccagccatgctcaaccctgccaacgtgcccactcacctcatggtgctctgctgcgtcttacggtacatggtgcagtggccgggagcacgcatccttcggcgtcaggagctagatgccttcctggctcaggcgctgtcccccaaactctacgagcctgatcagctccaggagctcaagattgagaacctagatccccgaggaattcagctatcagctctcttcatgagtggagtagacatggccttgtttgcaaatgatgcatgcggacagccaatcccctgggaacactgttgtccttggatgtattttgatgggaagctcttccaatccaaactcctcaaagccagccgggaaaagaccccactcattgacctctgtgatggtcaggctgatcaggctgccaaggtagagaagatgcgccagagcgtcctcgaggggctcagcttctccaggcagagccacacgctccctttcccgccgccacctgccctgcccttctaccctgcctctgcgtacccccggcactttgggcctgtcccaccctctcagggcaggggcagaggctttgcaggcgtctgtggctttggaggcccctatggggaaacggtagcaacaggcccttaccgtgccttccgtgtggcggcagcatcgggacactgcggagccttctcaggcagtgacagcagcaggactagcaagtcccagggcggagtccaacctataccttctcagggaggcaaactagaaatagctggcactgtggttggccattgggctgggagcaggcggggccgtgggggccgggggcctttccccctgcaggtggtttctgtcggaggaccagctagagggcgtccaagaggagttatttccaccccagtgattagaacatttggaagaggtggaaggtactatggcagaggttacaaaaaccaggcagcaattcagggcagacctccttatgctgcttcagcagaagaagtggccaaagaacttaagtcaaaatctggggaatcgaagtcctctgctatgtcttcagacgggtccctggctgaaaacggagtgatggccgaggagaagccggctccccagatgaacgggagcacgggtgacgccagggcccccagccactctgaaagtgccttgaataatgactctaaaacgtgcaatacaaatcctcatttaaatgcactaagtacagacagcgcttgccgcagagaagctgctctggaggcagctgtcttaaataaagaagagtaaacttattttttatagagggtgaaggatgctggaagggtaaggatttaggaatatctggagagaaagagagcctgcagttatgtacattttgtcctttccgtaagagaaaaatgaggactttggaaattcagatccctctttgatatcagagatttaaacaacacatttttagttttaaccagttgtagtcaaaatgctacaataaaacaaaaaagagaaagaaaatgaagagcatttgactcccgcacttaaaatgaagtacacataaagtttaaactggttatgacaaaagcctttagttgtgtttcttgaactataaagaaaacaaattttggcagtctttaagtatatatagcttaaaatataatttttagcatttggcaccatatgtatgccattatatttgattttgcattactgtttcacaatgaagctttctttaaggctttgatttttatgattatgaaagaaataaggcacaaccacagtttttctttcttaaatttcatcactgttgatgtggttcttttgtgttaaaaaaaaaaagtgcaactatcaaaactaaaaaattatagagtaatattgccgttctgctgattttaaatatacaatacatcatacatactttacaagcaagttaaatggagataaagttgaaatcatagaagatgcaaatgacctttcaaaatcaacacaatgtgttctgaaactttcgtgactaataccatgcatctgtgatcaatgaactatgtggttttgaatcggatgtagaccattagtactactacttgagctaaacttctgcatggttcataatttttaaagtgtgtagttaatatgcatgttatcgtcctttcttccattcttaacagtatgtgcccatttgcaaaacaaaaatgctaataatcagtaatagtcctataaaagatgttaactctgtttagtcattgactgatcttgctctaaccttaaaattttgtgattattgacctctgttgcatttattctaaagccccccaaaaattatctagccgtttcgaatatcaacattaccctggtgtattcactgctgtatgcattattgttctttgttgctgttttatgccttcatattagcaaatatgaaattctgtgaaaaaaaaccctttgatcttaaaaaaaaaaaaaccaccccccccttctgtagcaggaaacaaattgcttgttcttgagaactttcccatcaagaatttagtagaagcaggtatacttctatcattttgatgtttttgttaatgtttccaaacaatgtactttgaaatcagaatcacttcttatcgttttcatatacttctgatgctcttcatcacattagtgatcagaaatgaggtgtaattccccaacccctgcccgcaagagctaagtaggatcttactgtaagttgaagggagttttgccctaactcatggattgtgcaagaatgaactgctgttgggtttgattgactgtcgatggattgtggtgtggtgtatctgaaggctattgaatgcaacttacaatgcttaataaaaatctttattcttttagt

SEQ ID NO: 131885 - DNA, 3585 bp, Homo sapiens
  Payload ID: 5745
  Gene Symbol: FAM120A
  Gene Name: family with sequence similarity 120A
  Uniprot ID: Q9NZB2
  ENST ID: ENST00000375389
  CDS Start-End: 26-1912
ccgcgcccgcgcccccgccgccgccatgggcgtgcagggcttccaggactacatcgagaagcactgcccgagcgccgtggtgccggtggagctgcagaagctggcccggggcagcctggtgggcggcgggcggcagcggcccccgcagaccccgctgcgcctgctggtggacgccgacaactgcctgcaccgcctctacggcggcttctacaccgactgggtcagcggcggccagtggaaccacatgcttggctacctggcggcgctggccaaggcctgcttcggcggcaacatcgagctcttcgtcttcttcaacggcgcgctcgagaaggcccggctgcacgagtgggtcaagcggcagggcaacgagcgccagacggcacagcagatcgtcagccatgtccagaacaagggcaccccgccgccaaaggtctggttcctgccgcccgtctgcatggcccactgcatccgcctggcgctcatccgcttccacgtcaaggttgcacagagcattgaggatcaccatcaggaagtgattggtttctgcagagagaatggtttccatggcttggttgcgtatgactctgattatgcactgtgcaacatcccctactatttcagtgcccatgccctaaaactgagccggaacgggaaaagtctcaccacaagccaatatctgatgcatgaagttgccaagcaactggacctgaatccaaatcgttttcctatttttgctgctctcttaggaaatcacattctgcctgatgaagatctggcttcctttcactggagtttacttggtccagaacatccactagcctcactaaaggtccgggcccaccagctggtcttgccaccttgcgacgtagtgatcaaagccgttgctgactatgtacgcaacattcaggacacctctgacttggatgccatagctaaagatgttttccagcattcacagtctagaacagatgacaaagttattcgatttaagagagcaattggatattattcagcgactagtaagcctatgtcatttcatccaccacattacttagcagccagacccggtccgtttggaatgcctgggatggtgccgccgcatgttcctcctcagatgctcaacattccgcagacctctctgcaagcaaagcccgtggccccacaggtgcccagcccagggggcgccccgggccagggtccatacccgtacagcctctctgagccagcacctctcactttggacacgagcgggaagaatctgacggagcagaacagctacagcaacattcctcacgaagggaagcacacgccgctgtatgagcggtcctcgcccatcaacccggcccagagcggcagccccaaccacgtggattccgcctacttccctggctcttctacatcgtcatcttccgacaacgacgagggcagcggaggggcgacaaaccatatcagcgggaacaagattggctgggagaagacgggaagccactcagagcctcaggcacgaggagacccaggagaccaaacaaaggcagaaggctcgtccactgcctcttcaggaagccaactagccgaaggcaagggaagccagatgggcactgtccagccaatcccgtgcctcctgtcgatgcccaccaggaaccacatggacatcaccacacctcccctgccccccgtcgcacctgaggtgctgagagtggccgagcacaggcacaagaaggggctgatgtacccctacatcttccatgtcctgacgaaggtattatcaaaggggccctggagtggcttctgttatttgatgagtggccattcctatgggtgttttgtccttttgtccttttttgaaccatttttctgtcttactaatctacttgaaacaaagttcactttcccctttctaaacattgaatgaaagatgaacatttataactgtaaatagttttaaaataactcgtgaaaagtctcacttttttccttcaacttagtatagaatattttatacttctaatgaaataatgcatcacattattttatgacttgtaattttattctttttacttcaatttcagaattttcttaaaccatatttgtgctgtaatgtcaggtttaattctgatgtcagatacaatatctggttcctttatcatttgtgcttagaaaataatgtttccccctttgaatggctcatagtgcttcatgtgttttgacttgttcatgacctcattgagtgcagttttaatagtgctaagaacaaaaaatataatacaggattttgttaacatacgcatagtcagaaaatgaaactatcattttatacagtgtcataatttcactttattagtgtcttaatgtatgcttaaatatatacatatagtgtggcatcaattattttttaatcttggtgtctcaaatgtatctatgtgtatttaaatttcctcagtgatttgtagtctttatgttggcacttttaatcttagccccacaatttaacaagttacctcagttactagattaatcctgcagaactggtttattgctatcatgtattattaacatgaatacctatatgaccatatataaccagacttttctgtctattctctacaacccatctgtggtttgtaaaatggagtcaataaatgcaataatgaactcctgttctcaaatactcctgaggtggacttcaactgttaactgactaatccaaatattgcttacttttattaattaaaggacatggaaaacatgtagccagtactatttgctcagatcctttaatttattttttagttgtaatgcctccaaatctcatctattatttgatatgggtatgcatttatagtatcacttttcagattatggttgtaaggtgaacattttatttttcaggttcaacataaattataaagggtaagtgaaaagtaattgttgtggggaaaacattttgctaagtttaaggaaccaaagttttgggaagacatctttcaaaataaggtgtgaagaaacaacactcattcctcgtggggctgtttgaaatgtaaggtccccaggagctacctgttatgtccacactgctggatctgatgcgtggatagtcggttagatctatatgagggttgcaaattgtaccgacatgctttcttatttcttatgaatttcaagggcaaatactgataaaatgaccatggttgagaaaattgtcttttcacattttaaaatgctacttaagttttttcagtttatcctataagctgaatggctctggtattaattgcccaggctaagacatttacagtgagatgcatctttatggtaatgaagagaatttgcaaagcatcatattattgagataaatattccctagatgagagtgttagaacacatgtagctactggattaatgaatatgaaagtatggagggtaaggggaaagaccagtttttaaattaaacttatgtgaatgaaagaaacagcaaatattacaaaattattatttaaagcatatatatcaatgaacttcatagacattgaggtcataaatgcattgttgtgctctgagtataattaaataaaatttgttgcatga

SEQ ID NO: 131886 - DNA, 1701 bp, Homo sapiens
  Payload ID: 5745
  Gene Symbol: FAM120A
  Gene Name: family with sequence similarity 120A
  ENST ID: ENST00000446420
  CDS Start-End: 1-1488
gtcaaggttgcacagagcattgaggatcaccatcaggaagtgattggtttctgcagagagaatggtttccatggcttggttgcgtatgactctgattatgcactgtgcaacatcccctactatttcagtgcccatgccctaaaactgagccggaacgggaaaagtctcaccacaagccaatatctgatgcatgaagttgccaagcaactggacctgaatccaaatcgttttcctatttttgctgctctcttaggaaatcacattctgcctgatgaagatctggcttcctttcactggagtttacttggtccagaacatccactagcctcactaaaggtccgggcccaccagctggtcttgccaccttgcgacgtagtgatcaaagccgttgctgactatgtacgcaacattcaggacacctctgacttggatgccatagctaaagatgttttccagcattcacagtctagaacagatgacaaagttattcgatttaagagagcaattggatattattcagcgactagtaagcctatgtcatttcatccaccacattacttagcagccagacccggtccgtttggaatgcctgggatggtgccgccgcatgttcctcctcagatgctcaacattccgcagacctctctgcaagcaaagcccgtggccccacaggtgcccagcccagggggcgccccgggccagggtccatacccgtacagcctctctgagccagcacctctcactttggacacgagcgggaagaatctgacggagcagaacagctacagcaacattcctcacgaagggaagcacacgccgctgtatgagcggtcctcgcccatcaacccggcccagagcggcagccccaaccacgtggattccgcctacttccctggctcttctacatcgtcatcttccgacaacgacgagggcagcggaggggcgacaaaccatatcagcgggaacaagattggctgggagaagacgggaagccactcagagcctcaggcacgaggagacccaggagaccaaacaaaggcagaaggctcgtccactgcctcttcaggaagccaactagccgaaggcaagggaagccagatgggcactgtccagccaatcccgtgcctcctgtcgatgcccaccaggaaccacatggacatcaccacacctcccctgccccccgtcgcacctgaggtgctgagagtggccgagcacaggcacaagaaggggctgatgtacccctacatcttccatgtcctgacgaagggtgaaatcaaaattgctgtttctattgaagatgaagccaacaaggacctgcctccggccgctctgctctataggccagttcgtcagtatgtttacggagtcctgtttagtttggcagaaagcagaaagaaaactgagagacttgcttttagaaagaacagacttccaccagaatgtatgtactgtaacaatccattgtttgttttcctcggtacctcgtaatctcttgtgcattttctaaagccttagaagaatcatgactgagttgaccccgagtgcctctgtgtaaaggaggtgggcccatcatcggggcagtaggccagggtaaaggctcttagaaaaggaggagaagccacagactttcttcctcagtaacattccaataatgatgtttattcagtaaaataataaaacaggtttacactttaaagtgaa

SEQ ID NO: 131887 - DNA, 1710 bp, Homo sapiens
  Payload ID: 5745
  Gene Symbol: FAM120A
  Gene Name: family with sequence similarity 120A
  ENST ID: ENST00000427765
  CDS Start-End: 1-1485
ggtgaaatcaaaattgctgtttctattgaagatgaagccaacaaggacctgcctccggccgctctgctctataggccagttcgtcagtatgtttacggagtcctgtttagtttggcagaaagcagaaagaaaactgagagacttgcttttagaaagaacagacttccaccagaattttcaccagtgatcattaaagaatgggcagcttacaaaggaaagtctcctcaaaccccggaactggttgaagctcttgccttcagggagtggacctgccccaacctgaagaggctgtggttgggtaaggcggtagaggacaagaaccgcaggatgagggccttcctggcctgcatgaggtcggacaccccagccatgctcaaccctgccaacgtgcccactcacctcatggtgctctgctgcgtcttacggtacatggtgcagtggccgggagcacgcatccttcggcgtcaggagctagatgccttcctggctcaggcgctgtcccccaaactctacgagcctgatcagctccaggagctcaagattgagaacctagatccccgaggaattcagctatcagctctcttcatgagtggagtagacatggccttgtttgcaaatgatgcatgcggacagccaatcccctgggaacactgttgtccttggatgtattttgatgggaagctcttccaatccaaactcctcaaagccagccgggaaaagaccccactcattgacctctgtgatggtcaggctgatcaggctgccaaggtagagaagatgcgccagagcgtcctcgaggggctcagcttctccaggcagagccacacgctccctttcccgccgccacctgccctgcccttctaccctgcctctgcgtacccccggcactttgggcctgtcccaccctctcagggcaggggcagaggctttgcaggagtccaacctataccttctcagggaggcaaactagaaatagctggcactgtggttggccattgggctgggagcaggcggggccgtgggggccgggggcctttccccctgcaggtggtttctgtcggaggaccagctagagggcgtccaagaggagttatttccaccccagtgattagaacatttggaagaggtggaaggtactatggcagaggttacaaaaaccaggcagcaattcagggcagacctccttatgctgcttcagcagaagaagtggccaaagaacttaagtcaaaatctggggaatcgaagtcctctgctatgtcttcagacgggtccctggctgaaaacggagtgatggccgaggagaagccggctccccagatgaacgggagcacgggtgacgccagggcccccagccactctgaaagtgccttgaataatgactctaaaacgtgcaatacaaatcctcatttaaatgcactaagtacagacagcgcttgccgcagagaagctgctctggaggcagctgtcttaaataaagaagagtaaacttattttttatagagggtgaaggatgctggaagggtaaggatttaggaatatctggagagaaagagagcctgcagttatgtacattttgtcctttccgtaagagaaaaatgaggactttggaaattcagatccctctttgatatcagagatttaaacaacacatttttagttttaaccagttgtagtcaaaatgctacaataaaacaaaaaagagaaagaaaa

SEQ ID NO: 131888 - DNA, 2771 bp, Homo sapiens
  Payload ID: 5746
  Gene Symbol: FAM120AOS
  Gene Name: family with sequence similarity 120A opposite strand
  Uniprot ID: Q5T036
  ENST ID: ENST00000375412
  CDS Start-End: 884-1654
gctatcattttaggcttaactaccaccatctcctcgcgggcagtgggggcaaccgcgaagacagaatttcacaaactttcagctccagcagtttcaaggaaatgtcaaatgacaagatggaagaccgagtgtcaagagctaagacaacaaaaaggcccccaaaatttgttttcaagaaaaccaatgaaaaaagcaagcaatcagaacgtgaagtccaggatcatggatgtgcttatcttcacagtcactgctgggtcctgaagttctcctctggcccagtgccagctgcgaagccctctgccaaagggccagaggaggccggtgatatagagctctgattacccacccgtcagggcaccgctgaaggtcactgaatacttactgtgcacccgaaaaataaatcctgcgagttcacgcccgcgtagttcgccccctgattttgagcgactcctttcgcatgggatctacaaaaccgaactgccttaaagacctctttcacacggacgtgaagtcacagaactgacaaaatcccatcctgtcaaagtgcacgggtctttgaaatctaacacaaaaagccatagaaagattctctaaacaccctgtactaagaggaacacggacagggcactgcgttctgaagtagaggccagggcactggcccttagacacgtctcgctgtcaccgggctaacaacattggcaagggcggcggcagcagcactgatatttgcagcccccaagggctctggcgaaaccccctctattactctgtatcctgcctgcttccaagatgaacctgttgctgggaaagaacaggctaaattagaaaagggagtattttgtcaaagttgaaggtgagtgatagcctgcccgcctcaaataggatgggaaaaactaaggatattggggatgatgacactgtcgcctccgaattctggtccggggctctctcccagccctcaagtgtccccacgcggccgcggaccccgaacagggacagctggagacgggcttgggcagcgcgcggcctgcacccgcggccatccatcttgcagcccggcccggccaggctatcccgggcaagggctgggggaactcgctgcccccagcgccgccacggccgggcgacattctgcgccctgggaagggggataggggtgcggcgcggccccggtccccggcccgcccggatccccggcctcaccttgacgtggaagcggatgagcgccaggcggatgcagtgggccatgcagacgggcggcaggaaccagacctttggcggcggggtgcccttgttctggacatggctgacgatctgctgtgccgtctggcgctcgttgccctgccgcttgacccactcgtgcagccgggccttctcgagcgcgccgttgaagaagacgaagagctcgatgttgccgccgaagcaggccttggccagcgccgccagaaacctctgtagaggagcaggatgcaaccgacaggctgtggccggacagctgctgcccagcacatggagcctgcacgcgcacggtttggccaaagaagcccccatactcccggtgaaaaagatttccagaagctgttctgtcaataacaaagtctcaaagaaaaccacaaaaccaccaacactaagatcattcttgagtccaatttgaaaaactagggtcaagttctgcagaggcattgaaaggacaagaaaccaccctgatacccatcgtgtgagggaaaatgctctattcaccattcctcagcttctgcttctggtttcagagttctctctatattggagggtgttttaaagctagagtggtctttatccacttttattaacacatctgaatgtgaaggtcaagagaggaaagtgatatgtcctaagtcagagtagagtcaacaagaaaataagacaaacagcgactgagcccctggtgtatactgggcattggccagctactggggatatggagatgaagaaaacataacccttcttcaaggagcccaacctaccaaggtagacagacatatagacaaatagatacttgcatagaaaaaaagaggaaaaggggatcagtgtgacctgtgtaactaagtaccctataaaccctcctgcaacagatcatattgccctttatagtggggatggtaatcccatctgaattccacaggtactttgcagtcataccacacccatgtgtctgtcggtcctgactgtaccatttataaacagcttcactttcagcagttctcagccctcttaagctagggtcattgtcagtagggatactgcttcataagcaccagcagaacaccaaaggagaccatatgggtgaaagcaaccagcactgccctggcgcttcataggttcttagagtttttatcttttactttcagtctaacacagcactgcctgctttttgtttttgttgcttggtttgtttttttcttaccgtgttcaccaaacttgtgtccaaatagctttgggctgatgcaaaaatatctatgtggaagagaagagttgttctcatggagggccttcagatgagtgctatagactctctaggcaactccaagaggcttctcaagcagggtgggcagtgagagctgctatggaatcaatggacaaactgacagggactgctttgaaagacagtactcagttgagtatatatattctctcttaagggctaaaagtttataatcatcccttaaacactctgtgatgggatcttcaggatcatcttttgaagtaaactatattttacaatgtgatataaa

SEQ ID NO: 131889 - DNA, 1800 bp, Homo sapiens
  Payload ID: 5746
  Gene Symbol: FAM120AOS
  Gene Name: family with sequence similarity 120A opposite strand
  ENST ID: ENST00000423591
  CDS Start-End: 459-683
cgcggctcggggctcccggaggcggcggcggaggcggaggcccggagttgggccgggacgggatccgggaggcttctgagccggagcaggcagcgcctggaggccagaggccgttcgcccgcctcaggccggtcggccgccgctcccctcccctgcgccctgttcccggcagggccagagaggccgccgcctccgcccggtggttctcgggcgaagggaagccgcgaagcaggtcctggggaagagctcgcctgctcctgagggaagcagcgataagatggcgctttgaaggggagccgaggccgagtcactctgttcgtcgggacgccgcctttctaacgccgccgtcggctcgcaccactctgggcctgctgcccacactgactgcggggtccgggagagcgggatgctggccggccgcgcctggcttcttggaaagagcaggaaggagcgcgagaatgcagttccgcggcagaaacctctgtagaggagcaggatgcaaccgacaggctgtggccggacagctgctgcccagcacatggagcctgcacgcgcacggtttggccaaagaagcccccatactcccggtgaaaaagatttccagaagctgttctgtcaataacaaagtctcaaagaaaaccacaaaaccaccaacactaagatcattcttgagtccaatttgaaaaactagggtcaagttctgcagaggcattgaaaggacaagaaaccaccctgatacccatcgtgtgagggaaaatgctctattcaccattcctcagcttctgcttctggtttcagagttctctctatattggagggtgttttaaagctagagtggtctttatccacttttattaacacatctgaatgtgaaggtcaagagaggaaagtgatatgtcctaagtcagagtagagtcaacaagaaaataagacaaacagcgactgagcccctggtgtatactgggcattggccagctactggggatatggagatgaagaaaacataacccttcttcaaggagcccaacctaccaaggtagacagacatatagacaaatagatacttgcatagaaaaaaagaggaaaaggggatcagtgtgacctgtgtaactaagtaccctataaaccctcctgcaacagatcatattgccctttatagtggggatggtaatcccatctgaattccacaggtactttgcagtcataccacacccatgtgtctgtcggtcctgactgtaccatttataaacagcttcactttcagcagttctcagccctcttaagctagggtcattgtcagtagggatactgcttcataagcaccagcagaacaccaaaggagaccatatgggtgaaagcaaccagcactgccctggcgcttcataggttcttagagtttttatcttttactttcagtctaacacagcactgcctgctttttgtttttgttgcttggtttgtttttttcttaccgtgttcaccaaacttgtgtccaaatagctttgggctgatgcaaaaatatctatgtggaagagaagagttgttctcatggagggccttcagatgagtgctatagactctctaggcaactccaagaggcttctcaagcagggtgggcagtgagagctgctatggaatcaatggacaaactgacagggactgctttgaaagacagtactcagttgagtatatatattctctcttaagggctaaaagtttataatcatcccttaaacactctgtgatgggatcttcaggatcatcttttgaagtaaactatattttacaatgtgatataaa

SEQ ID NO: 131890 - DNA, 426 bp, Homo sapiens
  Payload ID: 5746
  Gene Symbol: FAM120AOS
  Gene Name: family with sequence similarity 120A opposite strand
  ENST ID: ENST00000428378
  CDS Start-End: 229-426
cgcctgctcgtcacggaagagactgtcttgagagcacaggtctgttgcagcgtgggaaagcctgcgttaccactgcgcaatggctagactgaaacgtgcgcctttgcagtggatctcccagctcttctgagggagagggatttgaatcttgttgctttagtagcatcttctggaaggaggtcgtttacgtaaattctgttccaaagctctgtcgtaactgcttctaaaatgaggttgatactaaacctctgtagaggagcaggatgcaaccgacaggctgtggccggacagctgctgcccagcacatggagcctgcacgcgcacggtttggccaaagaagcccccatactcccggtgaaaaagatttccagaagctgttctgtcaataacaaagtctcaaagaaaaccacaaaaccaccaacacta

SEQ ID NO: 131891 - DNA, 1491 bp, Homo sapiens
  Payload ID: 5746
  Gene Symbol: FAM120AOS
  Gene Name: family with sequence similarity 120A opposite strand
  ENST ID: ENST00000476484
  CDS Start-End: 459-635
cgcggctcggggctcccggaggcggcggcggaggcggaggcccggagttgggccgggacgggatccgggaggcttctgagccggagcaggcagcgcctggaggccagaggccgttcgcccgcctcaggccggtcggccgccgctcccctcccctgcgccctgttcccggcagggccagagaggccgccgcctccgcccggtggttctcgggcgaagggaagccgcgaagcaggtcctggggaagagctcgcctgctcctgagggaagcagcgataagatggcgctttgaaggggagccgaggccgagtcactctgttcgtcgggacgccgcctttctaacgccgccgtcggctcgcaccactctgggcctgctgcccacactgactgcggggtccgggagagcgggatgctggccggccgcgcctggcttcttggaaagagcaggaaggagcgcgagaatgcagttccgcggcagaaacctctgtagaggagcaggatgcaaccgacaggctgtggccggacagctgctgcccagcacatggagcctgcacgcgcacggtttggccaaagaagcccccatactcccggtgaaaaagatggagtcttgctctgttgcccaggctggagtacaatgatgtgttctcagctcactgcaacctccctctcccaggttcaagtgatctcctgcctcagcctctggagtagctgggattacagatttccagaagctgttctgtcaataacaaagtctcaaagaaaaccacaaaaccaccaacactaagatcattcttgagtccaatttgaaaaactagggtcaagttctgcagaggcattgaaaggacaagaaaccaccctgatacccatcgtgtgagggaaaatgctctattcaccattcctcagcttctgcttctggtttcagagttctctctatattggagggtgttttaaagctagagtggtctttatccacttttattaacacatctgaatgtgaaggtcaagagaggaaagtgatatgtcctaagtcagagtagagtcaacaagaaaataagacaaacagcgactgagcccctggtgtatactgggcattggccagctactggggatatggagatgaagaaaacataacccttcttcaaggagcccaacctaccaaggtagacagacatatagacaaatagatacttgcatagaaaaaaagaggaaaaggggatcagtgtgacctgtgtaactaagtaccctataaaccctcctgcaacagatcatattgccctttatagtggggatggtaatcccatctgaattccacaggtactttgcagtcataccacacccatgtgtctgtcggtcctgactgtaccatttataaacagcttcactttcagcagttctcagccctcttaagctagggtcattgtcagtagggatactgcttcataagcaccagcagaacaccaaaggagaccatatgggtgaaagcaaccagcactg

SEQ ID NO: 131892 - DNA, 5155 bp, Homo sapiens
  Payload ID: 5747
  Gene Symbol: FAM120B
  Gene Name: family with sequence similarity 120B
  Uniprot ID: Q96EK7
  ENST ID: ENST00000476287
  CDS Start-End: 109-2841
gtgaacgaggcggctgtggcggtggctgaggcggctgggcctagggtgcagcgggcgcgtctgcggctggtgttggcgcatctctagatcctttcccggagttcagttatgggtgtgagaggtttgcaaggatttgtgggaagtacctgcccacatatatgtacagtagtaaatttcaaagaactggcagagcaccaccgaagcaagtatcctggatgtacccctaccattgtggttgatgccatgtgttgtctcagatattggtatactccagaatcttggatctgcggtggccagtggcgagaatacttttctgctttgcgagattttgttaaaacttttacggcagctgggatcaagttgatattcttctttgatggcatggtggagcaggataagagagatgaatgggtgaaacgaaggctcaagaacaacagggagatatccaggatttttcattacatcaagtcacacaaggagcagccaggcagaaatatgttcttcatcccctcagggctagctgtgtttacacgatttgctctaaagacactgggccaggaaactttgtgttctttgcaggaagcagattatgaggtagcttcctatggcctccagcataactgtcttgggattctgggggaagacactgattacctaatctatgacacttgtccctacttttcaattagcgagctctgcctagagagcctggacaccgtcatgctctgcagagagaagctctgtgagagtctgggcctctgtgtggccgaccttcctcttctggcctgcctccttggcaacgacataatcccagagggcatgtttgaaagctttaggtacaaatgcttatcgtcctacacctctgtaaaagagaactttgacaaaaaaggtaacatcatattagctgtgtcagaccatatatcgaaagttctttacttgtatcaaggtgagaaaaaattagaagagatattacctctgggaccaaacaaagctcttttttataaaggaatggcatcatatcttttaccaggacaaaaatctccatggtttttccaaaaacccaaaggtgtaataactttggacaaacaagtaatatccacgagttcagacgccgaatccagggaagaagttcccatgtgttcagatgctgaatccaggcaagaagttcccatgtgtacaggccctgaatccaggcgagaagttcccgtgtatacagattctgaacccaggcaagaagttcccatgtgttcagaccctgaacccaggcaagaagttcccacgtgtacaggccctgaatccaggcgagaagttcccatgtgttcagaccctgaacccaggcaagaagttcccatgtgtacaggccctgaagccaggcaagaagttcccatgtatacagactctgaacccaggcaagaagttcccatgtatacagactctgaacccaggcaagaagttcccatgtatacaggctctgaacccaggcaagaagttcccatgtatacaggccctgaatccaggcaagaagttcccatgtatacaggccctgaatccaggcaagaagttttaatacggacagaccctgaatctaggcaagaaattatgtgtacaggccatgaatccaaacaggaagttcccatatgtacagatcctatatccaagcaagaagactccatgtgtacacacgctgaaatcaatcaaaaattacctgtagcaacagattttgaatttaagctagaagctctcatgtgtacaaaccctgaaattaaacaagaagaccccacaaatgtggggcctgaagtaaagcaacaagtaaccatggtttcagacactgaaatcttaaaggttgctagaacacatcacgtccaagcagaaagctacctggtgtacaacatcatgagcagtggagagattgaatgcagcaacaccctagaagatgagcttgaccaggccttacccagccaggccttcatttaccgtcccattcgacagcgggtctactcactcttactggaggactgtcaagatgtcaccagcacctgcctagctgtcaaggagtggtttgtgtatcctgggaacccactgaggcacccggacctcgtcaggccgctgcagatgaccattccagggggaacgcctagtttgaaaatattatggctgaaccaagagccagaaatacaggttcggcgcttggacacactcctagcctgtttcaatctttcctcctcaagagaagagctgcaggctgtcgaaagcccatttcaagctttgtgctgcctcttgatctacctctttgtccaggtggacacgctttgcctggaggatttgcatgcgtttattgcgcaggccttgtgcctccaaggaaaatccacctcgcagcttgtaaatctacagcctgattacatcaaccccagagccgtgcagctgggctcccttctcgtccgcggcctcaccactctggttttagtcaacagcgcatgtggcttcccctggaagacgagtgatttcatgccctggaatgtatttgacgggaagctttttcatcagaagtacttgcaatctgaaaagggttatgctgtggaggttcttttagaacaaaatagatctcggctcaccaaattccacaacctgaaggcagtcgtctgcaaggcctgcatgaaggagaacagacgcatcactggccgagcccactggggctcacaccacgcagggaggtggggaagacagggctccagctaccacaggacgggctctgggtatagccgttccagtcagggacagccgtggagagaccagggaccaggaagcagacagtatgagcatgaccagtggagaaggtactagtcaacctccagaaagagtatggagagaaaaagaggcacacctggacgcagagccctgccagcgccctcctctgctgttgcagctgcaaggagaccatgcctgtgggagccaggcctcgcttgcatgaagaaggaacgatgcctttttcaatggtgtctccctcccattgtgcagaagagcttttgttggcttctctcccgagcttgtgcctgattctgtggcccaaaacaatcattgttaacatcttcatgtgtttcattctgatctttcattcatatatatgatgcctagctaatttcattttaaaataaatgggaatctgttgtattctgattttttattagcaacactagattatgaggggttatctcctgttattaaaaagtcagaaaacactatacagtagtcctcccttatctgcgggggagacatcccaagaccctcagtggatgcctgagactggatagtatggaatcctacatatctataccttggctttttcctctacgtacataccatgataaagcttaacaaagaacagtgagagattaacagcaaccaataactaataaaagctatgtgaatgtggtctctgtcaaaatatcgtgctgtaatcacccttcttgctatctgaaaaccaagaagaccactaagtgactaatggtcagagaagctggatgaggggctgattcatgtcctgggcatgacagagcgggaggcacaaggtttcatcacactattcacaatggcgagcaagttaaaacggatttcccatttaatttaattttcagacttcagttgaccatgagtaaccgaaaccacagaaagtgaagctggggatatttcagaaattcttttctaatcagaaattctaatcaaacataagtttccaactatgtgttctcttggtcctcagaagtgtttgaatagaaaagtaacaactaacttcccatctttctggtggaagagttaattctgcctggagggttctgcctgggagacatgacagcatgtgtgtgactcctgtgtctgtttctgtggggtcatccctttcgtttcattttgccagggcctggctcaggattttttatggcagtgcctgtgaagacaagcctggccctccatccagtcacacaggaaatccacagagagcatgctgagagcagccagcggctgggctgccatcaggcctggtttatgatgccacaagtgaatggcacgtttgttcctctttatctctgagcattgaaggacttttggttaaaaaaaaaaattaagttcagagtaatccttttcatggaagaatcttcaggtcaccaaagaattgaaattttaagccccagattgtactgagctgtacctgtgggaaaaggaatggccagggtattgatgatggaaaagattcaaatgaggagttagaaggcaagccctctgtgggcagccgtcttccagaaacctcgaacttatgtctgtctccacctgagaaaggagaagaaaagctggtggtgacccctgctcctgctgggccatgccatggctctgaagatgccccgtgttcttaggaggtgctcacccctggcacctaaagacatttccttctggttgttgctctttaaaaacaaaataagcccctgaacgtgcttgcaggccagtttgtgtgcctgcacttgacgaattaccttgaccaacgggccaaaggcacagagctccaaggcatcatctttccttaaaatcctgagtgtttattaaaaagggacatggtctctaggtatcttattacatttgtatttcttacatttgaaatatcctaaccgctcccttcggtttcttcttaagaacatttacatctaattatttttcgtgcaagtcttgtaggacccacatgttttcctagctttggaaatcgatttttttcattcctcttatgaggatttccctatgtcagtaaacattaactttctatttcttccatttttgctcatttgaaacccctgctgcttctagatctatttctttgcacttgtataactttgaaataaattcctcatcccttagactaagagagtgggtgtctgtgaaaattgttttctccttcataatacctaaattctagtttgtcagtaaaatatttgtgtttggttaacaagctcttatttaagccattgagttagtataatctttattacctttgaaaaaccagagagctgaattttttgtcattctaagttgtaagtaacactgcagtcaagtcttctgatgaaatttccatatatcaaattgaaaataaagcaaaatatatttattactcataact

SEQ ID NO: 131893 - DNA, 3212 bp, Homo sapiens
  Payload ID: 5747
  Gene Symbol: FAM120B
  Gene Name: family with sequence similarity 120B
  ENST ID: ENST00000537664
  CDS Start-End: 86-2887
actcggttgccgcgcgtggacttacaagcccacgaagccatcgttcgtcacagcctggaaaagggagggggcatcgatctggtttatgtttggacctcgaggctccaccagcgctggcgcaggcaggaaggagatcctttcccggagttcagttatgggtgtgagaggtttgcaaggatttgtgggaagtacctgcccacatatatgtacagtagtaaatttcaaagaactggcagagcaccaccgaagcaagtatcctggatgtacccctaccattgtggttgatgccatgtgttgtctcagatattggtatactccagaatcttggatctgcggtggccagtggcgagaatacttttctgctttgcgagattttgttaaaacttttacggcagctgggatcaagttgatattcttctttgatggcatggtggagcaggataagagagatgaatgggtgaaacgaaggctcaagaacaacagggagatatccaggatttttcattacatcaagtcacacaaggagcagccaggcagaaatatgttcttcatcccctcagggctagctgtgtttacacgatttgctctaaagacactgggccaggaaactttgtgttctttgcaggaagcagattatgaggtagcttcctatggcctccagcataactgtcttgggattctgggggaagacactgattacctaatctatgacacttgtccctacttttcaattagcgagctctgcctagagagcctggacaccgtcatgctctgcagagagaagctctgtgagagtctgggcctctgtgtggccgaccttcctcttctggcctgcctccttggcaacgacataatcccagagggcatgtttgaaagctttaggtacaaatgcttatcgtcctacacctctgtaaaagagaactttgacaaaaaaggtaacatcatattagctgtgtcagaccatatatcgaaagttctttacttgtatcaaggtgagaaaaaattagaagagatattacctctgggaccaaacaaagctcttttttataaaggaatggcatcatatcttttaccaggacaaaaatctccatggtttttccaaaaacccaaaggtgtaataactttggacaaacaagtaatatccacgagttcagacgccgaatccagggaagaagttcccatgtgttcagatgctgaatccaggcaagaagttcccatgtgtacaggccctgaatccaggcgagaagttcccgtgtatacagattctgaacccaggcaagaagttcccatgtgttcagaccctgaacccaggcaagaagttcccacgtgtacaggccctgaatccaggcgagaagttcccatgtgttcagaccctgaacccaggcaagaagttcccatgtgtacaggccctgaagccaggcaagaagttcccatgtatacagactctgaacccaggcaagaagttcccatgtatacagactctgaacccaggcaagaagttcccatgtatacaggctctgaacccaggcaagaagttcccatgtatacaggccctgaatccaggcaagaagttcccatgtatacaggccctgaatccaggcaagaagttttaatacggacagaccctgaatctaggcaagaaattatgtgtacaggccatgaatccaaacaggaagttcccatatgtacagatcctatatccaagcaagaagactccatgtgtacacacgctgaaatcaatcaaaaattacctgtagcaacagattttgaatttaagctagaagctctcatgtgtacaaaccctgaaattaaacaagaagaccccacaaatgtggggcctgaagtaaagcaacaagtaaccatggtttcagacactgaaatcttaaaggttgctagaacacatcacgtccaagcagaaagctacctggtgtacaacatcatgagcagtggagagattgaatgcagcaacaccctagaagatgagcttgaccaggccttacccagccaggccttcatttaccgtcccattcgacagcgggtctactcactcttactggaggactgtcaagatgtcaccagcacctgcctagctgtcaaggagtggtttgtgtatcctgggaacccactgaggcacccggacctcgtcaggccgctgcagatgaccattccagggggaacgcctagtttgaaaatattatggctgaaccaagagccagaaatacaggttcggcgcttggacacactcctagcctgtttcaatctttcctcctcaagagaagagctgcaggctgtcgaaagcccatttcaagctttgtgctgcctcttgatctacctctttgtccaggtggacacgctttgcctggaggatttgcatgcgtttattgcgcaggccttgtgcctccaaggaaaatccacctcgcagcttgtaaatctacagcctgattacatcaaccccagagccgtgcagctgggctcccttctcgtccgcggcctcaccactctggttttagtcaacagcgcatgtggcttcccctggaagacgagtgatttcatgccctggaatgtatttgacgggaagctttttcatcagaagtacttgcaatctgaaaagggttatgctgtggaggttcttttagaacaaaatagatctcggctcaccaaattccacaacctgaaggcagtcgtctgcaaggcctgcatgaaggagaacagacgcatcactggccgagcccactggggctcacaccacgcagggaggtggggaagacagggctccagctaccacaggacgggctctgggtatagccgttccagtcagggacagccgtggagagaccagggaccaggaagcagacagtatgagcatgaccagtggagaaggtactagtcaacctccagaaagagtatggagagaaaaagaggcacacctggacgcagagccctgccagcgccctcctctgctgttgcagctgcaaggagaccatgcctgtgggagccaggcctcgcttgcatgaagaaggaacgatgcctttttcaatggtgtctccctcccattgtgcagaagagcttttgttggcttctctcccgagcttgtgcctgattctgtggcccaaaacaatcattgttaacatcttcatgtgtttcattctgatctttcattcatatatatgatgcctagctaatttcattttaaaataaatgggaatctgttg

SEQ ID NO: 131894 - DNA, 3721 bp, Homo sapiens
  Payload ID: 5747
  Gene Symbol: FAM120B
  Gene Name: family with sequence similarity 120B
  ENST ID: ENST00000619268
  CDS Start-End: 356-3124
gtcactcggcggcggcggtcgttccgggagcactccgggctccgatctccggtgtcacagcaaagatccgcgtctttccgatgaatccagccaatgccatccagtacacacgcgcaggaccggaggggccgggccgtgggaggaggctctgcgccgcggctgcccgggttcccctgcgctctgccctcggccgggtcgggtctccgcgggtgcgcgcagaggatctggctctcgccggcgcctgccgcccttatattcagccggccgcccgcatggctaatgagatgcaaatcagcagccccccaatctggcgagagctgtcacaaaggagccacttttccaaaccctcctctcaatggatcgccaaatgatcctttcccggagttcagttatgggtgtgagaggtttgcaaggatttgtgggaagtacctgcccacatatatgtacagtagtaaatttcaaagaactggcagagcaccaccgaagcaagtatcctggatgtacccctaccattgtggttgatgccatgtgttgtctcagatattggtatactccagaatcttggatctgcggtggccagtggcgagaatacttttctgctttgcgagattttgttaaaacttttacggcagctgggatcaagttgatattcttctttgatggcatggtggagcaggataagagagatgaatgggtgaaacgaaggctcaagaacaacagggagatatccaggatttttcattacatcaagtcacacaaggagcagccaggcagaaatatgttcttcatcccctcagggctagctgtgtttacacgatttgctctaaagacactgggccaggaaactttgtgttctttgcaggaagcagattatgaggtagcttcctatggcctccagcataactgtcttgggattctgggggaagacactgattacctaatctatgacacttgtccctacttttcaattagcgagctctgcctagagagcctggacaccgtcatgctctgcagagagaagctctgtgagagtctgggcctctgtgtggccgaccttcctcttctggcctgcctccttggcaacgacataatcccagagggcatgtttgaaagctttaggtacaaatgcttatcgtcctacacctctgtaaaagagaactttgacaaaaaaggtaacatcatattagctgtgtcagaccatatatcgaaagttctttacttgtatcaaggtgagaaaaaattagaagagatattacctctgggaccaaacaaagctcttttttataaaggaatggcatcatatcttttaccaggacaaaaatctccatggtttttccaaaaacccaaaggtgtaataactttggacaaacaagtaatatccacgagttcagacgccgaatccagggaagaagttcccatgtgttcagatgctgaatccaggcaagaagttcccatgtgtacaggccctgaatccaggcgagaagttcccgtgtatacagattctgaacccaggcaagaagttcccatgtgttcagaccctgaacccaggcaagaagttcccacgtgtacaggccctgaatccaggcgagaagttcccatgtgttcagaccctgaacccaggcaagaagttcccatgtgtacaggccctgaagccaggcaagaagttcccatgtatacagactctgaacccaggcaagaagttcccatgtatacagactctgaacccaggcaagaagttcccatgtatacaggctctgaacccaggcaagaagttcccatgtatacaggccctgaatccaggcaagaagttcccatgtatacaggccctgaatccaggcaagaagttttaatacggacagaccctgaatctaggcaagaaattatgtgtacaggccatgaatccaaacaggaagttcccatatgtacagatcctatatccaagcaagaagactccatgtgtacacacgctgaaatcaatcaaaaattacctgtagcaacagattttgaatttaagctagaagctctcatgtgtacaaaccctgaaattaaacaagaagaccccacaaatgtggggcctgaagtaaagcaacaagtaaccatggtttcagacactgaaatcttaaaggttgctagaacacatcacgtccaagcagaaagctacctggtgtacaacatcatgagcagtggagagattgaatgcagcaacaccctagaagatgagcttgaccaggccttacccagccaggccttcatttaccgtcccattcgacagcgggtctactcactcttactggaggactgtcaagatgtcaccagcacctgcctagctgtcaaggagtggtttgtgtatcctgggaacccactgaggcacccggacctcgtcaggccgctgcagatgaccattccagggggaacgcctagtttgaaaatattatggctgaaccaagagccagaaatacaggttcggcgcttggacacactcctagcctgtttcaatctttcctcctcaagagaagagctgcaggctgtcgaaagcccatttcaagctttgtgctgcctcttgatctacctctttgtccaggtggacacgctttgcctggaggatttgcatgcgtttattgcgcaggccttgtgcctccaaggaaaatccacctcgcagcttgtaaatctacagcctgattacatcaaccccagagccgtgcagctgggctcccttctcgtccgcggcctcaccactctggttttagtcaacagcgcatgtggcttcccctggaagacgagtgatttcatgccctggaatgtatttgacgggaagctttttcatcagaagtacttgcaatctgaaaagggttatgctgtggaggttcttttagaacaaaatagatctcggctcaccaaattccacaacctgaaggcagtcgtctgcaaggcctgcatgaaggagaacagacgcatcactggccgagcccactggggctcacaccacgcagggaggtggggaagacagggctccagctaccacaggacgggctctgggtatagccgttccagtcagggacagccgtggagagaccagggaccaggaagcagacagtatgagcatgaccagtggagaaggtactagtcaacctccagaaagagtatggagagaaaaagaggcacacctggacgcagagccctgccagcgccctcctctgctgttgcagctgcaaggagaccatgcctgtgggagccaggcctcgcttgcatgaagaaggaacgatgcctttttcaatggtgtctccctcccattgtgcagaagagcttttgttggcttctctcccgagcttgtgcctgattctgtggcccaaaacaatcattgttaacatcttcatgtgtttcattctgatctttcattcatatatatgatgcctagctaatttcattttaaaataaatgggaatctgttgtattctgattttttattagcaacactagattatgaggggttatctcctgttattaaaaagtcagaaaacactatacagtagtcctcccttatctgcgggggagacatcccaagaccctcagtggatgcctgagactggatagtatggaatcctacatatctataccttggctttttcctctacgtacataccatgataaagcttaacaaagaacagtgagagattaacagcaaccaataactaataaaagctatgtgaatgtggtctctgtc

SEQ ID NO: 131895 - DNA, 3212 bp, Homo sapiens; identical to SEQ ID NO: 131893
  Payload ID: 5747
  Gene Symbol: FAM120B
  Gene Name: family with sequence similarity 120B
  ENST ID: ENST00000622189
  CDS Start-End: 86-2887

SEQ ID NO: 131896 - DNA, 5155 bp, Homo sapiens; identical to SEQ ID NO: 131892
  Payload ID: 5747
  Gene Symbol: FAM120B
  Gene Name: family with sequence similarity 120B
  Uniprot ID: Q96EK7
  ENST ID: ENST00000617082
  CDS Start-End: 109-2841

SEQ ID NO: 131897 - DNA, 1794 bp, Homo sapiens
  Payload ID: 5747
  Gene Symbol: FAM120B
  Gene Name: family with sequence similarity 120B
  Uniprot ID: Q96EK7
  ENST ID: ENST00000616072
  CDS Start-End: 175-903
gaacgaggcggctgtggcggtggctgaggcggctgggcctagggtgcagcgggcgcgtctgcggctggtgttggcgcatctctagatgtcaccagcacctgcctagctgtcaaggagtggtttgtgtatcctgggaacccactgaggcacccggacctcgtcaggccgctgcagatgaccattccagggggaacgcctagtttgaaaatattatggctgaaccaagagccagaaatacaggttcggcgcttggacacactcctagcctgtttcaatctttcctcctcaagagaagagctgcaggctgtcgaaagcccatttcaagctttgtgctgcctcttgatctacctctttgtccaggtggacacgctttgcctggaggatttgcatgcgtttattgcgcaggccttgtgcctccaaggaaaatccacctcgcagcttgtaaatctacagcctgattacatcaaccccagagccgtgcagctgggctcccttctcgtccgcggcctcaccactctggttttagtcaacagcgcatgtggcttcccctggaagacgagtgatttcatgccctggaatgtatttgacgggaagctttttcatcagaagtacttgcaatctgaaaagggttatgctgtggaggttcttttagaacaaaatagatctcggctcaccaaattccacaacctgaaggcagtcgtctgcaaggcctgcatgaaggagaacagacgcatcactggccgagcccactggggctcacaccacgcagggaggtggggaagacagggctccagctaccacaggacgggctctgggtatagccgttccagtcagggacagccgtggagagaccagggaccaggaagcagacagtatgagcatgaccagtggagaaggtactagtcaacctccagaaagagtatggagagaaaaagaggcacacctggacgcagagccctgccagcgccctcctctgctgttgcagctgcaaggagaccatgcctgtgggagccaggcctcgcttgcatgaagaaggaacgatgcctttttcaatggtgtctccctcccattgtgcagaagagcttttgttggcttctctcccgagcttgtgcctgattctgtggcccaaaacaatcattgttaacatcttcatgtgtttcattctgatctttcattcatatatatgatgcctagctaatttcattttaaaataaatgggaatctgttgtattctgattttttattagcaacactagattatgaggggttatctcctgttattaaaaagtcagaaaacactatacagtagtcctcccttatctgcgggggagacatcccaagaccctcagtggatgcctgagactggatagtatggaatcctacatatctataccttggctttttcctctacgtacataccatgataaagcttaacaaagaacagtgagagattaacagcaaccaataactaataaaagctatgtgaatgtggtctctgtcaaaatatcgtgctgtaatcacccttcttgctatctgaaaaccaagaagaccactaagtgactaatggtcagagaagctggatgaggggctgattcatgtcctgggcatgacagagcgggaggcacaaggtttcatcacactattcacaatggcgagcaagttaaaacggatttcccatttaatttaattttcagacttcagttgaccatgagtaaccgaaaccacagaaagtgaagctggggatatttcagaaattcttttctaatcagaaattctaatcaaacataagtttcc

SEQ ID NO: 131898 - DNA, 3721 bp, Homo sapiens; identical to SEQ ID NO: 131894
  Payload ID: 5747
  Gene Symbol: FAM120B
  Gene Name: family with sequence similarity 120B
  ENST ID: ENST00000630384
  CDS Start-End: 356-3124

SEQ ID NO: 131899 - DNA, 1794 bp, Homo sapiens; identical to SEQ ID NO: 131897
  Payload ID: 5747
  Gene Symbol: FAM120B
  Gene Name: family with sequence similarity 120B
  Uniprot ID: Q96EK7
  ENST ID: ENST00000625626
  CDS Start-End: 175-903

SEQ ID NO: 131900 - DNA, 3716 bp, Homo sapiens
  Payload ID: 5748
  Gene Symbol: FAM120C
  Gene Name: family with sequence similarity 120C
  ENST ID: ENST00000328235
  CDS Start-End: 58-2745
cagatcgtcgcctatcctgcttgcgcagccgctatcgcgtctgcccaccgacgaagcatgggtgtccagggcttccaagagttcctggagaagcgctgtcccggggccgtggtgcccgtggacctcctaaaactcgcgcgcacggtctcgcgccagcagcagcagcagcacttgcaccgccagctgccgccgactgcagccctagcgcccggggctccacgcgccgccaggggctccgtgcctctgcaaccgccgcttccgcccgctgccttgggtgcctactccgggggcgcggggccgactcggcaccatcaccccgctcaccacttccaccatcatggccaagcgcagcccgggctgcaccctccgctgccgccgccgccgccccctcagctgcccggggcccgggtgctggtggacgccggctcggcgctgccgcggctctatggcggctaccagacggattgggtgtgtggcggccaatggaacgccatgctgggctacttgtcagcgctgtgccaggcttgtgcctatcctggcggcgacggcctggagctcgtggtcatgttcccggggggcctgggcaaggaccggctggccgagtggggccgtcggtgccaggccgagcggcagacagcgcaactgatcgtgggacacgtgggcaacaagggcacccctccaccgcgggcctggttcctgccaccggcctgcctgagccactgcgtgaggctagcactcatccgcttccgggtcaaggtctttcagagccttgaagaccaccatttggaagtggtggcgtttttcagggaaaatggcttccatggccttcttgcccatgactccgagtatgctctctacaatattccctcttactacagttcccatgctctgaaactgagctggaatgggaagaacctcactaccaaccagttcctgatgcaagaagtagccaagcagctgggcctgaagaggatgaatttccccatatttgctgcactgctaggtaaccacatcctcccagatgaggacctggctgcttttcactggagcctcttgggaccagaacatcctcttgcatcacttaaggttcgagctcatcagctggttcttcctccctgtgacgtggtgatcaaggctgtttctgagtatgtcagttccatcaaagatccctcaaacctggatgtagttgggaaggatgttttcaaacagtctcagtccaggacagaagataaaatagagcgattcaagaaagcagttgagtattattcagtcacaaccaaactctcttcgctgccagtgggtccctcctttctaggttttcggaataataggcttggaaatcctccccttccacgaaatcaagtgggcaccatttctgctggaaagccaatgttttctcatcaagtgccccagaaagtgaaatatccaccaccattcccagtgggacccaactcatctcttctcttctcctcccatgctttgggggaatcccatgctttttctgaggatcccatgctgcagaacagcccctttgccaattgggctgtctcctatgactcttctgcatcccagtttcccaattacctgccttctaaagcctcacctcctttgggaccagactcttcccactcctcttcctctgatggtgatgagccaaatggagctagctctgatcatatcacagaagcatttcatcaccagcctgagtggggaaatcccaatcgtgacagagggtcctgggcacagcctgttgatactggagtttcagaagcgagcctaggtgatggtgagccccacatcccatctctgctgtctatgtctacaaggaaccacatggatatcaccattccacccttacctccagtagctccagaagtcttgagagttgctgaacacagacaccggaggggtcttatgtacccatatatctaccatgtcctcactaagggtgaaattaagatccccgtatgtattgaggatgagtgtaacatggagctgcctccagctgctctcttattccggtcagctcgtcaatatgtatatggagttctttttagtctggcagagacacagaggaaaatggaacgcttggccatgcgacggcggctgcctgtggaagttccttcagtgatccttaaagagtggtctgcctataaagggaagtcacctcaaacccctgagctggtgtctgcactgacatttcgggaatggacttgcccaaacctcaagaagctctggctaggcaaagcagttgaagacaagaacagaaggatgcgggccttcctggcctgtatgaagtcggacacgcccagtatgctcaatccagctaatgtccccacccatctgctgctcatgtgttgtgtactccggtacatggttcagtggcctggtggccgaatcctgcatcgccatgagctagacaccttccttgcacaggcagtgtctacccagctttatgaaccagatcgactccaagaactcaaggtctccatccaatcccaccccaaggaggaaaactggagattgctgggatggttgtgggccagtgggctggcagcagatcctccaggggccgaggatccttcggcatgcaagtggtttctgtcggtgggccaggaaaggggcatggaaaagaacagactggtagaggatccaagggacacaaaaaaggaaataagcaaggctcttcagatggagtttctaaatccctggagcttcatcaaggtcggtctcgctcccaggtaaatggaaacagtggcgcattgatcaaggaagagaagagtgatcatcgtcttccagctccatcacaatgtgccttatccagagacagcaatgagtgtaataatggtaaccgctacctccctatgaataatagggagaagaaccacttacaagagcaaaagctagaaactgtggcacaacggaaagaggactgataagctgaagatggcttcaccaaaccaggaagagggaaaaacttttacttttctgattttaggcccaagctagaggaggatataaatgcttaccctagatttctccaggattttggtgggatgtcctattgtgtccatcttttccccttccctgcctgtttctgggacttcagattcagtggtctgtttctggagaagttctggtcaaagatgaatggcagtaagactaggtcctagtctcaaattgaagatatagcaccaatagtttatttatctcctctgggagcctagtaaggcagtagctgtcagaaattgggtatcatcacataaggtcctatagaaaagctctagctttggtttttctgagcatttataatgatactcattatcaaagacttatatgataaacctatgaggttgtggggacagctgtggcctcctgaggtttttttttgttttttttttttctctatgaagtggtatctacctcttcttcactccttccaacttacctacccctggattttgtaccaccacctctagctttggcctgacaatcagataggtagatgttttcagaaaagtaaggtagtattggttattttaatttttattttttattttatacacttcaaaaaaactatcaatggcctttgtactgggggattcaagtgaatcagaaaagtactgggcagatttttcctgcctctcaaccagtgcattgtttgtaaaatagaagatgtggcacagttcattcactccctattgcccacaccatga

SEQ ID NO: 131901 - DNA, 8057 bp, Homo sapiens
  Payload ID: 5748
  Gene Symbol: FAM120C
  Gene Name: family with sequence similarity 120C
  Uniprot ID: Q9NX05
  ENST ID: ENST00000375180
  CDS Start-End: 58-3348
cagatcgtcgcctatcctgcttgcgcagccgctatcgcgtctgcccaccgacgaagcatgggtgtccagggcttccaagagttcctggagaagcgctgtcccggggccgtggtgcccgtggacctcctaaaactcgcgcgcacggtctcgcgccagcagcagcagcagcacttgcaccgccagctgccgccgactgcagccctagcgcccggggctccacgcgccgccaggggctccgtgcctctgcaaccgccgcttccgcccgctgccttgggtgcctactccgggggcgcggggccgactcggcaccatcaccccgctcaccacttccaccatcatggccaagcgcagcccgggctgcaccctccgctgccgccgccgccgccccctcagctgcccggggcccgggtgctggtggacgccggctcggcgctgccgcggctctatggcggctaccagacggattgggtgtgtggcggccaatggaacgccatgctgggctacttgtcagcgctgtgccaggcttgtgcctatcctggcggcgacggcctggagctcgtggtcatgttcccggggggcctgggcaaggaccggctggccgagtggggccgtcggtgccaggccgagcggcagacagcgcaactgatcgtgggacacgtgggcaacaagggcacccctccaccgcgggcctggttcctgccaccggcctgcctgagccactgcgtgaggctagcactcatccgcttccgggtcaaggtctttcagagccttgaagaccaccatttggaagtggtggcgtttttcagggaaaatggcttccatggccttcttgcccatgactccgagtatgctctctacaatattccctcttactacagttcccatgctctgaaactgagctggaatgggaagaacctcactaccaaccagttcctgatgcaagaagtagccaagcagctgggcctgaagaggatgaatttccccatatttgctgcactgctaggtaaccacatcctcccagatgaggacctggctgcttttcactggagcctcttgggaccagaacatcctcttgcatcacttaaggttcgagctcatcagctggttcttcctccctgtgacgtggtgatcaaggctgtttctgagtatgtcagttccatcaaagatccctcaaacctggatgtagttgggaaggatgttttcaaacagtctcagtccaggacagaagataaaatagagcgattcaagaaagcagttgagtattattcagtcacaaccaaactctcttcgctgccagtgggtccctcctttctaggttttcggaataataggcttggaaatcctccccttccacgaaatcaagtgggcaccatttctgctggaaagccaatgttttctcatcaagtgccccagaaagtgaaatatccaccaccattcccagtgggacccaactcatctcttctcttctcctcccatgctttgggggaatcccatgctttttctgaggatcccatgctgcagaacagcccctttgccaattgggctgtctcctatgactcttctgcatcccagtttcccaattacctgccttctaaagcctcacctcctttgggaccagactcttcccactcctcttcctctgatggtgatgagccaaatggagctagctctgatcatatcacagaagcatttcatcaccagcctgagtggggaaatcccaatcgtgacagagggtcctgggcacagcctgttgatactggagtttcagaagcgagcctaggtgatggtgagccccacatcccatctctgctgtctatgtctacaaggaaccacatggatatcaccattccacccttacctccagtagctccagaagtcttgagagttgctgaacacagacaccggaggggtcttatgtacccatatatctaccatgtcctcactaagggtgaaattaagatccccgtatgtattgaggatgagtgtaacatggagctgcctccagctgctctcttattccggtcagctcgtcaatatgtatatggagttctttttagtctggcagagacacagaggaaaatggaacgcttggccatgcgacggcggctgcctgtggaagttccttcagtgatccttaaagagtggtctgcctataaagggaagtcacctcaaacccctgagctggtgtctgcactgacatttcgggaatggacttgcccaaacctcaagaagctctggctaggcaaagcagttgaagacaagaacagaaggatgcgggccttcctggcctgtatgaagtcggacacgcccagtatgctcaatccagctaatgtccccacccatctgctgctcatgtgttgtgtactccggtacatggttcagtggcctggtggccgaatcctgcatcgccatgagctagacaccttccttgcacaggcagtgtctacccagctttatgaaccagatcgactccaagaactcaagattgagaaactggatgcccgagggatccagcttgctgccctcttcatgagtggagtcgacacagctctgtttgctaatgatgcctgtggccagccagtcccttgggagcattgctgtccatggatttactttgatggcaagctgttccagagcaagctaattaaagcaggccgagagcgagtatctctggttgagctctgtgatggccaggctgacctggcaaccaaagtggaaaagatgagacagagcatccttgaaggagtcaacatgaatcatccaccgccttctgctctacttccgtcacctacttttgtgcctcccatggtgccctctctctaccctgtttcactttattcccgagctatgggctccatgccacttccccctcaagggaggagccggggatttgcaggtctccatccaatcccaccccaaggaggaaaactggagattgctgggatggttgtgggccagtgggctggcagcagatcctccaggggccgaggatccttcggcatgcaagtggtttctgtcggtgggccaggaaaggggcatggaaaagaacagactggtagaggatccaagggacacaaaaaaggaaataagcaaggctcttcagatggagtttctaaatccctggagcttcatcaaggtcggtctcgctcccaggtaaatggaaacagtggcgcattgatcaaggaagagaagagtgatcatcgtcttccagctccatcacaatgtgccttatccagagacagcaatgagtgtaataatggtaaccgctacctccctatgaataatagggagaagaaccacttacaagagcaaaagctagaaactgtggcacaacggaaagaggactgataagctgaagatggcttcaccaaaccaggaagagggaaaaacttttacttttctgattttaggcccaagctagaggaggatataaatgcttaccctagatttctccaggattttggtgggatgtcctattgtgtccatcttttccccttccctgcctgtttctgggacttcagattcagtggtctgtttctggagaagttctggtcaaagatgaatggcagtaagactaggtcctagtctcaaattgaagatatagcaccaatagtttatttatctcctctgggagcctagtaaggcagtagctgtcagaaattgggtatcatcacataaggtcctatagaaaagctctagctttggtttttctgagcatttataatgatactcattatcaaagacttatatgataaacctatgaggttgtggggacagctgtggcctcctgaggtttttttttgttttttttttttctctatgaagtggtatctacctcttcttcactccttccaacttacctacccctggattttgtaccaccacctctagctttggcctgacaatcagataggtagatgttttcagaaaagtaaggtagtattggttattttaatttttattttttattttatacacttcaaaaaaactatcaatggcctttgtactgggggattcaagtgaatcagaaaagtactgggcagatttttcctgcctctcaaccagtgcattgtttgtaaaatagaagatgtggcacagttcattcactccctattgcccacaccatgaaagggtgggaatcagtgtaatgaacttgagtacgaaagggactcaagagactgtgtgtgtgtgtgtgtgtgtgtgtgtgtgtgtgtgtgtgtgaatgtgtgcttgtgtgtgggtgtgggtggatgttgtgtgggtgggtgtatatatgaatgtgtgtatatgcatacacataccctttatataaagagacagatctatttatctatacatattttatatatatgtaagtgtgtgtgtatgtgtgtatatatgtgtgtatatatatatacacacatatatacacacatacatacatacatacatacatacatacatacatggtgatgtcccagaggatttactcaatttcccagaaatgcttccactgctatggagtggaaggtttcaaaagaccacacttttaatctgaaattcttactaagtcacagtgcattcacaactatgagaagttggatgggcttctctaaatcagacaaaaagtactttccagaaattgcctgttcagaacaataaactcttgggttgttacaagcttaatcttgaacagagccctcacatcccatatggtgaaaacaggaggttggaatgggattgggaagagttgggcatttccttatgaaggtttggagagaaaaggggggatgggaggtgactaccatttgaaagggctttcagccaatttggaggaaatctcttctggaactccagggtcaaattggtttcaggctagaattgattgacatgaatccctgaaggagagaggactagctttggaaagatagggtagggaagtgtgaggaaactatttgattttacacgcctagattgtttcatttgttcattgacattctgactactggatcttttcatttgctttgcaaggaagactttagaggactctggcctgggccttgagaagaattctattaaaagattctcagcctcctgtgtggccaggatctgcccaggataaagaggctattcctccttgctggagataatcttgagacaaccttgcatttccagtttccctccttgggcagcctaactatgagggagggaaacatggcttgcaataaattagcattgtgtcttcattcaggaattgaggcttccagcctcatatacctccttttgggctttgtgatattcttgcccaagaagtaccatttctacagaaatacaactgactaatcttctagcagggttctttttgaaaaaccccatgcaccttaacccacagcaggtccttggtgatttttgcccagacaaccagaaggctatttgcttactgcccacttacaatgaccagatcataggaaattgaaaacagtgtcagactatttagtcctaatctgtcccagattaagagaatccatgattttcagggggagggagccctgcaatgccttgacccctgcccagatacttcttacataaaccaaagaaaaatgacaagagtgtacatctaaccagacagaagtagaaacaaagtatagaaaaacctcctctttggaatcagctcccttaatgtggtcccccttctcttggacctgcccaacctttcacaacgtcttgaaggtaggacttctatatccagcaaaggaagggatagtagtaaatttacatggcttggaattttctttctggagccacagagggatgaatcctttggagctctaaaagcaaccagtatcactgagctgtgagatacctatatctccattttctaataggaagcacttggacttaaaattgctaagatattttttgcagttgctatttctgtgcatcttgaatctatctgacacaatcaaatgacagtattgttaactctcacaccattaagaaaatttcttattttgtaggcattcactgtgagaggtaaaattgctgctttggcaggtatgattccagtttgccaaacggcttttcttccttccacaacctctttttcccctagcccagggtgaaacaagtgggtcatctccaaccttgatttttatttggattcagcattttgggtttggaaggttacaagaaggaaccataaatggccatattcctagatttttatttatctgacaaaatacacaacttaaaagccaggaaaactaaggttcattacagggagatgaactttttctaattggaggacaaattgtggaaggtggggtctgatctttgcttcaccacttgaagagactgtcatccttcacctgaggttccatttctagcttttatgtgacctctcttgaacaaagtcatttgggaacccccagaaatgacccctttacattgtaggaccataagcaaaacactggttgtgtatagtcactgatccccaaggacttgcagttttttatttctgctggtgtgtcttgggatcagcttataactcctactcttacttagtcagtgaccagtccagtctggtctggaccaggcctgacaaacttctgctcacttgcatcattttcattctgagccagtaggactttgggtagactttaaagcccaagaattggtactcgctttggctagtgacatttgatttttgtctccatcttgatttctgacatcattggccaagtcacattaactttttttgatcactgagaaaaacagtcgaacaaggcattacagagggtggttaaggtagagggtggggggcaggaatgcttatgtaggatagaaagaatgtgggggtagctgtttggttatggtgatccagtcctttggaaccttacaaggctcctgtgggcatgtcaatgttaccattacagcctctacgacccacccacctttgaaaagtcagtacaagtagaccacagtttaaagtagttagtataattctactaaggtttaatcattatacttgttcacttcctggtgcatatttcctaaatatgcttggggtgtggggtggggggttgagttttcactgttccattgcgtgtcatcttatatttttctccatcctgtgactttggcatcttactcgactttctattttcttttcccttggcttattgcagtagtctgctggtgcaggtagagagctcagtgcacctattcccctgttactgctaattatcttgaatattgtcagaggttattttgatgttctaagaatataaagtcattttttacaaaatcatcttttccaagttaaaagcaaaataaaaaaatcccctgtgctagggtgcccatttcagcttttgacattgcccctgtacttttatagatgctctttttgtccgtgttggtagtaactaatgactagtgaattttcatgtaaatgaagcaaaataaatatttcagattttattaatctctcataacccagccaaatctgatgacttcattttaattgcttcccagaaagcacttcccctcctaccttctattctattctattctattctattctattctattctattctattctattctattctgttctattctgttctattctgtttttagaataacacactaggtaaagaaactttaactgcaaggagtcagtgacttttagtgctccctgataaatgatgttattgacaaaagtaaaaaattatttcattgtttttttcctgtattactatctcctctcctgtgcttttgacagtgtgtttagtggatggataatatgtatttctctttcccactcccagattccaaattccctgcctttttggcccacctcaccacaaaagctccatagtttattaatgtaagtttgaatggatgcttctttggggaaacttcaggagttaatggaagagtttcagaaaggaatgagaatgcctcaggagttgttctgtgatggaaattggtctgttgttctgttaatgctgatggaaagaaacttacaacgcttaataaaaatctattcttttagtaaaaaaaattgtgaaataa

SEQ ID NO: 131902 - DNA, 1140 bp, Homo sapiens
  Payload ID: 5748
  Gene Symbol: FAM120C
  Gene Name: family with sequence similarity 120C
  Uniprot ID: Q9NX05
  ENST ID: ENST00000477084
  CDS Start-End: 84-800
cacgcgcccgcccccagcttcgcgcccagatcgtcgcctatcctgcttgcgcagccgctatcgcgtctgcccaccgacgaagcatgggtgtccagggcttccaagagttcctggagaagcgctgtcccggggccgtggtgcccgtggacctcctaaaactcgcgcgcacggtctcgcgccagcagcagcagcagcacttgcaccgccagctgccgccgactgcagccctagcgcccggggctccacgcgccgccaggggctccgtgcctctgcaaccgccgcttccgcccgctgccttgggtgcctactccgggggcgcggggccgactcggcaccatcaccccgctcaccacttccaccatcatggccaagcgcagcccgggctgcaccctccgctgccgccgccgccgccccctcagctgcccggggcccgggtgctggtggacgccggctcggcgctgccgcggctctatggcggctaccagacggattgggtgtgtggcggccaatggaacgccatgctgggctacttgtcagcgctgtgccaggcttgtgcctatcctggcggcgacggcctggagctcgtggtcatgttcccggggggcctgggcaaggaccggctggccgagtggggccgtcggtgccaggccgagcggcagacagcgcaactgatcgtgggacacgtgggcaacaagggcacccctccaccgcgggcctggttcctgccaccggcctgcctgagccactgcgtgaggctagcactcatccgcttccgggtcaagcaagctgccatgttgtgagctgccctatggagaggcccacaggaaaagaaactgagggaagcctccaaccaacactcagtgaggaactgaggccctcagtccaactacagcctgcaaggaactgaattgctgccaacagccacgtacgtgagtgagcttggaagcggatccttccccaggcaagccttgagatgactgcagccctggctggcaccttgattgaagcctgtaggagaccttgagccagaggacccagctaagccatgcctacagatactatgagataataaatgttgttttaagccactaagtttgggggctactttgttacacagaaatagataactgaaacaccatt

SEQ ID NO: 131903 - DNA, 4554 bp, Homo sapiens
  Payload ID: 5749
  Gene Symbol: FAM122A
  Gene Name: family with sequence similarity 122A
  Uniprot ID: Q96E09
  ENST ID: ENST00000394264
  CDS Start-End: 111-974
gcccgctgacagattctcggtggcggcggcagcggcggcggccctggactgcggggaatgggaatcctaggtccctgactgagcacctcccccgcctccctgcccccgacatggctcaggagaagatggagctagacctggagctgcctccgggtacgggcgggagcccggcggagggcggtggcagcggcggcggcgggggcctcaggaggtctaacagcgcccccctgatccacggcctcagtgacacttcgccggtgttccaggccgaggcgccgagcgccaggcggaacagcacaacgttcccgagccgccacggcctgctgctgccggcctcccctgtccgcatgcacagcagccgcttgcaccagatcaaacaagaagagggcatggacttgatcaaccgagagacggtccacgaacgggaggtgcagaccgcaatgcagataagccactcctgggaggaaagtttcagcctgagtgacaacgacgtggagaaatccgcctcccccaagcgcatcgatttcattcctgtgtcaccagcaccgtcacccactcggggaattgggaagcagtgtttttcgccatccttgcaaagttttgtaagtagcaacggattgcctccaagccctattcccagcccaacgacccgatttaccacccggagaagccagagccccatcaattgcattagaccaagtgttcttggaccattgaaaagaaaatgtgaaatggaaactgaatatcagccaaagagatttttccagggcatcaccaacatgctttcttctgacgttgcacagctgtcagatcctggtgtgtgtgtatcttcggatacccttgatggaaacagcagcagtgccggatcttcttgtaactcaccagcgaaagtcagcactaccaccgactctcctgtgtcacctgcccaagcggcttctccatttattccactagatgaactttcgtctaagtgattcactcatcctgagactttctttttgcagtggagagagagaataatctagttggggcaaacactgaactttgtcaattaatttgaggctatttcctatttgaccccttttcttttttgaaattccctgaaatgatgttattctagagaacttctatgtcaggttcctttggatacccttgaattcagtgtagtaatattttcagacgtttccccaataagtgtgttgaagcatacatctttacgctgctaatatgtctaaatacatatgttatcccttgatttttttaaataactgagagctctatttatttatgggattattaagttctgatgaaaatataaatgttgacttaatcagcatagtaaactgatgtttaaaattccatacttcatgcccacactaatttttaatgttattttcagtggttgccgatttccatttgatgaagaactatacagcttaaaaaaatacgttagttatatctatctagtggttgtctgttttacccaggaattcttggatatttagttttctgggtactgaagtggatgggagggggaatgattaaagaacaaattataaaagtttgaacaaatcttttcaaattaagtatataaaagtaaacttttaagaaaaacatttttaatgagattttaatagtaattctagtcagtcatacaactataactactatagagaaaataaaattttttcctttttttttttaaccggaaagtgcatttgcttgggtgtaatcctaaagtgaaatgggacagtgccttgcagtctttgcccactatacataggctaaggctaagctctttgtactactgcaaacttaaaagtttttcaaatgtgggaaacgtgtgggaaggcttgttgaactttggcgcactcaggtaaacaatactctctcaattgttgatatactttaaaatattcagttgtgcctcagttccagaaattattgccaaacaggagccacagcaatttttggctacttttctgctctgcccatctgtcaccttactggttttcccttgttcaggaaggaagcagctgtttccttgccaacaggtcccttcctctccatctcccaccaaactagggcaccattgattagacaaaggtacagtgtaacttgggtttctgacagcaacaacaggactgtgaattgtttaacctctgtggttaaagctacagcttgagttgactgccttggggatgtcagttaattaaggggtgatgatttgcaagagaaaattagtggagagtcacataggtaaatcattatttaacttaggttttcctaaagttagaatagtcgaatgttcttttctttacctttacaattaagacaaaatgtttaataagaatagcaaaaatttttttatattatgcatccttatacctcacatatcttccttaactagatagtttgacagaaagaatggcatacaaagaggaaaggggaaaaatgactcagaacaagacaaaagctctgactgtttaaagttatcgcttacagagactttaacaattttgtggaatttttacaactatgagagtaaatggaactggtcaactcttgacagttgcctcaagatggagtgaaattgcatcgagggtaagactgtgtccacaggtttaaaattctctcttctgagtaatagtgttcatgtgctcccattctcgaccctgttgttgaaattcaaacttaaatagcctgacttcttgttgggtaacttgccctgcctccagaggtatttgaacttcattatcttcaacacaggaattgttaatcttctcacttcacctgttcttgcattagctcaattgatgtcatcactgatttcctaaactagaaactatggaagcatctttgacttttccttttctctgttggattagcttaatcaccaagtcctgtcaacttctgaaatgaatctcaaatttcttcccttctctatctgttgcccctgattttgccttaagttcttgcctgagtgatctcccagcctgtcttctgtctccttttggttcagtctttatactgcctcttgagtaatctttctgaaatttaaacttgatatttttcgccctcttgcttgaaaacttcacttgcttccccatttcctactctttaaggaatgatttctttagcctcagatagaaggacctttatgatctggccatattctgaaatagcttcaatcctctcctcatctctgttccagtatacatctttccttcttattctgcaaacattagaccacttgatattctttaaatatgtcatgtacttttcttgtgtctgttctttgggataattcctatccttttcagggaggcaaattgcacgtgagtttaagtatgaaggcaatgtatacctgctgattgtaaaatatttaaacattgtacatatctgtgtggttttaaaagtctgcttttaattatgtaaaattcatcttccctttccacagataacttctgttaacaacttgatatctattgtacaagatgtgttactggcatttccatgtatatatgtatataaatgcaggaaaccaacatgtcattgacacctctcttctttacttttccccatatctaatcattcctcaagtcttactgatttttatcagctagaatctatctccttatttctacctctattgccactctgatccaggctaccagcatttccctcttaggcttctgaagcaacttcctaactcccacttgtgctcctcacactcactctggtcggctatccattcattctccatacagcaactagagtcattcttttaaaattgcggacctgatccttccatctcccagctgaacgcttttcatttgcttcctgttctcatgagtatgccaaaatgtattaattctgggctaggaggccctgaggaatttggtccttccctcctcccccctcgttttctgtgcttcgccctcactggcttgcctttcttttccttaaatacatcatgttctctcctattttagatccttttccccgaaggtatggaaacattatttctgtaagcttattcttctatatagatgggaagtttttaaatcagataaggttctaagggcatgtggacaatttacgttatcatagtattgttcataacgtccatcattattctgtagactgtaagggcttacttagctcgtgtaagaattatccttcaaaaagcatttttaaggtattagtattgctaatctataaactttgtgcaagaagtcctaaagtcaatagcaacatttatttaaagtacagtttgtcatacttaataaacctctggtatattttcctttattatgcttgttaaaaacacagtataaatgggagaaatcattaaagatcattaactccaaggctgctggatgttaggacccttaagcatacttaaaagattgattgtaatcaagaataacttgtatcagattgccttccagtgattcacatttattagttcaaccagttacatacctgtagcaagagaccagtttatttggcaataaaattggggaaggaatcaagacttaaatgaggaaa

SEQ ID NO: 131904 - DNA, 2706 bp, Homo sapiens
  Payload ID: 5750
  Gene Symbol: FAM122B
  Gene Name: family with sequence similarity 122B
  Uniprot ID: Q7Z309
  ENST ID: ENST00000298090
  CDS Start-End: 263-988
attggagtggccgctggacgcgtgcgcaggacccgatgggtgcccggacgcggaagaactggcccagcggaggttcccgcttctgaagcgtgggaggcggaagagactgcagcccccgcccccgtccccaagcctccgccccttagcccccgcccccagctgccagtccccagcagctcagtcctgcagtgagagtcttgggagtccatagctaagcaccaggagctgagcactgcccgctgtgcctgcctgcaagtctgacatggctcaggagaaaatggagctggaccttgagcctgacacatcttatgggggaaccctgaggagatccagcagcgctcccctaatccatgggctcagtgacctttcacaggttttccaaccttacacacttagaactcggaggaatagtacaacaattatgagccgtcacagcctgttgctgtcatcctcacctaatcgtattcctagtagcagactgcatcagatcaaaagggaagaaggcctggatatggtgaacagagaaactgcacatgaaagggaaatgcaaacggcaatgcagataagccaatcatgggatgagagcttgagcctgagtgacagtgattttgacaagccggagaaattatattctcctaagagaattgacttcactccagtttctccagcaccttcacccaccaggggattcggaaagatgttcgtgagcagcagtggattgccaccaagtccagttcccagtccaagacgattttcaaggagaagtcagagtccagtcaagtgcattagacccagtgttcttggtcctcttaaaagaaaaggtgaaatggagacagaaagtcagcccaagagactcttccaaggcactaccaatatgttatctccagatgccgcgcaactgtctgatctcagttcatggtggtgttatcaaggagaagaaattcctgccttgaccagatgtgtggagcatctacaaatgaatgaatagttatttacacacaaaccactgtgtacaaaagcgtccatggagctgtcagtgtctcgagtggtattatgaggcctcaggtgccttggggtacattgtcatgctataagggatgtatatcataaggtatggtggaagaggggccttatgtgaatgattgccacatactgtttctgttgctgctttttttccgattcctttttgtcattggatttgtttgttttgtcatgtggtgaatggtgttttagttattgtgttgctgccagaatcagaatccagttcttgttcttactgccttatagttattgtgttgccaccagaatcagaatccagttcttgttcatactgccttgtagtgagggcagtttaatatctacaaagaagcttttagaagctgaaaaagtcaatgtgattgtgcattctgcttttaagaagctgtttcagctatgaactgtgtatgtgctataagtgtgaggtaccataagttatttaatttttaaaagaggaaactcctgagtgagctgtttaagaaatctgagtgtgatctattgttacgttatttataactaggtaaaatgtctgtcgtgatagatttcttttaacgttcagatactgtggttgggttgtctatatttaatatgcagatttgcctgctggaatcataatccatttttaagtgaatgtaagaaatgaaaactactgcatttgtgtcttttgaaggcaaggatccttggattttaaaggaagagtatgtgctttgaaggcactcagagactagtaatagcatatggtttgaagggaaacccattctctttcaattacaagagagcatcacttagcgtgcagtacttctgttacagcatccgatgtgtcctttattttaaattgtaaccataacagccattaatggctttatttcttgtattgctctcatctgggaaaagtctctacttcttcaaacgtaacataaatctattatgaagcttgtcccctagtatgccattataaagaaaaaattcttcgatggtatgcagtgtatctattctgtttgtaaaagatcatgtcaaaatgttctgcctctataatgataatagatggttttgtctttcaggatatttatccacctactgtcttctttgccttaaagggacacttggccatcatttttaggctcgaacttaacactgttaagaaataactgaaatatgatggtatttacattaatttttgaaattcaatggtgggatagaattaggtcaggaaatggaagttgttccaatggtgtgagaactaggagacaagatgattcactttattatttaaaccaagcttcatttttagtttttgttgtttaaatggactggaaagttaagtttttgcagggattgttttgaaataaagagatatgctaactcacagatgaactttgttaagacccctttatttttatataaagtctaatatttgaaaagcgattgttataaagtaaaattctctcttcctattctaatatatatcatatatttcaggcttctatttgaaaacaggtataagagatgatatgatacaaccctatagataatgttttttgcttgattgacttatataatcactgtttcatgattactgcttttggaataataggaagttttgtgaaatgctggccttgtgtatatcttagaatgcaaatttaataaagtgtgtatacatgcataaaattt

SEQ ID NO: 131905 - DNA, 4326 bp, Homo sapiens
  Payload ID: 5750
  Gene Symbol: FAM122B
  Gene Name: family with sequence similarity 122B
  ENST ID: ENST00000343004
  CDS Start-End: 951-1754
cgcttctgaagcgtgggaggcggaagagactgcaggttgtagattttggtcttggccccaacgggttcccccagaccattagaacccgagagaggaagaggaggcaccgcggcggcggctgagaggccgaacccccaacctgtcctcgaggcgggaggggggcagggaggggagaagcaccgatcccagggctgaggagcctccgggaccgggtccgggagcatggggggctggaccgggtccccgagcatggggagctggagccgccaaggccgcccggccgggtcctacccgactgtcaggtcctcggtgctagcgctgcccgggcagccgcagcatctgtagcccggccccgcttgtggtcctcagccggaaagatagcagcatgagttccgccgctgcctagtttcctccccctcctcttctccctcctctctcctcttcccagaccacctccttctttcccgcccctgcgcttcttttcccttaccctctgtcctcctccctcccctctgccctctcccttcccctccctcctccgcccccttcctctccctttcccccctctgccctcctcttatcctctctgtcctcctgcttttccacctatccttttccctccctcttccctcctccctccatccttgttttccctccatccttctttccttcatccttttccttcattctgtcaccttccaccactacctcttcgtcctcctctcctgcctcaccatcatcctcccttcctcatcatcatcctccttccctcctcctctcctacttttctccgcccccagcccccgcccccgtccccaagcctccgccccttagcccccgcccccagctgccagtccccagcagctcagtcctgcagtgagagtcttgggagtccatagctaagcaccaggagctgagcactgcccgctgtgcctgcctgcaagtctgacatggctcaggagaaaatggagctggaccttgagcctgacacatcttatgggggaaccctgaggagatccagcagcgctcccctaatccatgggctcagtgacctttcacaggttttccaaccttacacacttagaactcggaggaatagtacaacaattatgagccgtcacagcctgttgctgtcatcctcacctaatcgtattcctagtagcagactgcatcagatcaaaagggaagaaggcctggatatggtgaacagagaaactgcacatgaaagggaaatgcaaacggcaatgcagataagccaatcatgggatgagagcttgagcctgagtgacagtgattttgacaagccggagaaattatattctcctaagagaattgacttcactccagtttctccagcaccttcacccaccaggggattcggaaagatgttcgtgagcagcagtggattgccaccaagtccagttcccagtccaagacgattttcaagcaggagaagtcagagtccagtcaagtgcattagacccagtgttcttggtcctcttaaaagaaaaggtgaaatggagacagaaagtcagcccaagagactcttccaaggcactaccaatatgttatctccagatgccgcgcaactgtctgatctcagttcatgttcagatattttggatggcagtagtagcagcagtggcttatcctcagacccgctggctaaaggcagcgctaccgcagagtctccagtagcatgctccaattcatgctcttcgttcatcttgatggatgatctctcacccaagtgacttaaccatttctgattcaacgttttaactgctgtttcctacataaaatgtttagtggggaacgcagagaactttgatccataatgaggattaaagttttacagatttcacacattctgatgctattattactctttggcatctctcttctccaaagttcaattttgtgagcctagtgaccttactagtatctggttttgctgatctcattttggatttagtgattaaatctcaaatgctgatttttgattgcttagaggaatcttttttcttagtgcctcaaaaaacacctattttgagtctatacatttaagaaaggcactgatgtgtattgcctttaatggtccttttccgcagcagtgatatgacagatttgatcagaaattctcttgcttgagagatttttttttgtcctctgttgactacatagtttcaaatctctctttatttcatgatgatatataaattgcttttaattatattaaatttttatttttctgcatcagcttcaagtacattattttgtttccctttcctgtttgagccgcttatgccatttctcacagaggggaagaaatacgtagttgctttcattactcttattgcttctttgctgttggggtgtgtgaagtgagcattgattttagtgctgagaatgtaaacggacttacaggatgcttggattagtcatcacaggttcttatgactttgctaccacagttgatatatttctcctcaaacctgttgccctaaggaatatataaaatattgttgatatttctaggtggtgttatcaaggagaagaaattcctgccttgaccagatgtgtggagcatctacaaatgaatgaatagttatttacacacaaaccactgtgtacaaaagcgtccatggagctgtcagtgtctcgagtggtattatgaggcctcaggtgccttggggtacattgtcatgctataagggatgtatatcataaggtatggtggaagaggggccttatgtgaatgattgccacatactgtttctgttgctgctttttttccgattcctttttgtcattggatttgtttgttttgtcatgtggtgaatggtgttttagttattgtgttgctgccagaatcagaatccagttcttgttcttactgccttatagttattgtgttgccaccagaatcagaatccagttcttgttcatactgccttgtagtgagggcagtttaatatctacaaagaagcttttagaagctgaaaaagtcaatgtgattgtgcattctgcttttaagaagctgtttcagctatgaactgtgtatgtgctataagtgtgaggtaccataagttatttaatttttaaaagaggaaactcctgagtgagctgtttaagaaatctgagtgtgatctattgttacgttatttataactaggtaaaatgtctgtcgtgatagatttcttttaacgttcagatactgtggttgggttgtctatatttaatatgcagatttgcctgctggaatcataatccatttttaagtgaatgtaagaaatgaaaactactgcatttgtgtcttttgaaggcaaggatccttggattttaaaggaagagtatgtgctttgaaggcactcagagactagtaatagcatatggtttgaagggaaacccattctctttcaattacaagagagcatcacttagcgtgcagtacttctgttacagcatccgatgtgtcctttattttaaattgtaaccataacagccattaatggctttatttcttgtattgctctcatctgggaaaagtctctacttcttcaaacgtaacataaatctattatgaagcttgtcccctagtatgccattataaagaaaaaattcttcgatggtatgcagtgtatctattctgtttgtaaaagatcatgtcaaaatgttctgcctctataatgataatagatggttttgtctttcaggatatttatccacctactgtcttctttgccttaaagggacacttggccatcatttttaggctcgaacttaacactgttaagaaataactgaaatatgatggtatttacattaatttttgaaattcaatggtgggatagaattaggtcaggaaatggaagttgttccaatggtgtgagaactaggagacaagatgattcactttattatttaaaccaagcttcatttttagtttttgttgtttaaatggactggaaagttaagtttttgcagggattgttttgaaataaagagatatgctaactcacagatgaactttgttaagacccctttatttttatataaagtctaatatttgaaaagcgattgttataaagtaaaattctctcttcctattctaatatatatcatatatttcaggcttctatttgaaaacaggtataagagatgatatgatacaaccctatagataatgttttttgcttgattgacttatataatcactgtttcatgattactgcttttggaataataggaagttttgtgaaatgctggccttgtgtatatcttagaatgcaaatttaataaagtgtgtatacatgcataaaattt

SEQ ID NO: 131906 - DNA, 4246 bp, Homo sapiens
  Payload ID: 5750
  Gene Symbol: FAM122B
  Gene Name: family with sequence similarity 122B
  Uniprot ID: Q7Z309
  ENST ID: ENST00000370790
  CDS Start-End: 930-1673
ggaagagactgcaggttgtagattttggtcttggccccaacgggttcccccagaccattagaacccgagagaggaagaggaggcaccgcggcggcggctgagaggccgaacccccaacctgtcctcgaggcgggaggggggcagggaggggagaagcaccgatcccagggctgaggagcctccgggaccgggtccgggagcatggggggctggaccgggtccccgagcatggggagctggagccgccaaggccgcccggccgggtcctacccgactgtcaggtcctcggtgctagcgctgcccgggcagccgcagcatctgtagcccggccccgcttgtggtcctcagccggaaagatagcagcatgagttccgccgctgcctagtttcctccccctcctcttctccctcctctctcctcttcccagaccacctccttctttcccgcccctgcgcttcttttcccttaccctctgtcctcctccctcccctctgccctctcccttcccctccctcctccgcccccttcctctccctttcccccctctgccctcctcttatcctctctgtcctcctgcttttccacctatccttttccctccctcttccctcctccctccatccttgttttccctccatccttctttccttcatccttttccttcattctgtcaccttccaccactacctcttcgtcctcctctcctgcctcaccatcatcctcccttcctcatcatcatcctccttccctcctcctctcctacttttctccgcccccagcccccgcccccgtccccaagcctccgccccttagcccccgcccccagctgccagtccccagcagctcagtcctgcagtgagagtcttgggagtccatagctaagcaccaggagctgagcactgcccgctgtgcctgcctgcaagtctgacatggctcaggagaaaatggagctggaccttgagcctgacacatcttatgggggaaccctgaggagatccagcagcgctcccctaatccatgggctcagtgacctttcacaggttttccaaccttacacacttagaactcggaggaatagtacaacaattatgagccgtcacagcctggaagaaggcctggatatggtgaacagagaaactgcacatgaaagggaaatgcaaacggcaatgcagataagccaatcatgggatgagagcttgagcctgagtgacagtgattttgacaagccggagaaattatattctcctaagagaattgacttcactccagtttctccagcaccttcacccaccaggggattcggaaagatgttcgtgagcagcagtggattgccaccaagtccagttcccagtccaagacgattttcaaggagaagtcagagtccagtcaagtgcattagacccagtgttcttggtcctcttaaaagaaaaggtgaaatggagacagaaagtcagcccaagagactcttccaaggcactaccaatatgttatctccagatgccgcgcaactgtctgatctcagttcatgttcagatattttggatggcagtagtagcagcagtggcttatcctcagacccgctggctaaaggcagcgctaccgcagagtctccagtagcatgctccaattcatgctcttcgttcatcttgatggatgatctctcacccaagtgacttaaccatttctgattcaacgttttaactgctgtttcctacataaaatgtttagtggggaacgcagagaactttgatccataatgaggattaaagttttacagatttcacacattctgatgctattattactctttggcatctctcttctccaaagttcaattttgtgagcctagtgaccttactagtatctggttttgctgatctcattttggatttagtgattaaatctcaaatgctgatttttgattgcttagaggaatcttttttcttagtgcctcaaaaaacacctattttgagtctatacatttaagaaaggcactgatgtgtattgcctttaatggtccttttccgcagcagtgatatgacagatttgatcagaaattctcttgcttgagagatttttttttgtcctctgttgactacatagtttcaaatctctctttatttcatgatgatatataaattgcttttaattatattaaatttttatttttctgcatcagcttcaagtacattattttgtttccctttcctgtttgagccgcttatgccatttctcacagaggggaagaaatacgtagttgctttcattactcttattgcttctttgctgttggggtgtgtgaagtgagcattgattttagtgctgagaatgtaaacggacttacaggatgcttggattagtcatcacaggttcttatgactttgctaccacagttgatatatttctcctcaaacctgttgccctaaggaatatataaaatattgttgatatttctaggtggtgttatcaaggagaagaaattcctgccttgaccagatgtgtggagcatctacaaatgaatgaatagttatttacacacaaaccactgtgtacaaaagcgtccatggagctgtcagtgtctcgagtggtattatgaggcctcaggtgccttggggtacattgtcatgctataagggatgtatatcataaggtatggtggaagaggggccttatgtgaatgattgccacatactgtttctgttgctgctttttttccgattcctttttgtcattggatttgtttgttttgtcatgtggtgaatggtgttttagttattgtgttgctgccagaatcagaatccagttcttgttcttactgccttatagttattgtgttgccaccagaatcagaatccagttcttgttcatactgccttgtagtgagggcagtttaatatctacaaagaagcttttagaagctgaaaaagtcaatgtgattgtgcattctgcttttaagaagctgtttcagctatgaactgtgtatgtgctataagtgtgaggtaccataagttatttaatttttaaaagaggaaactcctgagtgagctgtttaagaaatctgagtgtgatctattgttacgttatttataactaggtaaaatgtctgtcgtgatagatttcttttaacgttcagatactgtggttgggttgtctatatttaatatgcagatttgcctgctggaatcataatccatttttaagtgaatgtaagaaatgaaaactactgcatttgtgtcttttgaaggcaaggatccttggattttaaaggaagagtatgtgctttgaaggcactcagagactagtaatagcatatggtttgaagggaaacccattctctttcaattacaagagagcatcacttagcgtgcagtacttctgttacagcatccgatgtgtcctttattttaaattgtaaccataacagccattaatggctttatttcttgtattgctctcatctgggaaaagtctctacttcttcaaacgtaacataaatctattatgaagcttgtcccctagtatgccattataaagaaaaaattcttcgatggtatgcagtgtatctattctgtttgtaaaagatcatgtcaaaatgttctgcctctataatgataatagatggttttgtctttcaggatatttatccacctactgtcttctttgccttaaagggacacttggccatcatttttaggctcgaacttaacactgttaagaaataactgaaatatgatggtatttacattaatttttgaaattcaatggtgggatagaattaggtcaggaaatggaagttgttccaatggtgtgagaactaggagacaagatgattcactttattatttaaaccaagcttcatttttagtttttgttgtttaaatggactggaaagttaagtttttgcagggattgttttgaaataaagagatatgctaactcacagatgaactttgttaagacccctttatttttatataaagtctaatatttgaaaagcgattgttataaagtaaaattctctcttcctattctaatatatatcatatatttcaggcttctatttgaaaacaggtataagagatgatatgatacaaccctatagataatgttttttgcttgattgacttatataatcactgtttcatgattactgcttttggaataataggaagttttgtgaaatgctggccttgtgtatatcttagaatgcaaatttaataaagtgtgtatacatgcataaaattta

SEQ ID NO: 131907 - DNA, 1381 bp, Homo sapiens
  Payload ID: 5750
  Gene Symbol: FAM122B
  Gene Name: family with sequence similarity 122B
  Uniprot ID: Q7Z309
  ENST ID: ENST00000486347
  CDS Start-End: 70-816
agtcttgggagtccatagctaagcaccaggagctgagcactgcccgctgtgcctgcctgcaagtctgacatggctcaggagaaaatggagctggaccttgagcctgacacatcttatgggggaaccctgaggagatccagcagcgctcccctaatccatgggctcagtgacctttcacaggttttccaaccttacacacttagaactcggaggaatagtacaacaattatgagccgtcacagcctggaagaaggcctggatatggtgaacagagaaactgcacatgaaagggaaatgcaaacggcaatgcagataagccaatcatgggatgagagcttgagcctgagtgacagtgattttgacaagccggagaaattatattctcctaagagaattgacttcactccagtttctccagcaccttcacccaccaggggattcggaaagatgttcgtgagcagcagtggattgccaccaagtccagttcccagtccaagacgattttcaagcaggagaagtcagagtccagtcaagtgcattagacccagtgttcttggtcctcttaaaagaaaaggtgaaatggagacagaaagtcagcccaagagactcttccaaggcactaccaatatgttatctccagatgccgcgcaactgtctgatctcagttcatgttcagatattttggatggcagtagtagcagcagtggcttatcctcagacccgctggctaaaggcagcgctaccgcagagtctccagtagcatgctccaattcatgctcttcgttcatcttgatggatgatctctcacccaagtgacttaaccatttctgattcaacgttttaactgctgtttcctacataaaatgtttagtggggaacgcagagaactttgatccataatgaggattaaagttttacagatttcacacattctgatgctattattactctttggcatctctcttctccaaagttcaattttgtgagcctagtgaccttactagtatctggttttgctgatctcattttggatttagtgattaaatctcaaatgctgatttttgattgcttagaggaatcttttttcttagtgcctcaaaaaacacctattttgagtctatacatttaagaaaggcactgatgtgtattgcctttaatggtccttttccgcagcagtgatatgacagatttgatcagaaattctcttgcttgagagatttttttttgtcctctgttgactacatagtttcaaatctctctttatttcatgatgatatataaattgcttttaattatattaaatttttatttttctgcatcagcttcaagtacattattttgtttccctttcctgtttgagccgcttatgccatttctcaca

SEQ ID NO: 131908 - DNA, 1059 bp, Homo sapiens
  Payload ID: 5750
  Gene Symbol: FAM122B
  Gene Name: family with sequence similarity 122B
  ENST ID: ENST00000611027
  CDS Start-End: 218-1021
ggacgcggaagaactggcccagcggaggttcccgcttctgaagcgtgggaggcggaagagactgcagcccccgcccccgtccccaagcctccgccccttagcccccgcccccagctgccagtccccagcagctcagtcctgcagtgagagtcttgggagtccatagctaagcaccaggagctgagcactgcccgctgtgcctgcctgcaagtctgacatggctcaggagaaaatggagctggaccttgagcctgacacatcttatgggggaaccctgaggagatccagcagcgctcccctaatccatgggctcagtgacctttcacaggttttccaaccttacacacttagaactcggaggaatagtacaacaattatgagccgtcacagcctgttgctgtcatcctcacctaatcgtattcctagtagcagactgcatcagatcaaaagggaagaaggcctggatatggtgaacagagaaactgcacatgaaagggaaatgcaaacggcaatgcagataagccaatcatgggatgagagcttgagcctgagtgacagtgattttgacaagccggagaaattatattctcctaagagaattgacttcactccagtttctccagcaccttcacccaccaggggattcggaaagatgttcgtgagcagcagtggattgccaccaagtccagttcccagtccaagacgattttcaagcaggagaagtcagagtccagtcaagtgcattagacccagtgttcttggtcctcttaaaagaaaaggtgaaatggagacagaaagtcagcccaagagactcttccaaggcactaccaatatgttatctccagatgccgcgcaactgtctgatctcagttcatgttcagatattttggatggcagtagtagcagcagtggcttatcctcagacccgctggctaaaggcagcgctaccgcagagtctccagtagcatgctccaattcatgctcttcgttcatcttgatggatgatctctcacccaagtgacttaaccatttctgattcaacgttttaactgctgtttc

SEQ ID NO: 131909 - DNA, 1078 bp, Homo sapiens
  Payload ID: 5750
  Gene Symbol: FAM122B
  Gene Name: family with sequence similarity 122B
  Uniprot ID: Q7Z309
  ENST ID: ENST00000493333
  CDS Start-End: 218-1018
ggacgcggaagaactggcccagcggaggttcccgcttctgaagcgtgggaggcggaagagactgcagcccccgcccccgtccccaagcctccgccccttagcccccgcccccagctgccagtccccagcagctcagtcctgcagtgagagtcttgggagtccatagctaagcaccaggagctgagcactgcccgctgtgcctgcctgcaagtctgacatggctcaggagaaaatggagctggaccttgagcctgacacatcttatgggggaaccctgaggagatccagcagcgctcccctaatccatgggctcagtgacctttcacaggttttccaaccttacacacttagaactcggaggaatagtacaacaattatgagccgtcacagcctgttgctgtcatcctcacctaatcgtattcctagtagcagactgcatcagatcaaaagggaagaaggcctggatatggtgaacagagaaactgcacatgaaagggaaatgcaaacggcaatgcagataagccaatcatgggatgagagcttgagcctgagtgacagtgattttgacaagccggagaaattatattctcctaagagaattgacttcactccagtttctccagcaccttcacccaccaggggattcggaaagatgttcgtgagcagcagtggattgccaccaagtccagttcccagtccaagacgattttcaaggagaagtcagagtccagtcaagtgcattagacccagtgttcttggtcctcttaaaagaaaaggtgaaatggagacagaaagtcagcccaagagactcttccaaggcactaccaatatgttatctccagatgccgcgcaactgtctgatctcagttcatgttcagatattttggatggcagtagtagcagcagtggcttatcctcagacccgctggctaaaggcagcgctaccgcagagtctccagtagcatgctccaattcatgctcttcgttcatcttgatggatgatctctcacccaagtgacttaaccatttctgattcaacgttttaactgctgtttcctacataaaatgtttagtgggg

SEQ ID NO: 131910 - DNA, 1368 bp, Homo sapiens
  Payload ID: 5751
  Gene Symbol: FAM122C
  Gene Name: family with sequence similarity 122C
  Uniprot ID: Q6P4D5
  ENST ID: ENST00000370784
  CDS Start-End: 407-994
ggcgggacccaactgattgtcaaaggcggcagattgtagtttttgttttggccggaaaggcttaccatgagttgccagggctgagagagatggagaaggattcgcggcggtgacagattaaattccccagttacattatagacttggaggtgggggatcttctcatcgttagaggccccgatcatgggagataggcggttcggagccagttctgcctaactttgtgttcactgatgttagggctgctagggctgcaaaggtgggcacccctactcgcctaagagctttctcctctcttctctttttcccctttgcctctctccttacatcacctgcccactaagtagacttgtccttgtgtggacgggagccggaaagccttgagaacttattcctcgacccggacatggcacaggagaaaatgaaactaggtttcaagtcgctgccgagttccactaccgcagacggcaacattctgagaagagtcaacagtgcccctttgatcaatggacttggttttaattcacaggtgttgcaagctgacatgttaagaattaggacaaacagaacaacatttaggaatcgacgctctctgttgttgccacctcctccctttcatggttccatcagccgccttcatcaaatcaaacaggaagaagccatggatttaataaatagagaaacaatgtctgaatggaagctacaaagtgagatacagataagtcactcttgggaagaaggcttgaaactggtgaaatggcatttcaatatcaaccaaaaaagattttccaaggcacaaccaacatgctttcttctgatacttcccaactgtcagaaaataatgtgtatctacttccagctacttttgatggaaacgacagcaatgctggatcttctggtaattcgtcagctgaaatcggcactgtcacaaactctcctgtgtcaccttctgatactggttctcatttgttctagtagacaaactttcaactaaatgattcacccatcccaagactttctcaccagtggagaaacacacacatcaagcaaaccaagtcagagcaatgagaattgtactgtataatttaaactatctcctatttatcttttttcctcaatttcctaaaattctatttatctacagaacttgcgtgtataattcttgtgtacatccttaaatttaatgtaataacatgttaaagatgttttccaaatcagaaccatgttgaagatacaagcgtaaattgttaggctgctattttctagaaaatgctgtaccttgactttttaaaataatcttatgaaacataattctgataaaatataattgttcaattaacaaagtaaaatgatgtttgacaattatgt

SEQ ID NO: 131911 - DNA, 1344 bp, Homo sapiens
  Payload ID: 5751
  Gene Symbol: FAM122C
  Gene Name: family with sequence similarity 122C
  Uniprot ID: Q6P4D5
  ENST ID: ENST00000370785
  CDS Start-End: 406-864
gcgggacccaactgattgtcaaaggcggcagattgtagtttttgttttggccggaaaggcttaccatgagttgccagggctgagagagatggagaaggattcgcggcggtgacagattaaattccccagttacattatagacttggaggtgggggatcttctcatcgttagaggccccgatcatgggagataggcggttcggagccagttctgcctaactttgtgttcactgatgttagggctgctagggctgcaaaggtgggcacccctactcgcctaagagctttctcctctcttctctttttcccctttgcctctctccttacatcacctgcccactaagtagacttgtccttgtgtggacgggagccggaaagccttgagaacttattcctcgacccggacatggcacaggagaaaatgaaactaggtttcaagtcgctgccgagttccactaccgcagacggcaacattctgagaagagtcaacagtgcccctttgatcaatggacttggttttaattcacaggtgttgcaagctgacatgttaagaattaggacaaacagaacaacatttaggaatcgacgctctctgttgttgccacctcctccctttcatggttccatcagccgccttcatcaaatcaaacaggaagaagccatggatttaataaatagagaaacaatgtctgaatggaagctacaaagtgagatacagataagtcactcttgggaagaaggcttgaaactgaatgacaatggcttacagaaatcatcctctctaaagtgcattgatttaactccagtatcctcaatggcttcttccatcaagaagactgggaagtctacttccagctacttttgatggaaacgacagcaatgctggatcttctggtaattcgtcagctgaaatcggcactgtcacaaactctcctgtgtcaccttctgatactggttctcatttgttctagtagacaaactttcaactaaatgattcacccatcccaagactttctcaccagtggagaaacacacacatcaagcaaaccaagtcagagcaatgagaattgtactgtataatttaaactatctcctatttatcttttttcctcaatttcctaaaattctatttatctacagaacttgcgtgtataattcttgtgtacatccttaaatttaatgtaataacatgttaaagatgttttccaaatcagaaccatgttgaagatacaagcgtaaattgttaggctgctattttctagaaaatgctgtaccttgactttttaaaataatcttatgaaacataattctgataaaatataattgttcaattaacaaagtaaaa

SEQ ID NO: 131912 - DNA, 2119 bp, Homo sapiens
  Payload ID: 5751
  Gene Symbol: FAM122C
  Gene Name: family with sequence similarity 122C
  Uniprot ID: Q6P4D5
  ENST ID: ENST00000414371
  CDS Start-End: 174-521
gaggaccacaagcggggccgggctacagatgctgcggctgcccgggcagcgctagcaccgaggacctgacagtcgggtgagggcctgggacagacgcagcagactgggatatgcaaagagaggagtagcctaattgtcaagtctagatctaacaaaagcagtgtcccaagatcatggcatatttccctggaactggaaggactgatcaagaaacacagctagacttgtccttgtgtggacgggagccggaaagccttgagaacttattcctcgacccggacatggcacaggagaaaatgaaactaggtttcaagtcgctgccgagttccactaccgcagacggcaacattctgagaagagtcaacagtgcccctttgatcaatggacttggttttaattcacaggtgttgcaagctgacatgttaagaattaggacaaacagaacaacatttaggaatcgacgctctctggaaattacttcacccacttctgttgaacagaagcccaaagacctcttctgaccttgagactatgccttctcccaaatcgcccctttgctttatctcctaagaactctgaagttgccatgcctgttcctttctctcccaccaggaattctggcacttctgctcaagccggatgtcactgcgtcacttctccatccccaccccctcctcttccaaaggaagcaggggaaatgtctcatcttcctaagagaaaaggttgtgcttttcttgagcaattcatctgttctaattttaggcctactgacatctgtctcattaggttttgcttttcctattggcaaccacaaaccccaaatctagtgtatggcccacaaagttgcaagcatgtaatacattcctgatcctgctttatgccctgcacatctagcccatgttcagttcatgttaagtagcattataaaccatcttaaatcatttctgaaactaggcagagacatttataaacacagtgtacaaccctttgtttaggattttctgagcattttatctctagttactatagtaggaaatggcttaaaaacagcaaacctaggaaaatgaaaaataatttttaaaaatcttaatgtctttacaatatgaattttctgtgatctctcttaaatggaactaagcttggtttttcctcctatcttaatcctttcactggagataattcttagtaattagcttcacccagcaccctccctaacctcccgctacttctactcccagccaccttcacaccatgacatcattccttggtgctgatactcttggttccttccaaggacttttctttcttcctggagtgtgagaaaaaggcacagtgggaaatttacacaaaagataccagtgatgtttattacatctcagtgaagtcattatttctattttaatactttgtttcatgtggaaaaattatctaaggtaattcctttgcaaacgccacttgtagtacttaatttggggagaattctcttccagaagccttgttttctgcaattaatttctcacattattactaaaagaatcagccaatacaagatttgatccacattttgtccaattaaaaaattcttgtagcttatgattctgtagctcaagttcaaatcctacctacctcagacatttcacactatctccctgctggtgtcatcaatttcagtctatcttctcatgatttcctggatgaagtttttcagtgggaaatcctaagcctttgcctgaacctaaattggttccttcccatcccttaggtataaattaaaaataatctcttctagggaagtctttcatcattattttatgaaggaaatttgccataccatgttttctcacttataagtcggagctaaatgataagaacttatgaacacaaggaaacaacagacactagggtctacttgagcggggaggatgtgaggagggaagcagaaaagataactattaggtactgggcttactacctgggtgatgaaatagtatgtacaacaggccaggcgcggtggctcacacctgtaatcccagcactttggaaggccaaggtgggcagatcacctgaggtcaggagtttgagatcagcctggtcaacatggtgaaaccccatctctact

SEQ ID NO: 131913 - DNA, 2064 bp, Homo sapiens
  Payload ID: 5751
  Gene Symbol: FAM122C
  Gene Name: family with sequence similarity 122C
  ENST ID: ENST00000623326
  CDS Start-End: 227-466
ttatcgcaggctctgaggggcgggacccaactgattgtcaaaggcggcagattgtagtttttgttttggccggaaaggcttaccatgagttgccagggctgagagagatggagaaggattcgcggcggtgacagattaaattccccagttacattatagacttggagacttgtccttgtgtggacgggagccggaaagccttgagaacttattcctcgacccggacatggcacaggagaaaatgaaactaggtttcaagtcgctgccgagttccactaccgcagacggcaacattctgagaagagtcaacagtgcccctttgatcaatggacttggttttaattcacaggtgttgcaagctgacatgttaagaattaggacaaacagaacaacatttaggaatcgacgctctctggaaattacttcacccacttctgttgaacagaagcccaaagacctcttctgaccttgagactatgccttctcccaaatcgcccctttgctttatctcctaagaactctgaagttgccatgcctgttcctttctctcccaccaggaattctggcacttctgctcaagccggatgtcactgcgtcacttctccatccccaccccctcctcttccaaaggaagcaggggaaatgtctcatcttcctaagagaaaaggttgtgcttttcttgagcaattcatctgttctaattttaggcctactgacatctgtctcattaggttttgcttttcctattggcaaccacaaaccccaaatctagtgtatggcccacaaagttgcaagcatgtaatacattcctgatcctgctttatgccctgcacatctagcccatgttcagttcatgttaagtagcattataaaccatcttaaatcatttctgaaactaggcagagacatttataaacacagtgtacaaccctttgtttaggattttctgagcattttatctctagttactatagtaggaaatggcttaaaaacagcaaacctaggaaaatgaaaaataatttttaaaaatcttaatgtctttacaatatgaattttctgtgatctctcttaaatggaactaagcttggtttttcctcctatcttaatcctttcactggagataattcttagtaattagcttcacccagcaccctccctaacctcccgctacttctactcccagccaccttcacaccatgacatcattccttggtgctgatactcttggttccttccaaggacttttctttcttcctggagtgtgagaaaaaggcacagtgggaaatttacacaaaagataccagtgatgtttattacatctcagtgaagtcattatttctattttaatactttgtttcatgtggaaaaattatctaaggtaattcctttgcaaacgccacttgtagtacttaatttggggagaattctcttccagaagccttgttttctgcaattaatttctcacattattactaaaagaatcagccaatacaagatttgatccacattttgtccaattaaaaaattcttgtagcttatgattctgtagctcaagttcaaatcctacctacctcagacatttcacactatctccctgctggtgtcatcaatttcagtctatcttctcatgatttcctggatgaagtttttcagtgggaaatcctaagcctttgcctgaacctaaattggttccttcccatcccttaggtataaattaaaaataatctcttctagggaagtctttcatcattattttatgaaggaaatttgccataccatgttttctcacttataagtcggagctaaatgataagaacttatgaacacaaggaaacaacagacactagggtctacttgagcggggaggatgtgaggagggaagcagaaaagataactattaggtactgggcttactacctgggtgatgaaatagtatgtacaacaggccaggcgcggtggctcacacctgtaatcccagcactttggaaggccaaggtgggcagatcacctgaggtcaggagtttgagatcagcctggtcaacatggtgaaaccccatctctact

SEQ ID NO: 131914 - DNA, 2104 bp, Homo sapiens
  Payload ID: 5752
  Gene Symbol: FAM124A
  Gene Name: family with sequence similarity 124A
  Uniprot ID: Q86V42
  ENST ID: ENST00000280057
  CDS Start-End: 132-1880
gagttgtttgccggctcccgggccgccagacgctcggagggagcccggccggctcggactgggcggccgggagggagggcgccccgggtcacgacggcgcccgcaagccgagcgcggccgggacgtgcaccatggacccaaaggcgggcggcggcggcgaggaggacgactgcgtggactcgggcgccgagaccggagggtccgactacagccacctgtcctccacgagcaatggattctccacctggcggatgccatgttgcctgttcctttactgtacacacggtgacaaagaaaagggaagatggagcctccaggttgaacatacctggccctcaggtgagctttccgttgaagaggcgcaggaccctttcctggtcagcatccacataatcgcagacccaggggagtcccagcccctgcaggaggccatcgacaacgtcctggcgtggatccaccccgacctcccgctgttccgggtgtccgagaggcgggcgtcccggcggcggcggaagccccccaagggcgctcagccagcgctggctgtggtgctgttcctgcaggaggagtacggcgaagagcagatcctgcagctgcaccgcacactgcagcagccgccctggcgccaccaccacaccgagcaggtgcacggccggttcctgccctacctgccctgcagccaggacttcttcacgctggcccctgggacgccgctttgggccatccggcccgtgcactacggcaaggaaatcgtgcgcttcaccgtctactgtcgctacgacaactatgctgacagcctcaggttctaccagctgattctccggaggagccccagccagaagaaagcggacttctgcatcttccctattttttccaacctggatgtggacatccagttctccctgaaaagactgccctgtgaccagtgcccggtgcccaccgactcctccgtgctggagttccgagtgagggacataggcgagctcgtgcctctcctgcccaacccttgcagccccatcagcgaggggcgctggcagacggaggaccatgatgggaacaagatcctcctacaggcacaaagggtgcataagaagtttcctaaacctggcagagtacatcatgcctccgagaagaaacgtcattccactcctttgccgagcactgctgtaccaagccatacacctggcagcagccagcagtccccgctcaacagtcctcacccggggcccatccggacaggcctgcctcctgggcaccagcaggaatttgccggacgagccaacagcacccccaaccctccctggtctttccagagaagcaagtccttgttttgtttgcccacgggaggcccctccctggcctcctcagctgaaccacagtggttttcaaacacaggtgccccagggcacagggcatcagagtggaggcatggccacctcctctccatcgatgacctagagggggcccaggagacagacgtggacacaggcctgcggctgtcctcatcggacctgtctgtggtctctgcatattctgcacccagtaggttctgcagcacagtggagacacccctcccctccgaaagatgcagcagccactgggcagctcacaaggattccagggagggaccactgcccactgtcagcagggtgaccacagaggcctcctgggcttccctccctttcttcaccaaaaggtcttccagctcctcagcgacagctcgtgctgctcccccagctcccagcacctccaccctcacagactcctccccacagctcccatgcgatacccccaaagtcaagcagactgatggagacatgccaccacccccagggtcggctggccccggggataacgacatggaggaattctacatctgaatgccctctgctcttgttctcgaaacacacaaactcagagacacagactcaggccccactgcccctctggccactgagcacaccacattcttcatgatccatttcccaggagcccgtagcacatttgcctaccacccactcttagctggggggtggtatatctctagagacacagcagaaaaatactggcatttttatgcaaataaattctcaacaaacttgtc

SEQ ID NO: 131915 - DNA, 4761 bp, Homo sapiens
  Payload ID: 5752
  Gene Symbol: FAM124A
  Gene Name: family with sequence similarity 124A
  Uniprot ID: Q86V42
  ENST ID: ENST00000322475
  CDS Start-End: 136-1776
gcttgagttgtttgccggctcccgggccgccagacgctcggagggagcccggccggctcggactgggcggccgggagggagggcgccccgggtcacgacggcgcccgcaagccgagcgcggccgggacgtgcaccatggacccaaaggcgggcggcggcggcgaggaggacgactgcgtggactcgggcgccgagaccggagggtccgactacagccacctgtcctccacgagcagtgagctttccgttgaagaggcgcaggaccctttcctggtcagcatccacataatcgcagacccaggggagtcccagcccctgcaggaggccatcgacaacgtcctggcgtggatccaccccgacctcccgctgttccgggtgtccgagaggcgggcgtcccggcggcggcggaagccccccaagggcgctcagccagcgctggctgtggtgctgttcctgcaggaggagtacggcgaagagcagatcctgcagctgcaccgcacactgcagcagccgccctggcgccaccaccacaccgagcaggtgcacggccggttcctgccctacctgccctgcagccaggacttcttcacgctggcccctgggacgccgctttgggccatccggcccgtgcactacggcaaggaaatcgtgcgcttcaccgtctactgtcgctacgacaactatgctgacagcctcaggttctaccagctgattctccggaggagccccagccagaagaaagcggacttctgcatcttccctattttttccaacctggatgtggacatccagttctccctgaaaagactgccctgtgaccagtgcccggtgcccaccgactcctccgtgctggagttccgagtgagggacataggcgagctcgtgcctctcctgcccaacccttgcagccccatcagcgaggggcgctggcagacggaggaccatgatgggaacaagatcctcctacaggcacaaagggtgcataagaagtttcctaaacctggcagagtacatcatgcctccgagaagaaacgtcattccactcctttgccgagcactgctgtaccaagccatacacctggcagcagccagcagtccccgctcaacagtcctcacccggggcccatccggacaggcctgcctcctgggcaccagcaggaatttgccggacgagccaacagcacccccaaccctccctggtctttccagagaagcaagtccttgttttgtttgcccacgggaggcccctccctggcctcctcagctgaaccacagtggttttcaaacacaggtgccccagggcacagggcatcagagtggaggcatggccacctcctctccatcgatgacctagagggggcccaggagacagacgtggacacaggcctgcggctgtcctcatcggacctgtctgtggtctctgcatattctgcacccagtaggttctgcagcacagtggagacacccctcccctccgaaagatgcagcagccactgggcagctcacaaggattccagggagggaccactgcccactgtcagcagggtgaccacagaggcctcctgggcttccctccctttcttcaccaaaaggtcttccagctcctcagcgacagctcgtgctgctcccccagctcccagcacctccaccctcacagactcctccccacagctcccatgcgatacccccaaagtcaagcagactgatggagacatgccaccacccccagggtcggctggccccggggataacgacatggaggaattctacatctgaatgccctctgctcttgttctcgaaacacacaaactcagagacacagactcaggccccactgcccctctggccactgagcacaccacattcttcatgatccatttcccaggagcccgtagcacatttgcctaccacccactcttagctggggggtggtatatctctagagacacagcagaaaaatactggcatttttatgcaaataaattctcaacaaacttgtcataaaatatattttttgaatattcagcatttgaggtatggtttagtgggtttatacaatttaaatggcttatataattatttgaaatgaaaagaaaacctagtcagccagaaccaatttggcaatttttccatggtatgaaggcaaatcaattaaggccaaaacgttgaatgtgggagagatagtaagtgacttgtatgagggattactgcataataacgtaacgcacaccttactggattctccatatatatttacattaccagagaacagtggccctagggatgtttaagcactgcttataatggaaaaagtcagcttgagaagtaaacgtatatcagactacaggtaattcctcatcttgaagccatgcaacacctgcaaatctggatttatacaaaagttgctaatgtgtttcataaagatttagcatgagtaacagactcttggtgcatttaaaatatgtgagttccagaaagtagatttgcatacaccttttcaacagcacatttcactggaatggatgaggggcttctgaagaccactccactacctgaatttatttggatcactgaggaagagcatttgttgggattacagaattataggccattagacatcatgggtaggtagtcttaagatccttcaactttcaaaaaccacagtctaaggactatattcaaatgacaagagccgcactgtatactgctttctgcagtgaccatgctgggtcacgcatcctatgtttctcatttttaaatgatttggaacattttagccagcattttgatcacacagattaataatgctgttctccccaaaacgggaaactttacctgaaacgctctcctgaacaaacaccagtgcactgccagcctcacatgattgcatgggagctttaattaacgctggagcccagcaaccttggcttttcctgcctgttatctgctactgtcacaccgtgaatggtatttgaatctcacctccctctcacctcagtaagagtatgtttgtttacagccccaacctcagcaatgccaaaggctggcatcgggggcagtgccaagctgtccctggatactatttacctttgaggaagaacagcatgggtttgccaagctcaattcccaggctggtgctccttgaattaatcatggcacagtgttcatctctctggaaatgcccacgccagcccagacacagcctcagagtcctttccaacacgaccctccaggcagcagttaccaaccatcagtcttcagctgaagcttcaagtctttgccatccttgtaatgacagccttaggccttgccccaagcattctggactctctaacactcagaattgtaatgtaatattctgctctaatttaaatttttaaaaatatagtctcctaattcaggataaggagtaagcaaactttctgaaaagggctagataataagtattttaggctttgccagtcatatggtctcttgcagctactcaactctgccactgtagtatgaaagcagccatgagtaatatgttaatgaatgggaatggctgagttccaataaagctttattttttttttatttgagacggggtcttgctctgttgcccaggctggagtgcaatggcgcaatctcagctcactgcaagctctgcctcctgggttcaagccattctcctgcctcagcctcccaagtagctgcgactacaggtgcgcaccacaatgcctggctaattttttgtatttttagtagagacagagtttcaccatgttggccaggttggtctcaaactcctgacttcgtgatccacccaccttggcctcccaaagcactgggattacaggcatgagccaccattcccagccaataaaactttatttacaagaacagctggtgggccagatttggcccaagggtcatagtttattatcccttgagctaggctgctgcctgaggttgattcaacatcccagctccagtcaacaacaaaaattctaagtctcccgcctaatgctgctgtggtgtgtcatgccaaaaaagtgggctactcaggttagaccaatgacttcagaaccacagggctcagaacaggaaggagcttctttctgcagagctgattcctggaaagccaccagcactccaccttctgcccagaaatgtgattcagtcaatagctgatgaggaaaagcaacctgcaaacattaggaagaaggagaaaaataattcagaggtgatgataccacctccaatgaacagggaagcaagttcatcagtaacaaaagtcagtgaggcaaaaaaaaaaaaaaaaaaaaaaaaaaaaggctaatggccgagggctggctccttctttctccctaatcagtgtccttatttcagtgtgctcacatgctcgcctaggactgctttagagtacaactctggacccgccctcatcacagtccaatctaccaaactgagtgaccctaaaggacatcatagacaacatttgaaagcaagaaatgcaaaatgttcccatagcatcaggtgagcagggagaggatgcccactgtagaccacatggaaatggcagtccctccacggagagggaatcacaggaacacatttaccaaagccttcccttccattcctggccattccagtagcatcttcctcatccagaagggcttccaatactctctggaggatcctgactcgtttggagtattatccttgtaaaagatgctggcacattgtaggtgctcaataaatgtgttcaattgaaaaata

SEQ ID NO: 131916 - DNA, 2383 bp, Homo sapiens
  Payload ID: 5752
  Gene Symbol: FAM124A
  Gene Name: family with sequence similarity 124A
  Uniprot ID: Q86V42
  ENST ID: ENST00000615498
  CDS Start-End: 169-1074
gggagagggcgcggcgcggggttcgcggctggcgcttgagttgtttgccggctcccgggccgccagacgctcggagggagcccggccggctcggactgggcggccgggagggagggcgccccgggtcacgacggcgcccgcaagccgagcgcggccgggacgtgcaccatggacccaaaggcgggcggcggcggcgaggaggacgactgcgtggactcgggcgccgagaccggagggtccgactacagccacctgtcctccacgagcagtgagctttccgttgaagaggcgcaggaccctttcctggtcagcatccacataatcgcagacccaggggagtcccagcccctgcaggaggccatcgacaacgtcctggcgtggatccaccccgacctcccgctgttccgggtgtccgagaggcgggcgtcccggcggcggcggaagccccccaagggcgctcagccagcgctggctgtggtgctgttcctgcaggaggagtacggcgaagagcagatcctgcagctgcaccgcacactgcagcagccgccctggcgccaccaccacaccgagcaggtgcacggccggttcctgccctacctgccctgcagccaggacttcttcacgctggcccctgggacgccgctttgggccatccggcccgtgcactacggcaaggaaatcgtgcgcttcaccgtctactgtcgctacgacaactatgctgacagcctcaggttctaccagctgattctccggaggagccccagccagaagaaagcggacttctgcatcttccctattttttccaacctggatgtggacatccagttctccctgaaaagactgccctgtgaccagtgcccggtgcccaccgactcctccgtgctggagttccgagtgagggacataggcgagctcgtgcctctcctgcccaacccttgcagccccatcagcgaggggcgctggcagacggaggaccatgatgggaacaagatcctcctacaggtactggggggacgcctgtctgtctgtttaggggacctgagaaaccagttagctttgcctcaaacactatagtaccagtcacagagcaatgatcaaggaaggagagatcagtgaccctctgcccagctcctagtcgaagtcaaagtggccatacaggatcccaacaaaagagggggcaagaaagactcttcccattggttctcttcatttcactttcagcaaacatgttcccaattcttccagctgccccttctgtcctcccctattgggcatccactaaacacccatgactcctggggatttcaaatgagcttataagctagggaatttgctattaaagattcctgaatctatgcccatgtacttagagagtttttaccactggattcttccctcccacaaaggaacttcaggaaagcccatctatctggaaattttaaaatatatattgatgttcatagaggagatagctgttctcttccttcaggtgcctcccccaccttctactcttgcatccttctactgctgggcagcaggttgttgaaatcctgtgatcacttggaaaaggatgtcccgttaaacattttaaggagtaagtgatgccttgggagcttctggtttcactaagcttggaaggggtgaaggaattcattttaagtaggctgccctagtccttccatggtaaactctttagcttcatcatcagctccctttctcctctcatccttccaggggttgtcccagactcattagagataattagttatactcaattcaaaattcagcatgtatattacagaacatcctacatctggtcctacctgagaaatgctttccagacccaggctttcttgattttacaagtaaattagttccaggagtatagggccttgtttttctgaaaagcctctacctctgacgtctcaattttcacacttggctacccgaaaagagaaagttgatagtgaattgggggacattgccttaagaggcaaagattgtggttacttgaatcacaggtaaagtttcatcgtttttgttggttttggctttaagcaccagaactataatccacatatcatgaaatgaagtcagaatttggcacatgtcagataactggttcagactacagccaggcctcatttctcgtcagaaaggtcaccttgagatacttactatttataggaactagataattttgaaacttccttttgaactgtgcagataaggaactaagtaatgttttattattcaatatgctagcatttgctctataatcccttttgaaatgtgagaaaaattgtctctgtgtttgaagaatgccacatctttatgcaaaatataatacagttgcaccaagtaaaagttaatgaaatgcaaa

SEQ ID NO: 131917 - DNA, 2376 bp, Homo sapiens
  Payload ID: 5752
  Gene Symbol: FAM124A
  Gene Name: family with sequence similarity 124A
  ENST ID: ENST00000614765
  CDS Start-End: 169-1029
gggagagggcgcggcgcggggttcgcggctggcgcttgagttgtttgccggctcccgggccgccagacgctcggagggagcccggccggctcggactgggcggccgggagggagggcgccccgggtcacgacggcgcccgcaagccgagcgcggccgggacgtgcaccatggacccaaaggcgggcggcggcggcgaggaggacgactgcgtggactcgggcgccgagaccggagggtccgactacagccacctgtcctccacgagcagtgagctttccgttgaagaggcgcaggaccctttcctggtcagcatccacataatcgcagacccaggggagtcccagcccctgcaggaggccatcgacaacgtcctggcgtggatccaccccgacctcccgctgttccgggtgtccgagaggcgggcgtcccggcggcggcggaagccccccaagggcgctcagccagcgctggctgtggtgctgttcctgcaggaggagtacggcgaagagcagatcctgcagctgcaccgcacactgcagcagccgccctggcgccaccaccacaccgagcaggtgcacggccggttcctgccctacctgccctgcagccaggacttcttcacgctggcccctgggacgccgctttgggccatccggcccgtgcactacggcaaggaaatcgtgcgcttcaccgtctactgtcgctacgacaactatgctgacagcctcaggttctaccagctgattctccggaggagccccagccagaagaaagcggacttctgcatcttccctattttttccaacctggatgtggacatccagttctccctgaaaagactgccctgtgaccagtgcccggtgcccaccgactcctccgtgctggagttccgagtgagggacataggcgagctcgtgcctctcctgcccaacccttgcagccccatcagcgaggggcgctggcagacggaggaccatgatgggaacaagatcctcctacaggtactggggggacgcctgtctgtttaggggacctgagaaaccagttagctttgcctcaaacactatagtaccagtcacagagcaatgatcaaggaaggagagatcagtgaccctctgcccagctcctagtcgaagtcaaagtggccatacaggatcccaacaaaagagggggcaagaaagactcttcccattggttctcttcatttcactttcagcaaacatgttcccaattcttccagctgccccttctgtcctcccctattgggcatccactaaacacccatgactcctggggatttcaaatgagcttataagctagggaatttgctattaaagattcctgaatctatgcccatgtacttagagagtttttaccactggattcttccctcccacaaaggaacttcaggaaagcccatctatctggaaattttaaaatatatattgatgttcatagaggagatagctgttctcttccttcaggtgcctcccccaccttctactcttgcatccttctactgctgggcagcaggttgttgaaatcctgtgatcacttggaaaaggatgtcccgttaaacattttaaggagtaagtgatgccttgggagcttctggtttcactaagcttggaaggggtgaaggaattcattttaagtaggctgccctagtccttccatggtaaactctttagcttcatcatcagctccctttctcctctcatccttccaggggttgtcccagactcattagagataattagttatactcaattcaaaattcagcatgtatattacagaacatcctacatctggtcctacctgagaaatgctttccagacccaggctttcttgattttacaagtaaattagttccaggagtatagggccttgtttttctgaaaagcctctacctctgacgtctcaattttcacacttggctacccgaaaagagaaagttgatagtgaattgggggacattgccttaagaggcaaagattgtggttacttgaatcacaggtaaagtttcatcgtttttgttggttttggctttaagcaccagaactataatccacatatcatgaaatgaagtcagaatttggcacatgtcagataactggttcagactacagccaggcctcatttctcgtcagaaaggtcaccttgagatacttactatttataggaactagataattttgaaacttccttttgaactgtgcagataaggaactaagtaatgttttattattcaatatgctagcatttgctctataatcccttttgaaatgtgagaaaaattgtctctgtgtttgaagaatgccacatctttatgcaaaatataatacagttgcaccaagtaaaagttaatgaaatgc

SEQ ID NO: 131918 - DNA, 2030 bp, Homo sapiens
  Payload ID: 5753
  Gene Symbol: FAM124B
  Gene Name: family with sequence similarity 124B
  Uniprot ID: Q9H5Z6
  ENST ID: ENST00000243806
  CDS Start-End: 318-1136
cgcagaaaccctggggaacgcctgaaaaggctaaacacaagcagttacattatgcacaagctggatgacgtgaccccgctgctgctgtgtggagagggaggctgctgaacccgagctggtgtgagcttctcttgccgtaagtccacgggtggccaggagcacgtgttagtctggttaagagctctgctcagaagtagccgctgcagctgaaggttttcaggcgggctgaaggctgggccgcttcttcattcatttcagaaacttgaacagtgggccttctacacacgctgtctttgtcagcctcaggcagttcctccatggatgagacacaggggcctctggccatgactgtccatcttcttgccaactctgggcacggctcccttctgcagaggactctggaccagctcctggattgcatttgcccagaggtccggctctttcaggtgtctgaacgggccagtcctgtgaaatactgtgaaaagtcccattccaagcggtcccggtttccagggatgtccgtgttgctcttcctgcacgaaagcccgggagaggataggctatttcgcgtcctggactctctccagcattcgccatggcagtgctaccccacccaggacactcggggaaggctgtgtccctacttttttgccaatcaggagttctacagcctggacagtcagctgcccatctggggggtgaggcaggtgcactgtggctccgagatcctgagggtgacgctgtactgcagttttgataactatgaagacgccatcagactctacgagatgatcctgcagagagaagcgaccttgcaaaagagcaatttttgtttcttcgtgctctatgcctccaagagctttgctctgcagctctccctgaagcagctgcccccgggaatgtcagtggaccccaaagagtcttcggtgctgcagtttaaggttcaagagatcggccagttagtgcctctgctacccaatccatgcatgcctatcagcagcaccaggtggcagactcaggactacgatggcaacaagattctgcttcagagatgggagtcttcctctgttgcccagactcgagtgcggtggtgccatcatagctccctgaggtcttcaccttctgggttcaagtgatcctcctgccttagcctcctgattagctgggactacaggcacgtgccgccatgtctggctattttattttatttctagagacggggtctcactatgttggccgagcttgtttagggatgttaagtttgcagtactattgacttaatttttattctttattattatactttaagttctggggtacatgtgcacaaagtgcaggtttgttacacaggtatacatgtgccatattggtttgttgcacccatcaactcgtattgacttaatttttaagcatcttgcatcactgtcaaattttaccacataccaagttagatagaatgctttcttaaaaaaacttgaaattaaagccttcctttgtaaccatcctcgaaaacctaacatagcatgtgtgtatttagtcatgatagctgccgtgcattgcctttccatggtatgtgagcctgggcacttagtagctgtatgactgtgggcctcagtttcttcattagcacaataaaggcacccgagaattagcatcttcctctctcatacttacttacaggaaatgacctgacacttataaagtacataattaagatagtgccaagaactcaattttagctattattgttcatattatgccctatactaaggattctcttaaattgataattttatttaatacttataacaacctatgaagttactatttttcccattttggagataagaaaactgagctttccagggggtcagttatttgcccaagataggaagtatctatctaccctcaaagttcatgtggtcagccgctgcagtccagtgtatgtgtgtaaatgtgcaagcagggggatgaatgtcatgttcacagcaaaatatcctgtggcttctgtccttaagaaatggtcagaa

SEQ ID NO: 131919 - DNA, 2594 bp, Homo sapiens
  Payload ID: 5753
  Gene Symbol: FAM124B
  Gene Name: family with sequence similarity 124B
  Uniprot ID: Q9H5Z6
  ENST ID: ENST00000389874
  CDS Start-End: 227-1045
gagagggaggctgctgaacccgagctggtgtgagcttctcttgccgtaagtccacgggtggccaggagcacgtgttagtctggttaagagctctgctcagaagtagccgctgcagctgaaggttttcaggcgggctgaaggctgggccgcttcttcattcatttcagaaacttgaacagtgggccttctacacacgctgtctttgtcagcctcaggcagttcctccatggatgagacacaggggcctctggccatgactgtccatcttcttgccaactctgggcacggctcccttctgcagaggactctggaccagctcctggattgcatttgcccagaggtccggctctttcaggtgtctgaacgggccagtcctgtgaaatactgtgaaaagtcccattccaagcggtcccggtttccagggatgtccgtgttgctcttcctgcacgaaagcccgggagaggataggctatttcgcgtcctggactctctccagcattcgccatggcagtgctaccccacccaggacactcggggaaggctgtgtccctacttttttgccaatcaggagttctacagcctggacagtcagctgcccatctggggggtgaggcaggtgcactgtggctccgagatcctgagggtgacgctgtactgcagttttgataactatgaagacgccatcagactctacgagatgatcctgcagagagaagcgaccttgcaaaagagcaatttttgtttcttcgtgctctatgcctccaagagctttgctctgcagctctccctgaagcagctgcccccgggaatgtcagtggaccccaaagagtcttcggtgctgcagtttaaggttcaagagatcggccagttagtgcctctgctacccaatccatgcatgcctatcagcagcaccaggtggcagactcaggactacgatggcaacaagattctgcttcagagatgggagtcttcctctgttgcccagactcgagtgcggtggtgccatcatagctccctgaggtcttcaccttctgggttcaagtgatcctcctgccttagcctcctgattagctgggactacaggttcagctgaatccagaacttggtgttaagaatggcatcttgggagctggcatgcttcccctgggctccaggctgacttctgtctctgcaaagaggacctcagaacccaggagccagaggaaccagggcaagaggtcccaggggcattctctggagcttcctgagcccagtgggagccccacatcagacaggtgtgctggcacttcgtggaaaagccctggccggtcattccaggtcagcagcccagctatgggtgcccacctgcacctgtcttctcatcaccttgaatccggggccagaatgaaggtcctcaaccgggaaaacagctttcagaagcttgaggccgagacgaatgttgacaccggcttgaccatcataaattctgaacccaggcagacttattttggcggatttccaagggatttacagaccagccagccaccattctgcttgccagcctcttccttgggggtggctacctccaaaaacaacagtgtccttaaggaaagagtctctcctttgccacttgctggccaaagggaccttggtaccaggaagacaatttcagaatgtctccttcatctgcaagttcagggtgaagaaaaagaagaagatgaagaagaattctttatatagcataaaataaatgtggttttctaaaacacaagatcagataaaatgttctagaaatggagtactgacccagaatcagcctgttagttgttcatctgaggggggctgaatgctccccatgcacaatctgtattgattttatttcaaatgttcaaagtctaaaggtgctgggaatgattgtttatttgccgtcacagtcataagagaacacagccaacacacagggaaaaaaaccgaatgcttttgttccgtggagatgcactaacccagctggatgtgttgaatccagcacctatcaggataattgcattgtatgcaaatgaatcggtatgttatacaacactaattagtgtctgtaatttggttttaatttttacttaggttgcatagctcatccccctggacaatatggactgctatttactcttgaatgctttttaattttcatgtgacctcttttggtaactaggccttgttcacataccctccttgtgattttgtctttaaagttgtttgtatctggaatgagtgaaaatgcaaagtgttttgaaaattataaacagttaattttgttttcctgtttaatgagccaaaatactggaagccagaaaatcaggttgaacatgaatgctaggctctagggctttcctgctcatctgcttctcatttgtttctgcactatgtcaaagaggacagtggttcttgttacaaaccaaagaggaacattgagcacagtgggaaaattggactggttgatctggtcactggagcaggacttgggttcttctggccagattttgactcccagattcctttacaaaacgcactcattcattcatttatatatgttcattcaataaacattttttgaataccta

SEQ ID NO: 131920 - DNA, 2509 bp, Homo sapiens
  Payload ID: 5753
  Gene Symbol: FAM124B
  Gene Name: family with sequence similarity 124B
  Uniprot ID: Q9H5Z6
  ENST ID: ENST00000409685
  CDS Start-End: 267-1634
atgcacaagctggatgacgtgaccccgctgctgctgtgtggagagggaggctgctgaacccgagctggtgtgagcttctcttgccgtaagtccacgggtggccaggagcacgtgttagtctggttaagagctctgctcagaagtagccgctgcagctgaaggttttcaggcgggctgaaggctgggccgcttcttcattcatttcagaaacttgaacagtgggccttctacacacgctgtctttgtcagcctcaggcagttcctccatggatgagacacaggggcctctggccatgactgtccatcttcttgccaactctgggcacggctcccttctgcagaggactctggaccagctcctggattgcatttgcccagaggtccggctctttcaggtgtctgaacgggccagtcctgtgaaatactgtgaaaagtcccattccaagcggtcccggtttccagggatgtccgtgttgctcttcctgcacgaaagcccgggagaggataggctatttcgcgtcctggactctctccagcattcgccatggcagtgctaccccacccaggacactcggggaaggctgtgtccctacttttttgccaatcaggagttctacagcctggacagtcagctgcccatctggggggtgaggcaggtgcactgtggctccgagatcctgagggtgacgctgtactgcagttttgataactatgaagacgccatcagactctacgagatgatcctgcagagagaagcgaccttgcaaaagagcaatttttgtttcttcgtgctctatgcctccaagagctttgctctgcagctctccctgaagcagctgcccccgggaatgtcagtggaccccaaagagtcttcggtgctgcagtttaaggttcaagagatcggccagttagtgcctctgctacccaatccatgcatgcctatcagcagcaccaggtggcagactcaggactacgatggcaacaagattctgcttcaggttcagctgaatccagaacttggtgttaagaatggcatcttgggagctggcatgcttcccctgggctccaggctgacttctgtctctgcaaagaggacctcagaacccaggagccagaggaaccagggcaagaggtcccaggggcattctctggagcttcctgagcccagtgggagccccacatcagacaggtgtgctggcacttcgtggaaaagccctggccggtcattccaggtcagcagcccagctatgggtgcccacctgcacctgtcttctcatcaccttgaatccggggccagaatgaaggtcctcaaccgggaaaacagctttcagaagcttgaggccgagacgaatgttgacaccggcttgaccatcataaattctgaacccaggcagacttattttggcggatttccaagggatttacagaccagccagccaccattctgcttgccagcctcttccttgggggtggctacctccaaaaacaacagtgtccttaaggaaagagtctctcctttgccacttgctggccaaagggaccttggtaccaggaagacaatttcagaatgtctccttcatctgcaagttcagggtgaagaaaaagaagaagatgaagaagaattctttatatagcataaaataaatgtggttttctaaaacacaagatcagataaaatgttctagaaatggagtactgacccagaatcagcctgttagttgttcatctgaggggggctgaatgctccccatgcacaatctgtattgattttatttcaaatgttcaaagtctaaaggtgctgggaatgattgtttatttgccgtcacagtcataagagaacacagccaacacacagggaaaaaaaccgaatgcttttgttccgtggagatgcactaacccagctggatgtgttgaatccagcacctatcaggataattgcattgtatgcaaatgaatcggtatgttatacaacactaattagtgtctgtaatttggttttaatttttacttaggttgcatagctcatccccctggacaatatggactgctatttactcttgaatgctttttaattttcatgtgacctcttttggtaactaggccttgttcacataccctccttgtgattttgtctttaaagttgtttgtatctggaatgagtgaaaatgcaaagtgttttgaaaattataaacagttaattttgttttcctgtttaatgagccaaaatactggaagccagaaaatcaggttgaacatgaatgctaggctctagggctttcctgctcatctgcttctcatttgtttctgcactatgtcaaagaggacagtggttcttgttacaaaccaaagaggaacattgagcacagtgggaaaattggactggttgatctggtcactggagcaggacttgggttcttctggccagattttgactcccagattcctttacaaaacgcactcattcattcatttatatatgttcattcaataaacattttttgaataccta

SEQ ID NO: 131921 - DNA, 3130 bp, Homo sapiens
  Payload ID: 5754
  Gene Symbol: FAM126A
  Gene Name: family with sequence similarity 126, member A
  ENST ID: ENST00000409923
  CDS Start-End: 189-1448
agtgagaggagggggaagatggctcaccgggacccgttctgctaggaagaaggggagcaggtggtgctgctactcgggaggaagcagagcagcctccgtcgctgtcgctgagagcctcacgagtcgaggtcctgcaggtggagctccggcagccgccctggttgaaggtttagaacagatgtggaaaaatgtttacttcagagaaaggggttgtggaggaatggttgtcagagtttaagacattaccagaaacatctttaccaaattatgccacaaatttgaaagacaagagttctttagtttcatctctctataaagttatccaggagccacaaagtgagttgctagaacctgtctgtcaccagctctttgaattctatcgcagtggagaggagcagttgcttcaatttacgctgcaatttctcccagaactaatttggtgctaccttgcagtctcagccagcagaaatgtgcatagcagtggatgcattgaagctcttcttctaggggtttacaatttggaaatagttgacaaacagggacataccaaagtattgagttttacgattccatctttatccaaaccatctgtataccatgaaccttccagcattgggtccatggctctgactgagagtgcactatcccagcatggtttgtcaaaagtggtatacagtggacctcatcctcaaagggagatgctgacagcacagaatcggtttgaagtgttgacattccttttgttgtgttacaatgctgccttaacttacatgcccagtgtttctcttcagtcactgtgtcaaatttgttcaagaatctgtgtttgtggatatcctcgacaacatgtaagaaaatataaaggtataagtagcaggataccagtttcttcaggattcatggtgcaaatgttaacagggatttattttgccttttataatggagaatgggatctagctcaaaaagcactggatgatattatatacagagcccagctagaattatatccagagccattgctggttgctaatgcaataaaggcttcattgcctcatggtcccatgaaatctaataaggaaggtacaaggtgtattcaagttgaaatcacaccaacttcctctcgaatatcaagaaatgcagtaaccagcatgtcaataaggggtcataggtggaaaagacatgagcaacctgacaacaataatgatgctactgaattgggcatccttgtcattcctgagattagtgtcacaaatgtggccggagagagaaccgggaatggggaaaaaggcagaacactaggagagattgatgctcagcatatacagggtgtgcaggaaacagccacagatcctagaactgagagcaaaggcttgccagagatcaggaggcaaaaatctgtaagaaaaatgatggaggatggaataaactcacctggcagagtgcagttttagcagagcactttataactgcactccaaggaaatacagaattaacaggtcaagaagaactgatggagatatctgaagttgacgagggattttattccagggctgcgtctagtaccagccagtcgggtttatcaaacagtagtcacaattgtagtaacaagccaagtataggaaagaaccacagacggtcaggaggaagcaaaactggaggaaaagaaaaagaaactacaggggaatcttgcaaagatcactttgctcgaaaacaaactcagagagcccaaagtgagaatcttgagcttctctctttgaagagacttactttaacaaccagccaatccctacctaagcctagtagccatggtttggctaagaccgcagcgactgtatttagtaaatcctttgaacaagtcagtggtgtcacagtcccacataacccgtcatctgctgttggttgtggggctgggacagatgccaataggttttccgcttgtagtctccaagaagaaaagcttatttacgtttcagaaagaactgaacttccaatgaagcatcaatcaggtcagcagagacctcctagtattagcattactctgtccacagattaattagtaacatatttttctcccataacctagtgaacctggaaatacaactttgcttctttatgaaagtaccctgggtctttcatccgtattcctgacaggagccctgatgtcttaaattctgaaggctcccctgactttatgaagggaagattgtctaggttgcagtaagttgaaatatggttttgttatttcttgattaagattttttccccttggtttgagtcttttttttccctcctcttatttgttattgttgccctaagattgtcagtgacaataaattttgacaggttgtctaatcaagttggttatgtctcatgtgaggttgtaaggtggtttttcttgttttggtttggtttggttttttaatagctcctattttgatggctgtgtgtttggccttcagagtcaaagggagtctgcatgtatgggaactgttttatagagaatggggcagaggcacaactccaggaattctctagctcctggtcaggaagccaatctgaaaacaggcatgtggaaacacaaaaatgatgtgtatgaaaagcacctgatgaaaatatttgtaagcagatcatctttatgattagaacaatttgctcaaagccctggaaaatgcctggtaacccagtgcctagaatattatatgattccaggggatggctagaggcatttctgttgttatctctgaaacatttttatatcaaaaatcagattgctggtaggtgtgttgttttgaagtgttttatctggatttagcatgtgaagatccctttcaattattaaggtataataggctgtaaagctgatttaccctactgctggactttggaaatcctagttagtttggactcctataattcagagcatacgtcattggaagacttcctggaaatcagtgtaaatcttgcaacatagctctcaagataccactgtataatatgtaattgtttgtctgcaaatgcatttttcatctataaaatgtcatgaaagaaaataaaggtagtgaaatatggacaaaggacatttatatattaactaaagttgtttatgtttgtgttcttaaatttaaaacacgaa

SEQ ID NO: 131922 - DNA, 616 bp, Homo sapiens
  Payload ID: 5754
  Gene Symbol: FAM126A
  Gene Name: family with sequence similarity 126, member A
  ENST ID: ENST00000409763
  CDS Start-End: 179-523
gggggaagatggctcaccgggacccgttctgctaggaagaaggggagcaggtggtgctgctactcgggaggaagcagagcagcctccgtcgctgtcgctgagagcctcacgagtcgaggtcctgcaggtggagctccggcagccgccctggttgaaggtttagaacagatgtggaaaaatgtttacttcagagaaaggggttgtggaggaatggttgtcagagtttaagacattaccagaaacatctttaccaaattatgccacaaatttgaaagacaagagttctttagtttcatctctctataaagttatccaggagccacaaagtgagttgctagaacctgtctgtcaccagctctttgaattctatcgcagtggagaggagcagttgcttcaatttacgctgcaatttctcccagaactaatttggtgctaccttgcagtctcagccagcagaaatgtgcatagcagtggatgcattgaagctcttcttctaggggtttacaatttggtttgtatttaatggagttaacaaaatcttttttgacaaaatcaaatatataacctgtgcaactgcttttcattttaataaagctagtgtttgttttttcataca

SEQ ID NO: 131923 - DNA, 6337 bp, Homo sapiens
  Payload ID: 5754
  Gene Symbol: FAM126A
  Gene Name: family with sequence similarity 126, member A
  ENST ID: ENST00000440481
  CDS Start-End: 1-1415
agagaggctggcggcagtggtggctctcccggctgggttgtcagtcagtgagaggagggggaagatggctcaccgggacccgttctgctaggaagaaggggagcaggtggtgctgctactcgggaggaagcagagcagcctccgtcgctgtcgctgagagcctcacgagtcgaggtcctgcaggtggagctccggcagccgccctgacattaccagaaacatctttaccaaattatgccacaaatttgaaagacaagagttctttagtttcatctctctataaagttatccaggagccacaaagtgagttgctagaacctgtctgtcaccagctctttgaattctatcgcagtggagaggagcagttgcttcaatttacgctgcaatttctcccagaactaatttggtgctaccttgcagtctcagccagcagaaatgtgcatagcagtggatgcattgaagctcttcttctaggggtttacaatttggaaatagttgacaaacagggacataccaaagtattgagttttacgattccatctttatccaaaccatctgtataccatgaaccttccagcattgggtccatggctctgactgagagtgcactatcccagcatggtttgtcaaaagtggtatacagtggacctcatcctcaaagggagatgctgacagcacagaatcggtttgaagtgttgacattccttttgttgtgttacaatgctgccttaacttacatgcccagtgtttctcttcagtcactgtgtcaaatttgttcaagaatctgtgtttgtggatatcctcgacaacatgtaagaaaatataaaggtataagtagcaggataccagtttcttcaggattcatggtgcaaatgttaacagggatttattttgccttttataatggagaatgggatctagctcaaaaagcactggatgatattatatacagagcccagctagaattatatccagagccattgctggttgctaatgcaataaaggcttcattgcctcatggtcccatgaaatctaataaggaaggtacaaggtgtattcaagttgaaatcacaccaacttcctctcgaatatcaagaaatgcagtaaccagcatgtcaataaggggtcataggtggaaaagacatgagcaacctgacaacaataatgatgctactgaattgggcatccttgtcattcctgagattagtgtcacaaatgtggccggagagagaaccgggaatggggaaaaaggcagaacactaggagagattgatgctcagcatatacagggtgtgcaggaaacagccacagatcctagaactgagagcaaaggcttgccagagatcaggaggcaaaaatctgtaagaaaaatgatggaggatggaataaactcacctggcagagtgcagttttagcagagcactttataactgcactccaaggaaatacagaattaacaggtcaagaagaactgatggagatatctgaagttgacgagggattttattccagggctgcgtctagtaccagccagtcgggtttatcaaacagtagtcacaattgtagtaacaagccaagtataggaaagaaccacagacggtcaggaggaagcaaaactggaggaaaagaaaaagaaactacaggggaatcttgcaaagatcactttgctcgaaaacaaactcagagagcccaaagtgagaatcttgagcttctctctttgaagagacttactttaacaaccagccaatccctacctaagcctagtagccatggtttggctaagaccgcagcgactgtatttagtaaatcctttgaacaagtcagtggtgtcacagtcccacataacccgtcatctgctgttggttgtggggctgggacagatgccaataggttttccgcttgtagtctccaagaagaaaagcttatttacgtttcagaaagaactgaacttccaatgaagcatcaatcaggtcagcagagacctcctagtattagcattactctgtccacagattaattagtaacatatttttctcccataacctagtgaacctggaaatacaactttgcttctttatgaaagtaccctgggtctttcatccgtattcctgacaggagccctgatgtcttaaattctgaaggctcccctgactttatgaagggaagattgtctaggttgcagtaagttgaaatatggttttgttatttcttgattaagattttttccccttggtttgagtcttttttttccctcctcttatttgttattgttgccctaagattgtcagtgacaataaattttgacaggttgtctaatcaagttggttatgtctcatgtgaggttgtaaggtggtttttcttgttttggtttggtttggttttttaatagctcctattttgatggctgtgtgtttggccttcagagtcaaagggagtctgcatgtatgggaactgttttatagagaatggggcagaggcacaactccaggaattctctagctcctggtcaggaagccaatctgaaaacaggcatgtggaaacacaaaaatgatgtgtatgaaaagcacctgatgaaaatatttgtaagcagatcatctttatgattagaacaatttgctcaaagccctggaaaatgcctggtaacccagtgcctagaatattatatgattccaggggatggctagaggcatttctgttgttatctctgaaacatttttatatcaaaaatcagattgctggtaggtgtgttgttttgaagtgttttatctggatttagcatgtgaagatccctttcaattattaaggtataataggctgtaaagctgatttaccctactgctggactttggaaatcctagttagtttggactcctataattcagagcatacgtcattggaagacttcctggaaatcagtgtaaatcttgcaacatagctctcaagataccactgtataatatgtaattgtttgtctgcaaatgcatttttcatctataaaatgtcatgaaagaaaataaaggtagtgaaatatggacaaaggacatttatatattaactaaagttgtttatgtttgtgttcttaaatttaaaacacgaagaaaaagaaatgtctttcttgttagtgaacaggcctgttttaaatatcttagtatgatatcaaaagaataatcaatttagttacctcccaactaaaaagtaaaaatgaaaaagacgacatggcagaagttgaaacaaacttgtatgtatctgtatgtgacctctagatggaaataaaagtttgatgtttgctagccgtggtccttttggctatggttgcggttcccctgtaaagcaaatgtacttaagtcatcattcagagtgagagagagaaagcacggctgaggctgagtcagttgaccgttgaggaagacctaaggagctgtccagttcttggctctttttcactgtgactgcacagcggtttccttcttcatagtcccttgctgtagtcaccaagagagcatgctagtgttttcctcttgttcctgcttatgcagagctcagatatatgaaaaatttgtatgctttgaaggctgccaaagcatttatactctggacatagttttaactgcaactgctttggctaccagtttaaaccgagttcttcaaaaagcatgaactcgttttcattcattagccctgtttacaatgtggattttgacataaatgaatttgattttcttttagctccagtaacagaatggaataagatctattgccataaattgtagttaagaactgtaaggcaatcgggcagtgaaacttgatattgtattaacttaataggaaccctgtgtacaatttaaaatatttgtaaaatatcactgtgaatttacagatgtctttttgtcattctttaacaatgaatttcccctgtgcatagttattaatagtattggtattattaaaaactaatttggcattttaagattggcattttaagcaagttgaggtgcttaggaaacattgtagaataagtttggggaaatgttagctgacagagctgagagatcagattttcatgttctatcactgtaatggaacctcatttagacctctctagacctttgctagctgtgtggtctgaggaccagtaagtaggattggcattatctggtatcttgttaaaaatgcagaatttcatgccactctaggtctactaaatcagaatttgcattcttaacaaggttcccaagtgatttttatgagaagaaagtatcagagtgcaaacaaattactcgtctaatatgtagaattcccagtggtctcacagccctagatcaaatgtgtcagacactagatcattataatcttcattggttttgacagctaattaattagtttaataatattgacatatggcttcttaagtatttgaattctagattgctaatgatccttatttttgcagtaaaaaagtaacactttatatttttcttgttaactataaatggaatcagagctgtaaatgcctgaaattttaagtgtgaaaaggggtgccacccttttatatactgcacaacaaatttgcatttgtatattctttttaaaaaatctctgaagacttgctcagtgaaatggttctgattttttgcttcaaatgatttgcactaattgattttctggagagcggagttacgttaacaacaaaattcttttatagttcctttgatactatttcaaataaggattacacattgaaagtttttatagaaattatgaaaattggataatcttaactatggtaaccattactattatccatactactttctccccactgaactttcaaatttgaaaattggggtagcttttgtaggtcactttcttataaagatgctgatggtcacagatctcctaagtatccagaataatatttttatcatgagaaggattccacacaaaattggggtcttgcaccccatatttcagaggatctgaacagaaattgtggcttcattgcacattttaaatctctatagattcttgaaatcacccaacctctcacatttgaaaacccaacggcctggagtattctggtggcactggagccagcactagctttttggaatccaagtggggagagaaacaaaaatagacttttcaagggactgtcccagactacccagggcaaatgtcttcccttcccttcctgaagccacaggaaagcaccctggagtcctttgtataccactatggaaatttttaaggcaagctctcaagacttgaagagttggaattctcggcatttaaatgatgcctgaagtttgttttgaaaaagcaatatttcattgctcttttcaattgtgaagcaactgctcagcaaatattactcatttttttaaaaagttgaattaaagggaaatatatttttaaaaccaaaatagatcaaaatgatcccagttttaagggattttgcctattttggaagaataaaactaaaatgttaaaactgttgaattacagagaacagatgtactctgagacataattttaaacaaatatttaaaataaggcaggttaacatttgcgtttaggcacaataaatctgtattaaagggaagcacatcaaggaaatatatacatgttgaataatgtaactgaaaaatattttttaaaaaccacttaaaaagaaaaataatttgatgggtactttaagcattgtagatagaaattaatgtataatagtgtcctcccagtctttgtatgaaaaattaaaactctctagtcctttaatgagcatgaatttatacttctacatttgttgcttagtaaaattatactcagtactttgagttattcagatttatgtttaatattgttaaattcttcatcagagagcataaatatattgtcttctatactttgtaacttgtgcatatctaaagaaactaacaacgaacattttgggagatgtttttgtgtttttttatagtagagttttagagtacatttgtcttaataggaagtttttaccataaacccaagattttatttcacgtattgttgctttctcttatatggaacttattgtgtacctcttacctttatttctaatcatttagtgatactaatcttttcatagtaaatatatttgtttctaattgtattcctagagtttacattcctaaagaataaacgacgactttggctatttttgtgtgttccctaccttcttaaggctatggaaataaactggagtttagttttttgaatttttgtatatttgtgtaaatgttctccatatgtagtactttatacaacaagtgttgcctcttgttttattgaaataaaaact

SEQ ID NO: 131924 - DNA, 13177 bp, Homo sapiens
  Payload ID: 5754
  Gene Symbol: FAM126A
  Gene Name: family with sequence similarity 126, member A
  Uniprot ID: Q9BYI3
  ENST ID: ENST00000432176
  CDS Start-End: 234-1799
gagaggctggcggcagtggtggctctcccggctgggttgtcagtcagtgagaggagggggaagatggctcaccgggacccgttctgctaggaagaaggggagcaggtggtgctgctactcgggaggaagcagagcagcctccgtcgctgtcgctgagagcctcacgagtcgaggtcctgcaggtggagctccggcagccgccctggttgaaggtttagaacagatgtggaaaaatgtttacttcagagaaaggggttgtggaggaatggttgtcagagtttaagacattaccagaaacatctttaccaaattatgccacaaatttgaaagacaagagttctttagtttcatctctctataaagttatccaggagccacaaagtgagttgctagaacctgtctgtcaccagctctttgaattctatcgcagtggagaggagcagttgcttcaatttacgctgcaatttctcccagaactaatttggtgctaccttgcagtctcagccagcagaaatgtgcatagcagtggatgcattgaagctcttcttctaggggtttacaatttggaaatagttgacaaacagggacataccaaagtattgagttttacgattccatctttatccaaaccatctgtataccatgaaccttccagcattgggtccatggctctgactgagagtgcactatcccagcatggtttgtcaaaagtggtatacagtggacctcatcctcaaagggagatgctgacagcacagaatcggtttgaagtgttgacattccttttgttgtgttacaatgctgccttaacttacatgcccagtgtttctcttcagtcactgtgtcaaatttgttcaagaatctgtgtttgtggatatcctcgacaacatgtaagaaaatataaaggtataagtagcaggataccagtttcttcaggattcatggtgcaaatgttaacagggatttattttgccttttataatggagaatgggatctagctcaaaaagcactggatgatattatatacagagcccagctagaattatatccagagccattgctggttgctaatgcaataaaggcttcattgcctcatggtcccatgaaatctaataaggaaggtacaaggtgtattcaagttgaaatcacaccaacttcctctcgaatatcaagaaatgcagtaaccagcatgtcaataaggggtcataggtggaaaagacatggaaatacagaattaacaggtcaagaagaactgatggagatatctgaagttgacgagggattttattccagggctgcgtctagtaccagccagtcgggtttatcaaacagtagtcacaattgtagtaacaagccaagtataggaaagaaccacagacggtcaggaggaagcaaaactggaggaaaagaaaaagaaactacaggggaatcttgcaaagatcactttgctcgaaaacaaactcagagagcccaaagtgagaatcttgagcttctctctttgaagagacttactttaacaaccagccaatccctacctaagcctagtagccatggtttggctaagaccgcagcgactgtatttagtaaatcctttgaacaagtcagtggtgtcacagtcccacataacccgtcatctgctgttggttgtggggctgggacagatgccaataggttttccgcttgtagtctccaagaagaaaagcttatttacgtttcagaaagaactgaacttccaatgaagcatcaatcaggtcagcagagacctcctagtattagcattactctgtccacagattaattagtaacatatttttctcccataacctagtgaacctggaaatacaactttgcttctttatgaaagtaccctgggtctttcatccgtattcctgacaggagccctgatgtcttaaattctgaaggctcccctgactttatgaagggaagattgtctaggttgcagtaagttgaaatatggttttgttatttcttgattaagattttttccccttggtttgagtcttttttttccctcctcttatttgttattgttgccctaagattgtcagtgacaataaattttgacaggttgtctaatcaagttggttatgtctcatgtgaggttgtaaggtggtttttcttgttttggtttggtttggttttttaatagctcctattttgatggctgtgtgtttggccttcagagtcaaagggagtctgcatgtatgggaactgttttatagagaatggggcagaggcacaactccaggaattctctagctcctggtcaggaagccaatctgaaaacaggcatgtggaaacacaaaaatgatgtgtatgaaaagcacctgatgaaaatatttgtaagcagatcatctttatgattagaacaatttgctcaaagccctggaaaatgcctggtaacccagtgcctagaatattatatgattccaggggatggctagaggcatttctgttgttatctctgaaacatttttatatcaaaaatcagattgctggtaggtgtgttgttttgaagtgttttatctggatttagcatgtgaagatccctttcaattattaaggtataataggctgtaaagctgatttaccctactgctggactttggaaatcctagttagtttggactcctataattcagagcatacgtcattggaagacttcctggaaatcagtgtaaatcttgcaacatagctctcaagataccactgtataatatgtaattgtttgtctgcaaatgcatttttcatctataaaatgtcatgaaagaaaataaaggtagtgaaatatggacaaaggacatttatatattaactaaagttgtttatgtttgtgttcttaaatttaaaacacgaagaaaaagaaatgtctttcttgttagtgaacaggcctgttttaaatatcttagtatgatatcaaaagaataatcaatttagttacctcccaactaaaaagtaaaaatgaaaaagacgacatggcagaagttgaaacaaacttgtatgtatctgtatgtgacctctagatggaaataaaagtttgatgtttgctagccgtggtccttttggctatggttgcggttcccctgtaaagcaaatgtacttaagtcatcattcagagtgagagagagaaagcacggctgaggctgagtcagttgaccgttgaggaagacctaaggagctgtccagttcttggctctttttcactgtgactgcacagcggtttccttcttcatagtcccttgctgtagtcaccaagagagcatgctagtgttttcctcttgttcctgcttatgcagagctcagatatatgaaaaatttgtatgctttgaaggctgccaaagcatttatactctggacatagttttaactgcaactgctttggctaccagtttaaaccgagttcttcaaaaagcatgaactcgttttcattcattagccctgtttacaatgtggattttgacataaatgaatttgattttcttttagctccagtaacagaatggaataagatctattgccataaattgtagttaagaactgtaaggcaatcgggcagtgaaacttgatattgtattaacttaataggaaccctgtgtacaatttaaaatatttgtaaaatatcactgtgaatttacagatgtctttttgtcattctttaacaatgaatttcccctgtgcatagttattaatagtattggtattattaaaaactaatttggcattttaagattggcattttaagcaagttgaggtgcttaggaaacattgtagaataagtttggggaaatgttagctgacagagctgagagatcagattttcatgttctatcactgtaatggaacctcatttagacctctctagacctttgctagctgtgtggtctgaggaccagtaagtaggattggcattatctggtatcttgttaaaaatgcagaatttcatgccactctaggtctactaaatcagaatttgcattcttaacaaggttcccaagtgatttttatgagaagaaagtatcagagtgcaaacaaattactcgtctaatatgtagaattcccagtggtctcacagccctagatcaaatgtgtcagacactagatcattataatcttcattggttttgacagctaattaattagtttaataatattgacatatggcttcttaagtatttgaattctagattgctaatgatccttatttttgcagtaaaaaagtaacactttatatttttcttgttaactataaatggaatcagagctgtaaatgcctgaaattttaagtgtgaaaaggggtgccacccttttatatactgcacaacaaatttgcatttgtatattctttttaaaaaatctctgaagacttgctcagtgaaatggttctgattttttgcttcaaatgatttgcactaattgattttctggagagcggagttacgttaacaacaaaattcttttatagttcctttgatactatttcaaataaggattacacattgaaagtttttatagaaattatgaaaattggataatcttaactatggtaaccattactattatccatactactttctccccactgaactttcaaatttgaaaattggggtagcttttgtaggtcactttcttataaagatgctgatggtcacagatctcctaagtatccagaataatatttttatcatgagaaggattccacacaaaattggggtcttgcaccccatatttcagaggatctgaacagaaattgtggcttcattgcacattttaaatctctatagattcttgaaatcacccaacctctcacatttgaaaacccaacggcctggagtattctggtggcactggagccagcactagctttttggaatccaagtggggagagaaacaaaaatagacttttcaagggactgtcccagactacccagggcaaatgtcttcccttcccttcctgaagccacaggaaagcaccctggagtcctttgtataccactatggaaatttttaaggcaagctctcaagacttgaagagttggaattctcggcatttaaatgatgcctgaagtttgttttgaaaaagcaatatttcattgctcttttcaattgtgaagcaactgctcagcaaatattactcatttttttaaaaagttgaattaaagggaaatatatttttaaaaccaaaatagatcaaaatgatcccagttttaagggattttgcctattttggaagaataaaactaaaatgttaaaactgttgaattacagagaacagatgtactctgagacataattttaaacaaatatttaaaataaggcaggttaacatttgcgtttaggcacaataaatctgtattaaagggaagcacatcaaggaaatatatacatgttgaataatgtaactgaaaaatattttttaaaaaccacttaaaaagaaaaataatttgatgggtactttaagcattgtagatagaaattaatgtataatagtgtcctcccagtctttgtatgaaaaattaaaactctctagtcctttaatgagcatgaatttatacttctacatttgttgcttagtaaaattatactcagtactttgagttattcagatttatgtttaatattgttaaattcttcatcagagagcataaatatattgtcttctatactttgtaacttgtgcatatctaaagaaactaacaacgaacattttgggagatgtttttgtgtttttttatagtagagttttagagtacatttgtcttaataggaagtttttaccataaacccaagattttatttcacgtattgttgctttctcttatatggaacttattgtgtacctcttacctttatttctaatcatttagtgatactaatcttttcatagtaaatatatttgtttctaattgtattcctagagtttacattcctaaagaataaacgacgactttggctatttttgtgtgttccctaccttcttaaggctatggaaataaactggagtttagttttttgaatttttgtatatttgtgtaaatgttctccatatgtagtactttatacaacaagtgttgcctcttgttttattgaaataaaaactgaaaaaaatattttttccagatcagtttactcatttaaaaaattattataaaaatttgcagaagttttgatatgaaggaagagaataaaggaggaagacttaggtaagttgagccattgagagcttttgggggtaagtgataagacaatgacctcattcctggctttgtgctttacatgtcatagggctgaggagtatgacaggtccactcgtattcatccaaagatgaagatgagctctatgggccatgcaccagtggcggattatttgtcatatcagaagcacaggcaaatttaggtaacatcactttgtccttctaactttagaatctttattgccatgtgtggtgagtagtagtcccaactactcaggaggttcactcgagcccaggaatttgagaccagcctgggcaatataacgagatcttatctcttaaaaaaaaaaaaaaagcaaaagaagaagaaagagtctatatctcttgagtacagagattatatgcccctagtacctagataggactttgtgcgtggtaggtatctagacatttatgagacaataaatgagttaggttgatgttagctttggaaaagaatcaaggataagtcttcagtgttttctttaacagtacaattttagaattttgtttgttggctttaggaaatctcagtggcattacatgaattgcattatagcatgtacttagaaaaaagaacttatggctgggtgcggtggctcacacctgtaatcccagccttttgggaggccgaggtgggtggatcacctgaagtcaggagttcaagaccagcctgaccaacatggcgaaaccccatctctactaaaaatacaaaaattagccaggcatagtggcgggcacctgtagtcccagctactcaggaggctgaggcaggagaatcacttgaatctgggaggcggaggctgcagtgagccgagatcatgccactgtactccagcctgggcaacagagtgagactctatctcaaaaaaaaaaaaaaaaaaaaaaaaaaaaaaaaacagaacctattaacctattagacacttgaaaaaattcctggcttgtagttgattatatgtttggttaattccatttcatctaaggaactaagtaatttaggaaatgtgttcttaactactcttagaagggtacttgtagagaaccagagtggtgattttgtaagcagtattttgtcctatacaatatgcactcttccagtaactccagtagtccacatagctgactcacctcctacaacccgactttgttaatatcaagataactgttttataattgtagagaaagattttttacaaccagttgtagttattattttctttgcattatgttattgtgatagtagtggtagctaatatgtgtaattaaaatgatcatcttatcctcaaaatcatcctataaagtgcatagaatccccattttacagaagaggaaactgaagctctcaatagggtagaggacttggctaaggtcacctagctgctgagtggcaaaactcagccttgaacacaggtcttaggactctcactttatatagcttggtaaaagaagatactaattaaatcctacctaatagagatgtatttaaaattcactcaccccatctgtcttacaggtaatagttttaaggtaagataaaatcaaagtgttctaaaagtaaatcataatacattttacagaattagagataattgtgttttagtggtcaaacaatgctcgttattctgttagtaaaagcatggtaaaatgcaaattaaaataagatttctctttttttttcctgtcagattgataaagatgaaaaagattggttctagtattgacattggtatggggaaatcattagtcactgagatgattagcaggactgtagattggtacaaatgaattggtgggcagttcaacaggatctatcagactttaaagtgtatctcataccctctgaaacagccatcctactcttctatatttattccattctctgtattctactgaaaatttagcacaaatatataaacataagcatgcaaggtattcattgcagtattgcttgtaatagcaaaaacaagccagcaaatctaaatgtctgttaatagaggaatagataaattatggtacgtacatatagtggaatataatgtagccattaaaaagaatgcagatctgtatgtgatgatttacattgattattcagtgtatgatcccacttgcattataaatgtgtgcagtagttaaatatgagtgtgtgtatatgtataatacacacttacgtttgctagtatgggggaggagagcattgtttctcaaagtgtggtctaaagacagcctgcattaggaaattttttttttaaatggggattcctgggcattgtgctaatttccctgaatcagaatcactgtgagtgaagcatggaaacctgtatttctaacgggttcctcagttgatggcttatacaaatgtaaaatatggtctagtagctgtcagcaatgaattggatatctggtagtggattgtagttagaaagggcaaacttcttgaagagatcttgtattttaaatgaggcctacctaaaataaagccagttgagtaacgttatcagcatagacctgttaatgaaggtgaattggcctgacatagaaaaatgattctaccatacagcactacacaccaactaaatgagcaagccttttaaaaaatccttgttgaacttcccaaatatcagatgacctgttaataaagcacaagtaaataataggacttactgtggtaagagaaagtgccaccttgatttggttgtgtgtcagaaccagaaagtaagattatttgtagggctttgggatctatgctcaaatggtttaaggtatgtctgtcaaggcagggaactgattgggattagcaaagttgatagttcagaattagtggacacagcaagcagggttcttgaagattcctgaaaagtcaactgttgtttgagaaacaagctgtttgcccaggtgagcagggcttcacctgtaggaattgtcttcaaccttaggaatttcctctacaaacaacaacaacaaaaaaatagggattgttcttgtttttatttgctttgttttgtttgtaatcttatctttcctgggcaaagatttcctggaataaacaactaagttatgttgacatacatgggctacagtcttatccaagctgtattgacactgatggattcagtttgtttttcttagctctctctattcaaagattataagtcaatattatgtatatagcaattgacaggtcataagtacggcatgctaactgatcgtaccactggagctccaacaattgatgtatctttggtgacttcttagtgttctgctgaagatcgcaaagatttctgtagcttcttgacctctataacacttggttcacacttgttaagtgttctaatataatccacatcacattgtgctgtgacttatctttctcatatttgtctccctcactagaccacagccctgtgggaatataatataactaatacataatggtgaataaagatttgttttactagatagaatataaatcgaatccaggaaatcagtggcagcataggagagactgtgttgcttctcttctattcaatagaagtctttgaaactccttttattctctaatattcttcatggagatgaaaatgaaggttgtaaagctttactctgattattttaagcatgcctgcataaaaatgttttgagaagtaaattatgcatcatgtttctctttagttagactatgaatggtgtgaagaattttctgggctaatgtttgacatttattattcactcctgtagatttgtggtgaatatgaatggtatctggactaatcagaaaacaacgtaggaaaggcctaacttcaacactgaattcttgctccttgtctcacttgcttccttttgtagaaactacaagtatatttaacttttgtatcctagatccactacggcctactgaaagcctatcatgcatttatctttaaacttttactctcttcatttagccaacatatttctacttctatgttgcctgctgtgctgtgtaattttctacaaacattttcacctccaaatcccttgaaatgaaaccctctggaagagcatcaccactttttcttcctctattctaattcccctctagtttcccctctagtttaagacttttgtttcaatatttattctttccttaagcctttaaattcatttatatccaccaagttgaatttgatgagacaggacatgtttgaaagaaggacaaaccaaacaagcaagcaaacccatgaatactcgtacaataggacataatatacatttcccagttccctgaaggggtaaaattgagactggttatacaagcagtattgcacagcatgctgatactagctagacatagcctacagtgtttcagcttcactcaaagatggttctggaggacagtgaggaaatgaactttttccagcgagaataaatatgagcagtatttctagtctgctttgcaccgaaagtgagccatcccaagatacagatctacaccatttatacctggccaggtggttggaaacacagacgtaataagattggaggatgagtgacaaaaattgggagctaaacatattggacttcttaaaataggctcagattgcaagaataattgtttcctacagacatattaaacaaaggccctgtggtgaaggaggtgctaaataatcagatggtcaagatgactttgaggatatcagtaaatctctttggtattccagcctttgttcaaacagtttatgggcaaagcggctatactggaaggatagggctacacaggaacttcaacaatacaggcctcctttcatcaaggctgtccttattactgccaggagccgaactggccagcagcagtgaccatcctaagatacaacatctgagggtgaccagatagttagtggcagattgattatatcaaatattttctttcatggagagacaactatttgtcctcatggaatagagccttactctggatctggctttaagtttgccttccctaagcaccatgcttgtgtgtgcaataataagcttcctgttcaccattatgattttccccaaaatattgcttctaagaaacttattttacaatgtaatcagtgaggtagaggtagaattacactttcagtcatgggaaactaggtaattaacatcaaaattcccattggcaactagataatccagcaaaactcttcaaaacatgaaaatctaggccaggcgcagtggcttatgcctataatcccagcactttgggaagccgaggtgggtggatcacctaaagtcagaagttcaagaccagcctggccaacatggtgaaagcccgtctctactaaaaatacaaaaaaaattagccaggtctggtagcacatgcctgtaatcccagctactcaggaggctgtggcaggagaatcgcttgaacctgagaagcggaggttgaggtgagccgagatagcaccactgcactccagcctgggcaacagaggaagactctgtctctaaataaataaacatgaaaatctagagaggcaagcattggcacaacttctttcctggaggtattggctgattctagaagcatttaaggggataagcagtgcttcttactgctccaggatattaggaggacaaaaactgaatgccagtgcctgccaagtcataaaagagggcttaggaaattcccatgctttgggctgggacccaaaaaagctccaccataggagtaagagtgaattggaagtgcatcaactctcccccatacacagggaattcagcacggattcaaaccatcccaattcctgaaatcagattaaaaatgatcccctaagtgcttggtaataaacaaatcctctgtggaggtggaaaaaaaaccccatcatcttaagcctcaagttctacaatttttcaaatacagtcttcacaagagaaaagaaaaataaccagacacttctatagcagagcaacactcattgagaacaacaagcagctttgggtaaaattgcttaaaacctctgtttgaagccattgaagaactttcagctaaacaggactctagaagacaaaacgccagagagaaggtgtgcagaaaagagttaacataagaggctgagatgctatccttagccctgattttaaagctgggctttggctagtgtctgggaacttggattaccggaatgttcccaccattccctaactgataagggggtttactctttgtaaactatataaacaacatggtttatgctgaattcccgctttgcttctaggagtctggaattatgatttgtgctgggcagagggtgcctctatcactaacttccaatacaaactttgggcagtaagactctaacgagcatccctggcagacaacatttcacacctgttgtcacaattcagtactgaagtaattaaccacagcctgtgtgattccacaggcaaaggattcttggaatcttgtgtcaggtttcctctggacttcaccccatgtccttttcccctttgctgatttgctttgtagtacttttctctaataaatcatagccatgagtatgactatatgctgagccttgtgagtgcttctgttgaatcactgaacctggggtgctggcgtggtcttggggactcccaatacaaaagtattttaaccagagaagtgagcagacattctgcagctacttcttccattatggaatttgccaaatctgggtaaaaggcccaagaagagagttactgttaagaatcagagaagcaaacaagttatggaaaccacacaggactggagaaacaaaaagaacagggcctttaaaccaatcgcacttgggagagcagagatcctagtaagacaggaagttcagagaagtgagcctggcactttccttgttttcctcttgagtatttgctgaattcttggattgctcagagagggaaaaaaaaaaaaaaaaaaaaaaaa

SEQ ID NO: 131925 - DNA, 4778 bp, Homo sapiens
  Payload ID: 5755
  Gene Symbol: FAM126B
  Gene Name: family with sequence similarity 126, member B
  ENST ID: ENST00000286181
  CDS Start-End: 185-487
ggcaggctgctgcgggaggcggcggcggtaggaagccggagacagcagggtgacagaattggaaaatatttaactcttaacaaatgaattccccacttgaactctgccgaattcctgtgccacctcctcctttagaaaactgatcttaatacagagataaaagaggagtagaaggtaaaagaaaatgctgggaactgaccgttgtgttgtggaagaatggttatcagaattcaaggcattacctgacactcagatcaccagttatgcagcaactttacaccggaaaaaaacacttgtaccagccctctataaagttattcaagattcaaataatgagatacagcctccaagagtgcctctgctgtgtactggagtgagtttgaagaagttcagctcctggagcctgtctgccatcagctgtttgagctctatcgtagctcagaggttcgacttaagaggttcacactgcagttcttgccagaattgatgtgggtttatttacggcttacagttagccgagacagacagagtaatggttgcattgaagcacttctgttaggaatttacaatttggaaatcgctgataaagatgggaacaataaagttctgtctttcactatcccctccttatccaagccttcaatataccatgaaccttcaacaattggatccatggctttgacagaaggggcattgtgtcagcatgatctcatcagagttgtttatagtgatcttcatcctcagagggaaacattcactgcacagaaccggtttgaagtcctgagttttctcatgctgtgttataattctgctattgtatatatgcctgcctcatcttaccaatctctttgtcggatgggttccagggtttgtgtgagtggctttccacggcaacatgaaaaacactggaaagaactctgtggtcgaatagtattggatcctgaatttatggtgcaacttctcacaggggtttattatgccatgtataatggacagtgggaccttggccaggaagttcttgatgatatcatttatagagcccagctagagcttttttctcaaccactattggttgccaatgccatgaaaaactcattaccatttgatgctcctgattctacacaagaaggccagaaagtccttaaagttgaagtcactccaacagtgccgaggatttctcggactgcaattacaacagcttcaatccgtcgtcatagatggagaagagaagatggctttgacttctcaaacgaggctgactcgagtattcctggctccccgatccaacacggctccactgacctagggatcaaacgtgtgcaagagggggaggtgctggtgcgcaggacccctgagcatggctcgccggagcccaactcagcaacagccacaacagagggtgctgagggtgtaaatggaggagaggagtctgtaaacctgaatgatgcagatgaaggattttcatcaggggcttccctcagcagtcagccaattgggaccaaaccatcctcctcttctcagaggggaagcttaaggaaagtagcaactgggcgttcagccaaggataaagaaacagcctctgccatcaaatccagtgagagccctcgagattcagtagttcgcaagcagtatgtacagcaaccaactgatcttagtgtagattcagttgagctgacaccaatgaagaaacacctgagcctgcctgctggccaggtggtgccaaaaatcaatagcttaagtctaatccggacagccagtgcttcctcaagtaaatcatttgactatgtaaatggcagtcaagcaagtaccagcattggggttggcactgagggaggtactaatttagcagccaacaatgctaatcgatactcaactgtcagtctgcaggaagaccggctaggtcaagctggcgaaggtaaagagctcctcagcccaggagcccccttgaccaagcagtctcgatccccaagtttcaatatgcagctaatatcccaggtgtagttttgacatcctccctcatctttctgcttaccttttaaactgaacatttcattgtgcaagaagacacttcatcccacattgtgaaaatattggtcactgttatcagatttcatttagtttaggtatcttcatactgtattttgtatcaaaacagcaataaggttttctttatccctctttcctacatcttctcttcacctatcccttgtaaatgtgtttgtgaagcagtataaaatggttgccttttccatgccttcctttctccttgggtgatgtgcaatccatcgtaggctgatcggtcccatttcaacactgtgagactgagggtacattagaggaaatggtgtatatgatccctatgaaacgattctttggcttttgtttaaaaacaaaacgggtttgttctcataatctatagaactatgaagattactggatcatatttttttctcttaaccaggagtgcctcagagattctgctatgactttggacttctctgagtctgtgcaatcattttctggagaagcatggggaaaggtggtagactgctgcactttttcattaaaatgagggtagctctttctccacccccccatctcctttatcccgaagacataaatgttcaattacggaggcatttaaatcaagttgtgaccacctccattggagggcaggactcttgattgtgtaattgataatgcactttctcaatggctgtatagtcattattaacgtgtcttccctcttccccacaaggacatataaggtcatttctgtccttcaagtttggccaactaacaaatcagaatctgaggggcatgttctatttcccaggaatgattgacactttggtgctggggttttgtgggggcggggggtagtttttgtttagcttttgtggagattgtgtgtgtgagaggagatttgatttttttttcttcttttcctttgtgagctgatggctgaagtgtaacagtacatcttcaggtaaagagagggatttctcaatctactttctgttatgtcagactataagagaaaccctttcagctgctttctagatgtacctaaattcagtcagacattttggattaagaaacctaaagtcctgatacattacatactccaaggaaatatatcagggacagacaattggctgaaacactgatacttcaatgtgacacatttttatagaacatttctaccagggggtactgaccttgatttctcctacaaggaccacactgcctttgtgtttaatgtaatgcaatttgtgtaccttctaatcatatatctgcagttcctcatttttataaaactttgatatcatgccagtaagctagatgttgaatgtatgtaagtagcatttggtaactgctaagaggttacaaaaacattattggtaaaaaaaatttccttagttctgatctggttggataagattttatcataacttttctgggtctcaggctctgatgtttgaaaaagaagggaatatattgggttttaaaaaagtgtattgtgacttaaactgttataagttatccttccacagaatacatcagagctatcagtgctttgtacatttagatgtttttacttgattattgtttaagaaaaatatactgaatttatagaaagcaagtattctcctaattagcaaaagttaaaattttatctctaccattaaaattacaatagattttgataaataaccagaaaaaacgcctttttttttttcacacctagcaatcctcccgtttttattgtaaggactttcttttttccctaagagactttctgttagactctttatatatgagatgcttgtttaaatatggtggtctgtaacatttttccagctcatgtgaaaatggaaaactagaacctgaactagtatctacaacattgccaaagtccagggtaaagctaaaagttgataagtagacaatttattgttttgtgtgtgtctgtgtgtgtgtgtgtgtgtgtgtgtgtgtgtgtatggtgtgtatatgtatatatcacaaagttgtattttaaatattttaaataccctttcttttaatttaagggatgtcaaataaatgaaaggagtttaaaaatagccaaaataaatgagctataaaggcccataacatactaaaacaggcagtttcaggtatgtaaggaaaggaacattatacttacctagaaagtgagatctaaaaaaaaattaaaaataaataaaaaataaaaaagaaagtgagatcttggctatggctggaggtcagtcactttatggcataaattatttgggaggtaaaaagactgttttcaattcaaattgtgcatttattggcatctaaatctagcatgattttggttagagcacaaaagaaataccacataataccaaatcacagcaaatgttagaattaatacaacaaaattttcctttggctagaaatcttatgttatacctgaaaaattggttttaaaaaatgttcatcttggccgggcacggtggctcacgcctgtaatcccaacactctgggaggctgaggtgggtgaatcatgaggtcaggagttcgagaccagcctggccaacatggtgaaaccctgtctctactaaaaatacaaaaaattagctgggcgtggtggcaggcgcctgtaatcccagctactcgggaggctgaggcaggagaatctcttgaacctgggaggtggaggttgcagtgagccaagaatgcactactgtactccagcctaggcaacagtgcaagactccatctct

SEQ ID NO: 131926 - DNA, 9333 bp, Homo sapiens
  Payload ID: 5755
  Gene Symbol: FAM126B
  Gene Name: family with sequence similarity 126, member B
  Uniprot ID: Q8IXS8
  ENST ID: ENST00000418596
  CDS Start-End: 189-1781
agttggcaggctgctgcgggaggcggcggcggtaggaagccggagacagcagggtgacagaattggaaaatatttaactcttaacaaatgaattccccacttgaactctgccgaattcctgtgccacctcctcctttagaaaactgatcttaatacagagataaaagaggagtagaaggtaaaagaaaatgctgggaactgaccgttgtgttgtggaagaatggttatcagaattcaaggcattacctgacactcagatcaccagttatgcagcaactttacaccggaaaaaaacacttgtaccagccctctataaagttattcaagattcaaataatgagctcctggagcctgtctgccatcagctgtttgagctctatcgtagctcagaggttcgacttaagaggttcacactgcagttcttgccagaattgatgtgggtttatttacggcttacagttagccgagacagacagagtaatggttgcattgaagcacttctgttaggaatttacaatttggaaatcgctgataaagatgggaacaataaagttctgtctttcactatcccctccttatccaagccttcaatataccatgaaccttcaacaattggatccatggctttgacagaaggggcattgtgtcagcatgatctcatcagagttgtttatagtgatcttcatcctcagagggaaacattcactgcacagaaccggtttgaagtcctgagttttctcatgctgtgttataattctgctattgtatatatgcctgcctcatcttaccaatctctttgtcggatgggttccagggtttgtgtgagtggctttccacggcaacatgaaaaacactggaaagaactctgtggtcgaatagtattggatcctgaatttatggtgcaacttctcacaggggtttattatgccatgtataatggacagtgggaccttggccaggaagttcttgatgatatcatttatagagcccagctagagcttttttctcaaccactattggttgccaatgccatgaaaaactcattaccatttgatgctcctgattctacacaagaaggccagaaagtccttaaagttgaagtcactccaacagtgccgaggatttctcggactgcaattacaacagcttcaatccgtcgtcatagatggagaagagaaggtgctgagggtgtaaatggaggagaggagtctgtaaacctgaatgatgcagatgaaggattttcatcaggggcttccctcagcagtcagccaattgggaccaaaccatcctcctcttctcagaggggaagcttaaggaaagtagcaactgggcgttcagccaaggataaagaaacagcctctgccatcaaatccagtgagagccctcgagattcagtagttcgcaagcagtatgtacagcaaccaactgatcttagtgtagattcagttgagctgacaccaatgaagaaacacctgagcctgcctgctggccaggtggtgccaaaaatcaatagcttaagtctaatccggacagccagtgcttcctcaagtaaatcatttgactatgtaaatggcagtcaagcaagtaccagcattggggttggcactgagggaggtactaatttagcagccaacaatgctaatcgatactcaactgtcagtctgcaggaagaccggctaggtcaagctggcgaaggtaaagagctcctcagcccaggagcccccttgaccaagcagtctcgatccccaagtttcaatatgcagctaatatcccaggtgtagttttgacatcctccctcatctttctgcttaccttttaaactgaacatttcattgtgcaagaagacacttcatcccacattgtgaaaatattggtcactgttatcagatttcatttagtttaggtatcttcatactgtattttgtatcaaaacagcaataaggttttctttatccctctttcctacatcttctcttcacctatcccttgtaaatgtgtttgtgaagcagtataaaatggttgccttttccatgccttcctttctccttgggtgatgtgcaatccatcgtaggctgatcggtcccatttcaacactgtgagactgagggtacattagaggaaatggtgtatatgatccctatgaaacgattctttggcttttgtttaaaaacaaaacgggtttgttctcataatctatagaactatgaagattactggatcatatttttttctcttaaccaggagtgcctcagagattctgctatgactttggacttctctgagtctgtgcaatcattttctggagaagcatggggaaaggtggtagactgctgcactttttcattaaaatgagggtagctctttctccacccccccatctcctttatcccgaagacataaatgttcaattacggaggcatttaaatcaagttgtgaccacctccattggagggcaggactcttgattgtgtaattgataatgcactttctcaatggctgtatagtcattattaacgtgtcttccctcttccccacaaggacatataaggtcatttctgtccttcaagtttggccaactaacaaatcagaatctgaggggcatgttctatttcccaggaatgattgacactttggtgctggggttttgtgggggcggggggtagtttttgtttagcttttgtggagattgtgtgtgtgagaggagatttgatttttttttcttcttttcctttgtgagctgatggctgaagtgtaacagtacatcttcaggtaaagagagggatttctcaatctactttctgttatgtcagactataagagaaaccctttcagctgctttctagatgtacctaaattcagtcagacattttggattaagaaacctaaagtcctgatacattacatactccaaggaaatatatcagggacagacaattggctgaaacactgatacttcaatgtgacacatttttatagaacatttctaccagggggtactgaccttgatttctcctacaaggaccacactgcctttgtgtttaatgtaatgcaatttgtgtaccttctaatcatatatctgcagttcctcatttttataaaactttgatatcatgccagtaagctagatgttgaatgtatgtaagtagcatttggtaactgctaagaggttacaaaaacattattggtaaaaaaaatttccttagttctgatctggttggataagattttatcataacttttctgggtctcaggctctgatgtttgaaaaagaagggaatatattgggttttaaaaaagtgtattgtgacttaaactgttataagttatccttccacagaatacatcagagctatcagtgctttgtacatttagatgtttttacttgattattgtttaagaaaaatatactgaatttatagaaagcaagtattctcctaattagcaaaagttaaaattttatctctaccattaaaattacaatagattttgataaataaccagaaaaaacgcctttttttttttcacacctagcaatcctcccgtttttattgtaaggactttcttttttccctaagagactttctgttagactctttatatatgagatgcttgtttaaatatggtggtctgtaacatttttccagctcatgtgaaaatggaaaactagaacctgaactagtatctacaacattgccaaagtccagggtaaagctaaaagttgataagtagacaatttattgttttgtgtgtgtctgtgtgtgtgtgtgtgtgtgtgtgtgtgtgtgtatggtgtgtatatgtatatatcacaaagttgtattttaaatattttaaataccctttcttttaatttaagggatgtcaaataaatgaaaggagtttaaaaatagccaaaataaatgagctataaaggcccataacatactaaaacaggcagtttcaggtatgtaaggaaaggaacattatacttacctagaaagtgagatctaaaaaaaaattaaaaataaataaaaaataaaaaagaaagtgagatcttggctatggctggaggtcagtcactttatggcataaattatttgggaggtaaaaagactgttttcaattcaaattgtgcatttattggcatctaaatctagcatgattttggttagagcacaaaagaaataccacataataccaaatcacagcaaatgttagaattaatacaacaaaattttcctttggctagaaatcttatgttatacctgaaaaattggttttaaaaaatgttcatcttggccgggcacggtggctcacgcctgtaatcccaacactctgggaggctgaggtgggtgaatcatgaggtcaggagttcgagaccagcctggccaacatggtgaaaccctgtctctactaaaaatacaaaaaattagctgggcgtggtggcaggcgcctgtaatcccagctactcgggaggctgaggcaggagaatctcttgaacctgggaggtggaggttgcagtgagccaagaatgcactactgtactccagcctaggcaacagtgcaagactccatctctgaaaaaaaaaaaaaaaaaaaaaaaaaaagttcatcttagaggattttatttatctgtatgtatatacatatatgtttgtatgtatacatacccacattaacattttatgaccctgtaacatttgttttctattcttttaggtgatgtgaattgacctcagtgaagaaacatttcatttagtctaagccttgcattcagggtcttacaacagatttcttgtgcaagaattattattagttaaaatggaaggtgttagtttaacaaactgagagtcaaattttctaagtttttaaatatgcattttaacatgcattatttttggcatttaatttaaaatagttttgtttcatgtatacaacagctgttacagatatatgccagcaatattcatacttttttaacaagcttttgttatatattttctaatctccataaaagtctaatcatctatgaaaaagatatttagggagaaaatacttgttttctgtaataaaacaattaggttggtgccatgtatgccaagttggataaaagaatacaaagaaacagctgaaggttttgggagctcgctctgacattaattactagaaagcaaactaaaatgcaaagtgaatagttaactcagaagatttgaattttttgaaatagggtctcactctgtcctctaggctagagtgcagtggcactatcacggctcactgcagcctcaacctccctgggctcaggtgatcttcccacctcagcctctggagtagctggaactccaggcatgcaccaccacacctggctaatttttgtatttttagtagagacgaggttttgccatgttgcccaggctggtctcgaactcctgggcttaagagatccacccacctggcctcccagaagtgctaggattacagacataactaccacacctggcctgaagatttttaaatgtgaaaatattttaagaagctaaggggaaaatcgttattttaaaatcctgatccccttaactttaccccttaccattccccttacctttccaattcacttttgtctatttattatagaatcagaattgtgctaagaagaaaccctggagataatctagctagtctcccactccctcaccccaaccttcatcctcaagaaacagaggctcagaggttgtggtgtgatcaagatcatatacctaaagcagagccagaatcaaacccagtctcccatgggtttggggaggcagtgggttgttaactccatttttgcagtttctttatagttctggtctagtagttggtgaatacaacacattaagaaaagtgttaaatccagaaaaaatgtagagtaatctagatggggaaatgttggaaatgttaagtatatctacagatgtaaggatcaatacattattctaatttatgccttactattttctgccacataacagttgtatgctgccattttatagttgaatacatttgttgggatttatttaaatataaaataaaccctgtgaaatggctttgatcagtgttttctagttattttaaagtaatttttgagtcagccagctttcagtcaccagtgtggcaagctaattatattgcacaatagagtattgcaaagtaaagattaaataaatttgattccattactttttaatgtagaaagagactgaatcttatgcttagagcaaatgcaagcaatatttccttatatgattgaaaaaggttctatagtgtgaagcttatgattccataatggaacagtgaccatgatgtcatttaaagtgtgtatataccatataaaatgtcttaaatgcggtagtctcagctatataagctcagtatttccagtctgtattctcagattccatctagtagctttaaattaattaaaattgtttattagacactggaatactgagaataacttctttcagattgttttgtttgcaccacttttgtgaatattttaatgaagtggagtccatttttgagtacttcagttgttgacaatcagttgtctcgtttaaatctctgcatgttcatttgtaaataaaaaatgtagtacctgtctttaggggtagtcccctatttattacaaacactggcaaggaatatctgtccatttctgaccttggattacaaagtatgttttgggtttttccttttttaatcagtatttcagttacatctttgttttcagctttaaaaagtttaacgggtcatgccaatgatcagaaaatctgtaagaattttagagcaatttttctatgtacagctatgttaaacagtctgaacatgagactttttctttcaagttgaagattattgtcatcgttttaccactaagttggttgagacacttacttgtaatactttaatttttttaaagtgtttttagaaacaagttgtttgaaaaccaattagaaattagaatatttgccagattataagcagatggaatgcagtgtaaaactgttaacaatgctaataaaattatgagtcatcagattggtacagttttccctgccaagatggtcatattgataatgtaagacaaattttagtattacttgcattatgtgtacctaataggtatatcatactggtactgagcatatatagaaaatactattcatagaggagtcatcaccacccaacctccttgcctgtgtaggcatatttcttctgaacctgaccacacaagtacaacattttggtaacttcagtcttttcagtatttttgtaatcttagccatagtcctatgagaaatgtacataagagcaaacaattcaggatagaaattagcagaaagctgggaatgatgtgaaataactggcagcatagtacagaaatgtaaggtatatgttttgcttctggatttttagaaattgtgctaatcatgtttacaaattaaggcatattcagatgtctgctattatgtttaatattgatttgataaaaaaatggaattaggtgtagcttagagtataaatgagtctttttaaaaatgtgtatctggaagtagggctaataaagaaatccttttattttcaaagaaatgaacttaattggacaactcatccccaattacagaattgatatcaatatggtttgctgtatttgagtataaacagctcagtgttaattatatcaaaggaagttctttacatcttcattgattacaaaatttaccaaagaaaatgtatctaccaaatataatttttaaagtacttgttaaggaatgaggcctctttaacatataaagtatcttaaaaatattctctgacctggaaaataggtttacagtagctacaagattccattttaggttttcttatgtcaataaatgtcaatattttacacttccagcaaaagtacccgttaaagctaaatctaaatattattcctcatagcacagtttctggtctccttaaattaaggatcctactcatcaggattgaataaaaagggggaaattcctaaaattggtatattgtataatattgtgggttaagtaaaatttaggggggcattatggaaatgtacctattttaaagggcagtggcaattactataatattggttaaactggtaaagtttgttaaataatttatgtccatgatcattctgagtgttttttttctttgcagaaaaacaggattgggttaagaaaagctaaaatactcatttttttaaaatgtatagcccaataagaactaaatgatttatttcaaaagttaaataattttttttggaaatcatggaatgtatttgcatattgatgttccaaacaggttttatgtattgttttttatagcagggagtagttgaaaagtaatgagtatattgattagctgtcttggaaagagaggattggctttctaacaatcactgatacaggtttgggtttgggggggtttgtttgtttgtttttaagttttatcatccatactgaattgagagatatgctccatgtttaaaaatatttgtaataagttcatctacttgacactgaatcttttttattcttactctaaaattattctggctttacattcagtttaagtggttaagtgaaacagtttttagggtgcaaaaattattttcccactgtttttctcatgataatttgagtctcctgagctataatttctgaaggatttttactactttggcattatgtaatctgatctctgtcacaatgatattaaataagaactatctcactttcatatgtttgcttcataaaaggatatggaatgtacacatcagctctttttttttttttaaactagcatcaacctataacttggtataaacttcccaagtatttagagaatagtgctggtgaaaatttaaataggataggcatatagaaattatgacttgtattgagtgatgtcctttcaacctaggactagtgacaaccttcattttttcagagctgaagaaaaaaccgtgaatttaagatcatatttattggtgcatgtaagccattatcctgtcttaatgaaccgattaatgctgttgattgttgaaatgtgaaatgtagtcactgttgaccttgtaaatatctgccagagatgaaaaaatattttaagttattgtaaataaagatgtataaaattcagtatcagtctgcaatgcagaaacatatcttagatgttaaaatactgtgtttgagagatgtgtaatttacccttagatgtatctagttacattaagagtgtaaatttttttgtacagtataaaaatacagctctatttggcttttaactgga

SEQ ID NO: 131927 - DNA, 692 bp, Homo sapiens
  Payload ID: 5755
  Gene Symbol: FAM126B
  Gene Name: family with sequence similarity 126, member B
  ENST ID: ENST00000452799
  CDS Start-End: 67-692
ggcggcggtaggaagccggagacagcagggtgacagagataaaagaggagtagaaggtaaaagaaaatgctgggaactgaccgttgtgttgtggaagaatggttatcagaattcaaggcattacctgacactcagatcaccagttatgcagcaactttacaccggaaaaaaacacttgtaccagccctctataaagttattcaagattcaaataatgagctcctggagcctgtctgccatcagctgtttgagctctatcgtagctcagaggttcgacttaagaggttcacactgcagttcttgccagaattgatgtgggtttatttacggcttacagttagccgagacagacagagtaatggttgcattgaagcacttctgttaggaatttacaatttggaaatcgctgataaagatgggaacaataaagttctgtctttcactatcccctccttatccaagccttcaatataccatgaaccttcaacaattggatccatggctttgacagaaggggcattgtgtcagcatgatctcatcagagttgtttatagtgatcttcatcctcagagggaaacattcactgcacagaaccggtttgaagtcctgagttttctcatgctgtgttataattctgctattgtatatatgcctgcctcatcttaccaatctctttgtcggatgggttccag

SEQ ID NO: 131928 - DNA, 536 bp, Homo sapiens
  Payload ID: 5755
  Gene Symbol: FAM126B
  Gene Name: family with sequence similarity 126, member B
  ENST ID: ENST00000453765
  CDS Start-End: 275-536
aaagtgctagatgaagaggggttttcttctccttcggccgcggaaactacagacgggagctggcgagggtggtctggaaaggcggtagccggtgtgttggtggtcccggaacctctcgtaaaccagatggagtttcgctctcccaggctggagtgcaatgctgcagtctctgcttactgcaacctccacctcccgggttcaagcgattcttctgcctcagcctcccaagtagctggggttaaagagataaaagaggagtagaaggtaaaagaaaatgctgggaactgaccgttgtgttgtggaagaatggttatcagaattcaaggcattacctgacactcagatcaccagttatgcagcaactttacaccggaaaaaaacacttgtaccagccctctataaagttattcaagattcaaataatgagctcctggagcctgtctgccatcagctgtttgagctctatcgtagctcagaggttcgacttaagaggttcacactgcagttcttgccagaattgatgtgggtttatttac

SEQ ID NO: 131929 - DNA, 522 bp, Homo sapiens
  Payload ID: 5755
  Gene Symbol: FAM126B
  Gene Name: family with sequence similarity 126, member B
  ENST ID: ENST00000446678
  CDS Start-End: 270-522
cgggaggcggcggcggtaggaagccggagacagcagggtgacaggctggagtgcagtggcgtgatctcggctcactgcagcctcgcctcctgggctcaagtgattctcctgcctctgcctcctgaatagctggcactacagaattggaaaatatttaactcttaacaaatgaattccccacttgaactctgccgaattcctgtgccacctcctcctttagaaaactgatcttaatacagagataaaagaggagtagaaggtaaaagaaaatgctgggaactgaccgttgtgttgtggaagaatggttatcagaattcaaggcattacctgacactcagatcaccagttatgcagcaactttacaccggaaaaaaacacttgtaccagccctctataaagttattcaagattcaaataatgagatacagcctccaagagtgcctctgctgtgtactggagtgagtttgaagaagttcagctcctggagcctgtctgccatcagctgtttgagctctatcgtag

SEQ ID NO: 131930 - DNA, 1181 bp, Homo sapiens
  Payload ID: 5756
  Gene Symbol: FAM127A
  Gene Name: family with sequence similarity 127, member A
  Uniprot ID: A6ZKI3
  ENST ID: ENST00000257013
  CDS Start-End: 19-360
gcgaagcgaggagcagcgatggacggtcgggtgcagctgataaaggccctcctggccttgccgatccggcctgcgacgcgtcgctggaggaacccgattccctttcccgagacgtttgacggcgataccgaccgactcccggagttcatcgtgcagacgggctcctacatgttcgtggacgagaacacgttctccagcgacgccctgaaggtgacgttcctcatcacccgcctcacagggcccgccctgcagtgggtgatcccctacatcaagaaggagagccccctcctcaatgattaccggggctttctggccgagatgaagcgagtctttggatgggaggaggacgaggacttctaggccgggagaccctcgggcctgggggcgggtgctctggggagggtccgctgtgttactggccgccgccagggtcgccaccggcgccctccctccgcgcctccctccccctcgagccgccgcgatgtcccctgcgctcctgttccctcccgcgtagtgcttgcctttgttccaggaatagcgctccaggctcctgctgccgcccctgggcctcactctggagcgagccgccgccctctccttccagccagccagcccctcccatgtacatttggacgctgtcctgcgctccagctgcaagctgggctcctgttacacactggacagaccacccactgccgccgctgccaagccctctcctccccaccagactgccagacgactacatcattctgcccacagacctgcgctgccacagccatcgccatccatcgcatcccaccgacagactgctgctcctagtgatctggactcacctcggaggtatctgggctggccacagtccctggacagtgatccagacagctggccgccccccaagggatctgtcaccttcagcgagacctatttcctccccacccccagaaacctcttgtgttcttgcctaggcccaggtgttcctggcagccaaatcgagtctctcattttctcttgtggaccagttagttttgcccataacgcagtattctgagtttgcaactgtctctctgatgtgtgccttttgttcaacacagtaacccctgcattctgctctgctctaatacactacctggagaaagtcttttccttattttcaataaatgtcagacattattgaaaagaaa

SEQ ID NO: 131931 - DNA, 1244 bp, Homo sapiens
  Payload ID: 5757
  Gene Symbol: FAM127B
  Gene Name: family with sequence similarity 127, member B
  Uniprot ID: Q9BWD3
  ENST ID: ENST00000370775
  CDS Start-End: 68-409
ttccggcgacgccttagcgctgacccccacgcaacccagcgaaactccgcggagcgcgcgcggcacgatggacggtcgggtgcagctgatgaaggccctcctggccgggcccctccggcccgcggcgcgtcgctggaggaacccgattccctttcccgagacgtttgacggagataccgaccgactcccggagttcatcgtgcagacgagctcctacatgttcgtggacgagaacacgttctccaacgacgccctgaaggtgacgttcctcatcacccgcctcacggggccagccctgcagtgggtgatcccctacatcaggaaggagagccccctgctcaatgattaccggggcttcctggccgagatgaagcgggtctttggatgggaggaggacgaggacttctaggccgggagacccttgggcctgggggcgggtgctctgggaagagttcgctgtgccagtggccaccgctagggtctccacaggcgccctccctccgcgcctccctccccctcgagccgccgcgatgtcccctgcgctcctgtcccctcccgcgtagtgcttgcctttgttccaggaatagcgctccaggctcctgctgcagctcctgggccgcactctagagcgcgctgcctccgccctcttttgccagcccagcccctccatgcacatttggacgctgtcctgcacttcaggtgcaagctgggctcctgttacatactggacagaccacccacagccgctgctgccaacccacctccactcctccagactgccagccaactacatcattctgcccacagacctacgctaccactgccatcgccatccaccgcatctcaccaacagactgtggctcctagtgatgtggactcacctcggaggtatccgagctggacacagcccctggacagtgatccagacagctggccgtcccccaaggagcctgtcaccttcagcgagacccatttcctccccatccccagagacctcttgtgttcctgccacatagctgccagggcttaagtgtgcctggcaaccaaatcgaatctctcattttctcctgtggaccagttagttttgcctagaatcctgttttcttctgaatttgcagctgtctctctgatgggtgccttttgttcaacacagtaagccctgctcccttccctgctctaatacactacctgtacaaaggttttttccttatttttaataaatgtcagacactattaaatagaaa

SEQ ID NO: 131932 - DNA, 2026 bp, Homo sapiens
  Payload ID: 5758
  Gene Symbol: FAM127C
  Gene Name: family with sequence similarity 127, member C
  Uniprot ID: Q17RB0
  ENST ID: ENST00000391440
  CDS Start-End: 71-412
tacgcctcggtgcagcccccggcgaagcccagcgcagctcagctaaactcagcggagccagcgcggcgcgatggaaggtcgagtgcagctgatgaaggccctcctggctcggcccctccggcccgcggcgcgtcgctggaggaacccgattccctttcccgagacgtttgatggcgataccgaccggctcccggagttcatcgtgcagacgagctcctacatgttcgtggacgagaacacgttctccaacgacgccctgaaggtgacgttcctcatcacccgcctcacggggcccgccctgcagtgggtgatcccctacatcaagaaggagagccccctcctcagtgattaccggggcttcctggctgagatgaagcgggtctttggatgggaggaggacgaggacttctaggccgggagaccctcgggcctggggaccggtgctctgggaagggtccgctgtgttactggccgccgccagggtcgccaccggcgccctccctccgcgcctccctccccctcgagccgccacgatgtcccctgcgctcctgtcccctcccgcgtagtgcttgcctttgttccaggaatagcgctccaggctcctgctgccgcccctgggcctcactctggagcgggctgcctccgccctctcgtgccagctcagcccctcccatgcacatttggacgctgtcctgcgctccagttgcacaaagctgagctcctgttacacactgacagaccactgacagccgccgctgccaacccccctcctcctcaccagacttccagacgactacatcatgctgcccacagacctgcgctgccactgccatcgccatccatcgcattccaccgacagactgctgcttctagtgatctgtactcacctcggaggtatctgggctggacacagcccctggacaatgatccagacagctggctgcccctcaagggacctgttaccttcagcgagacccatttcctccccaatcccagagactttttgtgctcctgccacatggctgccagggctcagttgtgcctggcagccaaatcgagtctctcattttctcttgtggaccagttagttttgcccagaatccatttctcttctgaatttgcagcattttctcaggtgctttttgatcaacaaaataacttgtatcttctgcttaactcctttatactacctggagaaaagtattttccatattttcaataaatgtcagacactattgagaaagaaatagagtctgaatgaatatggcacctttccctccctggtcctgtaaatgtggtccatatcttgttcagaagcgatatcccctgccattcagtgactgatgttgactcctgcattataaaacatctaagatagagtcctgtggtaacctgggggatagtgtccccactggtgatccttctgtcccagatgttgaatcctctaaaccagttaggattatcccaagcctcttagtaaatgaatcgttacctcattttggtcaacactatgtgagaagtcagccagcaggctcttggaaaatgtatcctcatttccagaaagtggtttgaaaacacaattcccaaattgttacaaaccataaatcccacacagattattggtgaacagctgtaaaattttactcaacccatgattcagggaaccaacagaattatataggtgcttttcaaaagcatttataaattcttgattatgtaggtagtggggggaaatgcagaaatgagatcattaatttagatacaaacctggttgatgaccagggggttttattttgcagaagaattgggtatttggtatcattttattcaattacatgtgatcctggtacatttcataagcttgggtaaaaaaattttttgttattttccatgcacaataagggaaatgttttaattggctttgtgcctcctgctttacaacagttctggcctcaagttaccaggtagcctgaactttgattttattttaccattaaattgctttaataccattgtatttggtgaa

SEQ ID NO: 131933 - DNA, 6928 bp, Homo sapiens
  Payload ID: 5759
  Gene Symbol: FAM129A
  Gene Name: family with sequence similarity 129, member A
  Uniprot ID: Q9BZQ8
  ENST ID: ENST00000367511
  CDS Start-End: 195-2981
cccacggatcatcagaaggcgcggacctggaggaggcgccccagaaggcgacgcctcttgcctcctgtctctcgcctctcgaaggaagtttgctcttaatttcagagccgggttcgccgtcggatcaacctccaggagctagcagcgggcgcggaccgggcagtttccgcgctcagcacaggcagctcgcggtcatgggcggctcagcctccagccagctggacgagggcaagtgcgcttacatccgagggaaaactgaggctgccatcaaaaacttcagtccctactacagtcgtcagtactctgtggctttctgcaatcacgtgcgcactgaagtagaacagcaaagagatttaacgtcacagtttttgaagaccaagccaccattggcgcctggaactattttgtatgaagcagagctatcacaattttctgaagacataaagaagtggaaggagagatacgttgtagttaaaaatgattatgctgtggagagctatgagaataaagaggcctatcagagaggagctgctcctaaatgtcgaattcttccagccggtggcaaggtgttaacctcagaagatgaatataatctgttgtctgacaggcatttcccagaccctcttgcctccagtgagaaggagaacactcagccctttgtggtcctgcccaaggaattcccagtgtacctgtggcagcccttcttcagacacggctacttctgcttccacgaggctgctgaccagaagaggtttagtgccctcctgagtgactgcgtcaggcatctcaatcatgattacatgaagcagatgacatttgaagcccaagcctttttagaagctgtgcaattcttccgacaggagaagggtcactatggttcctgggaaatgatcactggggatgaaatccagatcctgagtaacctggtgatggaggagctcctgcccactcttcagacagacctgctgcctaagatgaaggggaagaagaatgacagaaagaggacgtggcttggtctcctcgaggaggcctacaccctggttcagcatcaagtttcagaaggattaagtgccttgaaggaggaatgcagagctctgacaaagggcctggaaggaacgatccgttctgacatggatcagattgtgaactcaaagaactatttaattggaaagatcaaagcgatggtggcccagccggcggagaaaagctgcttggagagtgtgcagccattcctggcatccatcctggaggagctcatgggaccagtgagctcgggattcagtgaagtacgtgtactctttgagaaagaggtgaatgaagtcagccagaacttccagaccaccaaagacagtgtccagctaaaggagcatctagaccggcttatgaatcttccgctgcattccgtgaagatggaaccttgttatactaaagtcaacctgcttcacgagcgcctgcaggatctcaagagccgcttcagattcccccacattgatctggtggttcagaggacacagaactacatgcaggagctaatggagaatgcagtgttcacttttgagcagttgctttccccacatctccaaggagaggcctccaaaactgcagttgccattgagaaggttaaactccgagtcttaaagcaatatgattatgacagcagcaccatccgaaagaagatatttcaagaggcactagttcaaatcacacttcccactgtgcagaaggcactggcgtccacatgcaaaccagagcttcagaaatacgagcagttcatctttgcagatcataccaatatgattcacgttgaaaatgtctatgaggagattttacatcagatcctgcttgatgaaactctgaaagtgataaaggaagctgctatcttgaagaaacacaacttatttgaagataacatggccttgcccagtgaaagtgtgtccagcttaacagatctaaagccccccacagggtcaaaccaggccagccctgccaggagagcttctgccattctgccaggagttctgggtagtgagaccctcagtaacgaagtattccaggagtcagaggaagagaagcagcctgaggtccctagctcgttggccaaaggagaaagcctttctctccctgggccaagcccacccccagatgggactgagcaggtgattatttcaagagtggatgaccccgtggtgaatcctgtggcaacagaggacacagcaggactcccgggcacatgctcatcagagctggagtttggagggacccttgaggatgaagaacccgcccaggaagagccagaacccatcactgcctcgggttctttgaaggcgctcagaaagttgctgacagcgtccgtggaagtaccagtggactctgctccagtgatggaagaagatacgaatggggagagccacgttccccaagaaaatgaagaagaagaggaaaaagagcccagtcaggcagctgccatccaccccgacaactgtgaagaaagtgaagtcagcgagagggaggcccaacctccctgtcccgaggcccatggggaggagttggggggatttccagaggtaggcagcccagcctctccgccagccagtggagggctcaccgaggagcccctggggcccatggagggggagctcccaggagaggcctgcacactcactgcccatgaaggaagagggggcaagtgtaccgaggaaggggatgcctcacagcaagagggctgcaccttaggttctgaccccatctgcctcagtgagagccaggtttctgaggaacaagaagagatgggagggcaaagcagcgcggcccaggccacggccagtgtgaatgcagaggagatcaaggtagcccgtattcatgagtgtcagtgggtggtggaggatgctccaaacccggatgtcctgctgtcacacaaagatgacgtgaaggagggagaaggtggtcaggagagtttcccagagctgccctcagaggagtgaaagggacaatttggctgaagtctttctctgaaaaaagccaaagggttataggggtacacttaggggttgcatgcaagctgttaccaaaaaatttttaagtattttcttaatttgaataataaaaccagaggaaatgcatacagggcatgagcaactgaggcaaacctttgtggacatgaattgttctacgatgaatttttgctttagtattttaataagaattacaaagacaatggcatacttggggtgagagggagctgaggatgtctgaggagggaatagtattgcagggaagactgagaaaacagtaggatgacagttttgagtatactctgcacttttcaattgtgcaatcttcttgtgcactttaaggctttttaattttgtttgagaatgcaaatgtatactgtaagtctacctttactatctactatgcctacttcaccatctcttaaggactcggcatttgtccacagtcagactgcaagagagggtaggtcatgaacagtcacccgtgctggctgtagcccccacagaggcaatcatgcccaatagattcaagagaagctaagcggaaatggagggtggaaggtgtgatctgtgggactgtctgggcctgttactcatcctgctatcaatttcttattaattaatcttgatgattcttattaattaatcacatttgcaggaaattcagatgaggcaagaaaattttattggcctgggtaagactgaaagcattccaaattaggcttagactgtgcaaagggcttagctaagttatcgagcttaaaacccgtcaattaaacaaacattatttgaacagttactgcatgccacgcactgtgttgggcttagtaataaaaaaaagaaaagataagtgcttgttctagcataaattaaaaggtccaagggaatttaatctggaagagaacatatgccaatttttaaactatgacagcttttttttttctctttccattcaaatagtcctggttcattcccagaagggcacaaaatgaatgaataaataaataaatgaataaagacaaaagccaaggtgtatgctctcaagttccaaagatgttatcaaaagctgaaatcatttgtttggtcattcagcaagctaattgagtctctgttatataccaagcactggggataccatggcgaaaaacaactttgttccttcctcctagaacttacattttaatggaaatagacaaaacacatcttcttaacggatggtgacctataaccattaatgttgaaaatggaagagacttgcttccaaaagattaaaaggagttgttcttttctccttcagaaaaataccagatcatttcctaaaatctccagtcccaagtattacatcgtggtttccctccccgactttttattttattttattctatttttttgagatggagtctcactctgtcgccaaggctggagtgcagtggtgtgatctcggctcactgcaacctccgcctcctgggttcaggagattctcctctgtcagcgtcccaagtagctggaattacagccatgcggcaccattcccggctaatttttgtatttttggtagagatgggttttcaccatgttggccaggctggtctcaaactcctgatttcaagcgatccacccacctcgacttcccaaagtgctgggattacagcgtgagctacctggcccctccccaaattttaacatcagatctcaacatatttgttgagaacttgtttagatcatcactatcgagtaaatttatgtcagttctttagagcatttgcttcacacacagttcaaccatttaaccagaaattaaaatatcacccttttcagccctcccatgaagaatttctaggtcataaacatgaataatactcagtatatgtataatatcatatttaattgttgcaacttttcttggcgtgtttaaatcctcatgtctttgagggatcccaccacaggtgaaggaagtaaagaccacttctcccccagtctctgctttctgcagtgctcactcatatcctggcatttagcatggtgtgttgaaattaggtttacttcttgtctctccaagtggctcctctcttaaaagacagaaactagggtttagtcatcatttgtgcttcctgctagaaacccacagccttgaataatggcttcctgcctccttgagtcactttaatatccctggtgcataggacctggcatgcgtcaggctgctcgggaaatgtgggaactggacacccagaacactgctgtgctggggctatttggggcctgctgtcaggcagaaagacgttttgaattgggctttctgcccttgttgagttttctcttaagtaaagtccaaagtccaaggggcagatggccagatgcactgcccagtaaggcaggaagccaaagaggcagtgcccagccccacaaaggctgcccgactccctgggacagtagtgtggagtcccagcccaggctgacctcacaccggagcttcctagcttcctttctttgctcaatgcagggcttcttgcaccccctggaaagctaagagatttttttcaaccctaaaagagagtacctttcactgcattggatggatgaacatcagtgccctaactttatccatcatgtaggtcagggaggactgggcactatttggcaggatgtactccagaatataatcaaagaattttctgtacatatttcactaaagacaagtttttgggctggatgtggtagcttacacctataatcccagcactttgggaggctgaggtgagagggtcacttgagcccaggagttctagacaagcctgggaaacatagcaagatctcatccttacaaaaaataataatggtgtgtgcctgcagtcctagctacttgggtggttgaggcaggaggattgtttgagcgagggaagttgaggctgcagtgaactatgattttaccactgcactccagcttgggcaacaaaatgagaccctgtctcaaaaaaaaaaaaaaagttttctagaataagcaggatgattgtttaatttgaagatggaacaggaaactagagtgcatttaaaatactctgtcttcattttaacatgttgaatggaataactgcatatcaccatgagtttgttttgcttttcatacagacttgtatgtgtcatttgagtggtttccagattggagcgaggttattctgatctaaatgaacagcatttttttccttagcctctgtttgccactctgggtatctctcctatgggcaaagccattagaaatgcataaaacctcgagacatggtttttggcaaaaactccatgactttaaactagctcttttactactgacctttcacagagaaaaaatatttcccttgaaaaaaactgggcttgtcattttttcccttgtagctttaagcagagacataagtgccttgcattacacatagtaaactttctttaaaaaaaaaaaaaaaagattttggagactaccagggtaagattccaacttgtccaaaagctttctggccttacatattttattataaaaattctcaagtctggtaatcttctatgtcagagctagtgatttcaaaaggtttcacaattccccaagacaaaagtgattttcgttcattataataaggttaagtgatatgtgattcatagcaattttgatgtgaagaagggaaggacatcattgacttaataatagtatcagtcggtgcaacagttggcaacatgtgccttcacactttaccataaagagacgggtttgagggtttgccttctaaagtctgcaacttcaagaaaaaaaatcgacactgtggattgactttcccggtcactatataaagcaaataaacttaaaacactttgtaaccatgtatttactctgccaggtgcctatattccaataaaatgttcatccttgaaga

SEQ ID NO: 131934 - DNA, 602 bp, Homo sapiens
  Payload ID: 5759
  Gene Symbol: FAM129A
  Gene Name: family with sequence similarity 129, member A
  ENST ID: ENST00000417056
  CDS Start-End: 1-301
tgcagttgccattgagaaggttaaactccgagtcttaaagcaatatgattatgacagcagcaccatccgaaagaagatatttcaagaggcactagttcaaatcacacttcccactgtgcagaaggcactggcgtccacatgcaaaccagagcttcagaaatacgagcagttcatctttgcagatcataccaatatgattcacgttgaaaatgtctatgaggagattttacatcagatcctgcttgatgaaactctgaaaggtgcctatattccaataaaatgttcatccttgaagagctgaccagatgtcatttatttggaaggaggctggtttcatcttttaagcagatgtcacatttgaattgtgaggtacagccctctgaaacgaaaaggcgagtcattcttgctgtatcatggaccttttacttttctgttgtcacgaaggaatctgcagggaaaccacttaatgtcaggtgtaattatgctttgataatgcatatgcttacgtctccaggaattggatcacattcataatacagcagtgggcaattattcttgatgtaattgaactgctgttcaaacttaaatttattttcaatggg

SEQ ID NO: 131935 - DNA, 3957 bp, Homo sapiens
  Payload ID: 5760
  Gene Symbol: FAM129B
  Gene Name: family with sequence similarity 129, member B
  Uniprot ID: Q96TA1
  ENST ID: ENST00000373312
  CDS Start-End: 215-2455
ggcagggagggggccaaggcggccggctggagggacggggcccgaccgggagcggagccggagcggaagccgcagccgggcggcgggagcggcgggagcggcgggagcgggggaagcagggcgggccgggctccatggcgccagcggcgtccgcctgagcagcgcgggcaacagcggcggcgtcggccggatcgggccgcgacacctcctggccatgggggacgtgctgtccacgcacctggacgacgcccggcgccagcacatcgcagaaaaaaccgggaagatcctgacggagttcctccagttctatgaagaccagtatggcgtggctctcttcaacagcatgcgccatgagattgagggcacggggctgccgcaggcccagctgctctggcgcaaggtgccactggacgagcgcatcgtcttctcggggaacctcttccagcaccaggaggacagcaagaagtggagaaaccgcttcagcctcgtgccccacaactacgggctggtgctctacgaaaacaaagcggcctatgagcggcaggtcccaccacgagccgtcatcaacagtgcaggctacaaaatcctcacgtccgtggaccaatacctggagctcattggcaactccttaccagggaccacggcaaagtcgggcagtgcccccatcctcaagtgccccacacagttcccgctcatcctctggcatccttatgcgcgtcactactacttctgcatgatgacagaagccgagcaggacaagtggcaggctgtgctgcaggactgcatccggcactgcaacaatggaatccctgaggactccaaggtagagggccctgcgttcacagatgccatccgcatgtaccgacagtccaaggagctgtacggcacctgggagatgctgtgtgggaacgaggtgcagatcctgagcaacctggtgatggaggagctgggccctgagctgaaggcagagctcggcccgcggctgaaggggaaaccgcaggagcggcagcggcagtggatccagatctcggacgccgtgtaccacatggtgtacgagcaggccaaggcgcgcttcgaggaggtgctgtccaaggtgcagcaggtgcagccggccatgcaggccgtcatccgaactgacatggaccaaattatcacctccaaggagcaccttgccagcaagatccgagccttcatcctccccaaggcagaggtgtgcgtgcggaaccatgtccagccctacatcccatccatcctggaggccctgatggtccccaccagccagggcttcactgaggtgcgagatgtcttcttcaaggaggtcacggacatgaacctgaacgtcatcaacgagggcggcattgacaagctgggcgagtacatggagaagctgtcccggctggcgtaccaccccctgaagatgcagagctgctatgagaagatggagtcgctgcgactggacgggctgcagcagcgatttgatgtgtccagcacgtccgtgttcaagcagcgagcccagatccacatgcgggagcaaatggacaatgccgtgtatacgttcgagaccctcctgcaccaggagctggggaaggggcccaccaaggaggagctgtgcaagtccatccagcgggtcctggagcgggtgctgaagaaatacgactacgacagcagctctgtgcggaagaggttcttccgggaggcgctgctgcagatcagcatcccgttcctgctcaagaagctggcccctacctgcaagtcggagctgccccggttccaggagctgatcttcgaggactttgccaggttcatcctggtggaaaacacgtacgaggaggtggtgctgcagaccgtcatgaaggacatcctgcaggctgtgaaggaggccgcggtgcagaggaagcacaacctctaccgggacagcatggtcatgcacaacagcgaccccaacctgcacctgctggccgagggcgcccccatcgactggggcgaggagtacagcaacagcggcgggggcggcagccccagccccagcaccccggagtcagccaccctctcggaaaagcgacggcgcgccaagcaggtggtctctgtggtccaggatgaggaggtggggctgccctttgaggctagccctgagtcaccaccacctgcgtccccggacggtgtcactgagatccgaggcctgctggcccaaggtctgcggcctgagagccccccaccagccggccccctgctcaacggggcccccgctggggagagtccccagcctaaggccgcccccgaggcctcctcgccgcctgcctcacccctccagcatctcctgcctggaaaggctgtggaccttgggccccccaagcccagcgaccaggagactggagagcaggtgtccagccccagcagccaccccgccctccacaccaccaccgaggacagtgcaggggtgcagactgagttctaggccagtgggtccctgactgctgcacatggcacaggccgttcccttccggacccaggcaggctcagctctggggagggcaccctggtctgtgccttgtgggtggaggcggggcagggctgtgtggcaccgccagggagcgggcccacctgagtcactttattgggttcagtcaacactttcttgctccctgttttctcttctgtgggatgatctcagatgcaggggctggttttggggttttcctgcttgtgccaagggctggacactgctggggggctggaaagcccctcccttcctgtccttctgtggcctccatcccctcatgggtgctgccatccttcctggagagagggaggtgaaagctggtgtgagcccagtgggttcccgcccactcacccaggagctggctgggccaggaccgggagagggagcactgctgccctcctggccctgctccttccgcagttaggggtggaccgagcctcgctttccccactgttctggagggaaggggaaggagggggtcttcaggctggagccaggctgggggtgctgggtggagagatgagatttagggggtgcctcatggggtgggcaggcctggggtgaaatgagaaaggcccagaacgtgcaggtctgcggaggggaagtgtcctgagtgaaggaggggacccccatcctgggggatgctgggagtgagtgagtgagatggctgagtgagggttatggggagcctgaggttttatgggcctgtgtatccccttctcccggccccagcctgcctccctcctgcccgcctggcccacaggtctccctctggtccctgtccctctggtggttggggatggagcggcagcaaggggtgtaatggggctgggttctgtcttctacaggccaccccgaggtcctcagtggttgcctggggagccggacggggctcctgaggggtacaggttgggtgggccctccctgagggtctggggtcaggctttggcctctgctgcctctcagtcaccaagtcacctccctctgaaaatccagtcccttctttggatgtccttgtgagtcactctgggcctggctgtcgtccctcctcagcttcttgttcctgggacaagggtcaagccaggatgggcccaggcctgggatcccccaccccaggacccccaggccccctcccctgctgctttgcggggggcagggcagaaatggactccttttgggtccccgaggtggggtcccctcccagccctgcatcctccgtgccctagacctgctccccagaggaggggccttgacccacaggacgtgtggtggcgcctggcactcagggacccccagctgccgcagccctggtctctggcgcatctcttccctcttgtcccgaagatctgcgcctctagtgccttttgaggggttcccatcatccctccctgatattgtattgaaaatattatgcacactgttcatgcttctactaatcaataaacgctttatttaaa

SEQ ID NO: 131936 - DNA, 3760 bp, Homo sapiens
  Payload ID: 5760
  Gene Symbol: FAM129B
  Gene Name: family with sequence similarity 129, member B
  Uniprot ID: Q96TA1
  ENST ID: ENST00000373314
  CDS Start-End: 53-2254
caggaactgggccagttccggtcccttccttttggggctctcactctggaggatggggtggatgggagaaaaaaccgggaagatcctgacggagttcctccagttctatgaagaccagtatggcgtggctctcttcaacagcatgcgccatgagattgagggcacggggctgccgcaggcccagctgctctggcgcaaggtgccactggacgagcgcatcgtcttctcggggaacctcttccagcaccaggaggacagcaagaagtggagaaaccgcttcagcctcgtgccccacaactacgggctggtgctctacgaaaacaaagcggcctatgagcggcaggtcccaccacgagccgtcatcaacagtgcaggctacaaaatcctcacgtccgtggaccaatacctggagctcattggcaactccttaccagggaccacggcaaagtcgggcagtgcccccatcctcaagtgccccacacagttcccgctcatcctctggcatccttatgcgcgtcactactacttctgcatgatgacagaagccgagcaggacaagtggcaggctgtgctgcaggactgcatccggcactgcaacaatggaatccctgaggactccaaggtagagggccctgcgttcacagatgccatccgcatgtaccgacagtccaaggagctgtacggcacctgggagatgctgtgtgggaacgaggtgcagatcctgagcaacctggtgatggaggagctgggccctgagctgaaggcagagctcggcccgcggctgaaggggaaaccgcaggagcggcagcggcagtggatccagatctcggacgccgtgtaccacatggtgtacgagcaggccaaggcgcgcttcgaggaggtgctgtccaaggtgcagcaggtgcagccggccatgcaggccgtcatccgaactgacatggaccaaattatcacctccaaggagcaccttgccagcaagatccgagccttcatcctccccaaggcagaggtgtgcgtgcggaaccatgtccagccctacatcccatccatcctggaggccctgatggtccccaccagccagggcttcactgaggtgcgagatgtcttcttcaaggaggtcacggacatgaacctgaacgtcatcaacgagggcggcattgacaagctgggcgagtacatggagaagctgtcccggctggcgtaccaccccctgaagatgcagagctgctatgagaagatggagtcgctgcgactggacgggctgcagcagcgatttgatgtgtccagcacgtccgtgttcaagcagcgagcccagatccacatgcgggagcaaatggacaatgccgtgtatacgttcgagaccctcctgcaccaggagctggggaaggggcccaccaaggaggagctgtgcaagtccatccagcgggtcctggagcgggtgctgaagaaatacgactacgacagcagctctgtgcggaagaggttcttccgggaggcgctgctgcagatcagcatcccgttcctgctcaagaagctggcccctacctgcaagtcggagctgccccggttccaggagctgatcttcgaggactttgccaggttcatcctggtggaaaacacgtacgaggaggtggtgctgcagaccgtcatgaaggacatcctgcaggctgtgaaggaggccgcggtgcagaggaagcacaacctctaccgggacagcatggtcatgcacaacagcgaccccaacctgcacctgctggccgagggcgcccccatcgactggggcgaggagtacagcaacagcggcgggggcggcagccccagccccagcaccccggagtcagccaccctctcggaaaagcgacggcgcgccaagcaggtggtctctgtggtccaggatgaggaggtggggctgccctttgaggctagccctgagtcaccaccacctgcgtccccggacggtgtcactgagatccgaggcctgctggcccaaggtctgcggcctgagagccccccaccagccggccccctgctcaacggggcccccgctggggagagtccccagcctaaggccgcccccgaggcctcctcgccgcctgcctcacccctccagcatctcctgcctggaaaggctgtggaccttgggccccccaagcccagcgaccaggagactggagagcaggtgtccagccccagcagccaccccgccctccacaccaccaccgaggacagtgcaggggtgcagactgagttctaggccagtgggtccctgactgctgcacatggcacaggccgttcccttccggacccaggcaggctcagctctggggagggcaccctggtctgtgccttgtgggtggaggcggggcagggctgtgtggcaccgccagggagcgggcccacctgagtcactttattgggttcagtcaacactttcttgctccctgttttctcttctgtgggatgatctcagatgcaggggctggttttggggttttcctgcttgtgccaagggctggacactgctggggggctggaaagcccctcccttcctgtccttctgtggcctccatcccctcatgggtgctgccatccttcctggagagagggaggtgaaagctggtgtgagcccagtgggttcccgcccactcacccaggagctggctgggccaggaccgggagagggagcactgctgccctcctggccctgctccttccgcagttaggggtggaccgagcctcgctttccccactgttctggagggaaggggaaggagggggtcttcaggctggagccaggctgggggtgctgggtggagagatgagatttagggggtgcctcatggggtgggcaggcctggggtgaaatgagaaaggcccagaacgtgcaggtctgcggaggggaagtgtcctgagtgaaggaggggacccccatcctgggggatgctgggagtgagtgagtgagatggctgagtgagggttatggggagcctgaggttttatgggcctgtgtatccccttctcccggccccagcctgcctccctcctgcccgcctggcccacaggtctccctctggtccctgtccctctggtggttggggatggagcggcagcaaggggtgtaatggggctgggttctgtcttctacaggccaccccgaggtcctcagtggttgcctggggagccggacggggctcctgaggggtacaggttgggtgggccctccctgagggtctggggtcaggctttggcctctgctgcctctcagtcaccaagtcacctccctctgaaaatccagtcccttctttggatgtccttgtgagtcactctgggcctggctgtcgtccctcctcagcttcttgttcctgggacaagggtcaagccaggatgggcccaggcctgggatcccccaccccaggacccccaggccccctcccctgctgctttgcggggggcagggcagaaatggactccttttgggtccccgaggtggggtcccctcccagccctgcatcctccgtgccctagacctgctccccagaggaggggccttgacccacaggacgtgtggtggcgcctggcactcagggacccccagctgccgcagccctggtctctggcgcatctcttccctcttgtcccgaagatctgcgcctctagtgccttttgaggggttcccatcatccctccctgatattgtattgaaaatattatgcacactgttcatgcttctactaatcaataaacgctttatttaaagcca

SEQ ID NO: 131937 - DNA, 2222 bp, Homo sapiens
  Payload ID: 5761
  Gene Symbol: FAM129C
  Gene Name: family with sequence similarity 129, member C
  Uniprot ID: Q86XR2
  ENST ID: ENST00000332386
  CDS Start-End: 139-2094
gctgagcaggagatgggaattgaaacctgcgcagaggcggctgtgcagggtgagagtggagccgaaaccacagaaagtgaagtttgcttcaacgtcttgtcccggcaggccactcagatgtgagagtgaggaagtgggatggggcctgaccggaaggaggtgcccctgagccgaggaacgcaggcggtggtcgtggggaagggaagaggagccccgggagacgacagcagcatgggtgggcggccttcgagccctctggacaagcagcagcggcagcacctaaggggtcaggtggacaccctgctgaggaacttcctgccttgctaccgtgggcagctggcagcgtctgtcctgcggcagatctctcgagagctgggccctcaggagccgaccggaagccagttgctacgcagcaaaaagctgccccgagtccgtgagcaccgaggacccctgacccagcttcggggccacccaccccggtggcagccgatcttctgtgttctgcgtggggacggccgcctagagtggttcagccacaaggaggaatatgaaaacgggggccactgccttggctcaacagccctgacaggatacacgctcctgacttcccagcgagaatatctccgccttttggatgctctctgccctgaatccttgggagaccatactcaggaagagcctgactccctcttggaagtgcctgtgagcttcccgctgttcctgcagcaccccttccgccggcacctctgcttctctgcagccaccagggaggcacagcatgcctggaggctggccctgcagggtggcatccggcttcagggcatagtcctgcagcgaagccaggcccctgctgcccgggccttcctggacgccgtccgactctaccggcagcaccaaggccactttggcgacgacgacgtgaccctaggctcagacgccgaggtgctgaccgcggtgctgatgcgggagcaacttcccgcgctgcgagcccagacccttcctggcctgcggggggcaggccgcgcccgcgcctgggcctggaccgagcttctagacgccgttcacgcagctgtcctggccggggcctccgccgggctctgcgccttccagcccgaaaaggacgagctgcttgcgtcgctggagaagacgatccgcccggacgtggaccagctgctgcggcagcgggcgcgtgtggcggggcggctgaggacggatatcaggggaccgctcgagtcgtgcctgcgccgggaggtggacccgcagctgccccgggtcgtgcagaccctgctgcgcaccgtggaagcctcgctcgaggcggtgcggaccctcctggctcaaggcatggaccgactgtcccaccgcctgcgccagagcccctcaggcacgcggctgcgcagggaggtttactcatttggggagatgccgtgggacttggcgctgatgcagacatgctaccgtgaggccgagcggagccgggggcgcttggggcagctggcagcaccgtttggctttctggggatgcagagcctcgtgtttggggcccaagatcttgcacagcagctcatggctgacgccgtggccaccttcctgcagctggctgaccagtgtctgacgacggccctcaactgtgaccaggctgcccagaggctggagagagtcagggggcgcgtgctgaagaaattcaaatcggacagcgggttggcgcagaggaggttcatccgaggctggggtctctgcatctttttaccttttgtgctgagccaactcgagccaggctgcaaaaaggagctgcctgagttcgagggggatgtccttgccgtgggcagccaggctctgaccactgagggcatctatgaggacgtcatccgggggtgcttgctgcagaggattgaccaagaattgaaaaagacccttggtgccaatgatgtatcctgcactctggacggctgcttggaggtcccatgggaacaggagggagcagatgaggaaactgaggctgagcgggaaggaggggcttgtcccaggcagccagactctggtgcccagatccagccactctgcccaccgccttctccaggaacattccggagctgaatcttcacccacatctatcttgtttctattggataaatgtctacaagtggaatttctgggccaaaacggatgtgccatctttaggcttttgtaacccctgcaacttcagaaaactgtaccattttata

SEQ ID NO: 131938 - DNA, 2508 bp, Homo sapiens
  Payload ID: 5761
  Gene Symbol: FAM129C
  Gene Name: family with sequence similarity 129, member C
  Uniprot ID: Q86XR2
  ENST ID: ENST00000335393
  CDS Start-End: 139-2232
gctgagcaggagatgggaattgaaacctgcgcagaggcggctgtgcagggtgagagtggagccgaaaccacagaaagtgaagtttgcttcaacgtcttgtcccggcaggccactcagatgtgagagtgaggaagtgggatggggcctgaccggaaggaggtgcccctgagccgaggaacgcaggcggtggtcgtggggaagggaagaggagccccgggagacgacagcagcatgggtgggcggccttcgagccctctggacaagcagcagcggcagcacctaaggggtcaggtggacaccctgctgaggaacttcctgccttgctaccgtgggcagctggcagcgtctgtcctgcggcagatctctcgagagctgggccctcaggagccgaccggaagccagttgctacgcagcaaaaagctgccccgagtccgtgagcaccgaggacccctgacccagcttcggggccacccaccccggtggcagccgatcttctgtgttctgcgtggggacggccgcctagagtggttcagccacaaggaggaatatgaaaacgggggccactgccttggctcaacagccctgacaggatacacgctcctgacttcccagcgagaatatctccgccttttggatgctctctgccctgaatccttgggagaccatactcaggaagagcctgactccctcttggaagtgcctgtgagcttcccgctgttcctgcagcaccccttccgccggcacctctgcttctctgcagccaccagggaggcacagcatgcctggaggctggccctgcagggtggcatccggcttcagggcatagtcctgcagcgaagccaggcccctgctgcccgggccttcctggacgccgtccgactctaccggcagcaccaaggccactttggcgacgacgacgtgaccctaggctcagacgccgaggtgctgaccgcggtgctgatgcgggagcaacttcccgcgctgcgagcccagacccttcctggcctgcggggggcaggccgcgcccgcgcctgggcctggaccgagcttctagacgccgttcacgcagctgtcctggccggggcctccgccgggctctgcgccttccagcccgaaaaggacgagctgcttgcgtcgctggagaagacgatccgcccggacgtggaccagctgctgcggcagcgggcgcgtgtggcggggcggctgaggacggatatcaggggaccgctcgagtcgtgcctgcgccgggaggtggacccgcagctgccccgggtcgtgcagaccctgctgcgcaccgtggaagcctcgctcgaggcggtgcggaccctcctggctcaaggcatggaccgactgtcccaccgcctgcgccagagcccctcaggcacgcggctgcgcagggaggtttactcatttggggagatgccgtgggacttggcgctgatgcagacatgctaccgtgaggccgagcggagccgggggcgcttggggcagctggcagcaccgtttggctttctggggatgcagagcctcgtgtttggggcccaagatcttgcacagcagctcatggctgacgccgtggccaccttcctgcagctggctgaccagtgtctgacgacggccctcaactgtgaccaggctgcccagaggctggagagagtcagggggcgcgtgctgaagaaattcaaatcggacagcgggttggcgcagaggaggttcatccgaggctggggtctctgcatctttttaccttttgtgctgagccaactcgagccaggctgcaaaaaggagctgcctgagttcgagggggatgtccttgccgtgggcagccaggctctgaccactgagggcatctatgaggacgtcatccgggggtgcttgctgcagaggattgaccaagaattgaaaaagacccttggtgccaatgatgtatcctgcactctggacggctgcttggaggtcccatgggaacaggagggagcagctccaaatcttaacttggtgtcaagtttcctggctgggagacaagcttttaccgacttcctctgcttgccagcaaagtcatctgctaactggatattggcagcttctctgctgtcttgcagctgcttccggagtgggttccacagggattcccgtgtgttcttggttcagcttgcagagggactttcacactccctggagaccgtttcctcccattctgtctggagttttcggcctaccccaagacaatgagatattcctgacctttccacctatttccctccaaccccaccttccgaaatacatttgctcaatacatttgcacttcataggcttctttagctgtcttccttttaccccggacgggatgtagatgttaattctggaacaattgcagctacaagaatttgtcatcctgccccttttgagaaaaacattgtttgcccttgggtctaaatccttccagatgggatgggatgtatcttgtcacctcctttttcttacttaatatgaaaagacctttcctca

SEQ ID NO: 131939 - DNA, 2004 bp, Homo sapiens
  Payload ID: 5761
  Gene Symbol: FAM129C
  Gene Name: family with sequence similarity 129, member C
  Uniprot ID: Q86XR2
  ENST ID: ENST00000449408
  CDS Start-End: 662-1933
agccgaggaacgcaggcggtggtcgtggggaagggaagaggagccccgggagacgacagcagcatgggtgggcggccttcgagccctctggacaagcagcagcggcagcacctaagggaagctgccccgagtccgtgagcaccgaggacccctgacccagcttcggggccacccaccccggtggcagccgatcttctgtgttctgcgtggggacggccgcctagagtggttcagccacaaggaggaatatgaaaacgggggccactgccttggctcaacagccctgacaggatacacgctcctgacttcccagcgagaatatctccgccttttggatgctctctgccctgaatccttgggagaccatactcaggaagagcctgactccctcttggaagtgcctgtgagcttcccgctgttcctgcagcaccccttccgccggcacctctgcttctctgcagccaccagggaggcacagcatgcctggaggctggccctgcagggtggcatccggcttcagggcatagtcctgcagcgaagccaggcccctgctgcccgggccttcctggacgccgtccgactctaccggcagcaccaaggccactttggcgacgacgacgtgaccctaggctcagacgccgaggtgctgaccgcggtgctgatgcgggagcaacttcccgcgctgcgagcccagacccttcctggcctgcggggggcaggccgcgcccgcgcctgggcctggaccgagcttctagacgccgttcacgcagctgtcctggccggggcctccgccgggctctgcgccttccagcccgaaaaggacgagctgcttgcgtcgctggagaagacgatccgcccggacgtggaccagctgctgcggcagcgggcgcgtgtggcggggcggctgaggacggatatcaggggaccgctcgagtcgtgcctgcgccgggaggtggacccgcagctgccccgggtcgtgcagaccctgctgcgcaccgtggaagcctcgctcgaggcggtgcggaccctcctggctcaaggcatggaccgactgtcccaccgcctgcgccagagcccctcaggcacgcggctgcgcagggaggtttactcatttggggagatgccgtgggacttggcgctgatgcagacatgctaccgtgaggccgagcggagccgggggcgcttggggcagctggcagcaccgtttggctttctggggatgcagagcctcgtgtttggggcccaagatcttgcacagcagctcatggctgacgccgtggccaccttcctgcagctggctgaccagtgtctgacgacggccctcaactgtgaccaggctgcccagaggctggagagagtcagggggcgcgtgctgaagaaattcaaatcggacagcgggttggcgcagaggaggttcatccgaggctggggtctctgcatctttttaccttttgtgctgagccaactcgagccaggctgcaaaaaggagctgcctgagttcgagggggatgtccttgccgtgggcagccaggctctgaccactgagggcatctatgaggacgtcatccgggggtgcttgctgcagaggattgaccaagaattgaaaaagacccttggtgccaatgatgtatcctgcactctggacggctgcttggaggtcccatgggaacaggagggagcagctccaaatcttaacttggtgtcaagtttcctggctgggagacaagcttttaccgacttcctctgcttgccagcaaagtcatctgctaactggatattggcagcttctctgctgtcttgcagctgcttccggagtgggttccacagggattcccgtgtgttcttggttcagcttgcagagggactttcacactccctggagaccgtttcctcccattctgtctggagttttcggcctaccccaagacaatgagatattcctgacctttccacctatttccctccaaccccaccttccgaaatacatttgctcaatacatttgc

SEQ ID NO: 131940 - DNA, 5115 bp, Homo sapiens
  Payload ID: 5761
  Gene Symbol: FAM129C
  Gene Name: family with sequence similarity 129, member C
  ENST ID: ENST00000600519
  CDS Start-End: 54-1742
cgcaggcggtggtcgtggggaagggaagaggagccccgggagacgacagcagcatgggtgggcggccttcgagccctctggacaagcagcagcggcagcacctaaggggtcaggtggacaccctgctgaggaacttcctgccttgctaccgtgggcagctggcagcgtctgtcctgcggcagatctctcgagagctgggccctcaggagccgaccggaagccagttgctacgcagcaaaaagctgccccgagtccgtgagcaccgaggacccctgacccagcttcggggccacccaccccggtggcagccgatcttctgtgttctgcgtggggacggccgcctagagtggttcagccacaaggaggaatatgaaaacgggggccactgccttggctcaacagccctgacaggatacacgctcctgacttcccagcgagaatatctccgccttttggatgctctctgccctgaatccttgggagaccatactcaggaagagcctgactccctcttggaagtgcctgtgagcttcccgctgttcctgcagcaccccttccgccggcacctctgcttctctgcagccaccagggaggcacagcatgcctggaggctggccctgcagggtggcatccggcttcagggcatagtcctgcagcgaagccaggcccctgctgcccgggccttcctggacgccgtccgactctaccggcagcaccaaggccactttggcgacgacgacgtgaccctaggctcagacgccgaggtgctgaccgcggtgctgatgcgggagcaacttcccgcgctgcgagcccagacccttcctggcctgcggggggcaggccgcgcccgcgcctgggcctggaccgagcttctagacgccgttcacgcagctgtcctggccggggcctccgccgggctctgcgccttccagcccgaaaaggacgagctgcttgcgtcgctggagaagacgatccgcccggacgtggaccagctgctgcggcagcgggcgcgtgtggcggggcggctgaggacggatatcaggggaccgctcgagtcgtgcctgcgccgggaggtggacccgcagctgccccgggtcgtgcagaccctgctgcgcaccgtggaagcctcgctcgaggcggtgcggaccctcctggctcaaggcatggaccgactgtcccaccgcctgcgccagagcccctcaggcacgcggctgcgcagggaggtttactcatttggggagatgccgtgggacttggcgctgatgcagacatgctaccgtgaggccgagcggagccgggggcgcttggggcagctggcagcaccgtttggctttctggggatgcagagcctcgtgtttggggcccaagatcttgcacagcagctcatggctgacgccgtggccaccttcctgcagctggctgaccagtgtctgacgacggccctcaactgtgaccaggctgcccagaggctggagagagtcagggggcgcgtgctgaagaaattcaaatcggacagcgggttggcgcagaggaggttcatccgaggctggggtctctgcatctttttaccttttgtgctgagccaactcgagccaggctgcaaaaagacggagtctcactctgtcgcccaggctgtagtgcagtggtgtgatcttggctcactgcaacctccacctcctaggttcaagcgatcctcccatctcagcctcccaagtagctgggattacaggcacccgctatagggaccagccccacagggtcggtgggtctctccctgtgtgcagagacaagagagtgtagaaataaagacacaagacaaagagataaaagaaaagacagctgggcccgggggaccactactaccaagttgcggagaccggtagtggccccgaatgtctggctgcgctgttatttattggatacaaagcaaaaggggcagggtaaagagtgtgagtcatctccaatgataggtaaggtcacgtgggtcatgtgtccactggacagggggcccctccctgcctggcagctgaggcagagagagagaggagacaaagagaaagacagcttaagccattatttctgcatatcagagacttttagtactttcactaactgactactgctatctagaaggcagagccaggtgtacaggatggaacacgaaggcggactaggagcgagaccactgaagcacagcatcacagggagacggttaggtctctggataactgtgggcaagcctgactgatatcaggccctccacaagaggtggaggagcagagtcttctctaaactcccccggagaaaaggagactccctttcccggtctgctaagtagccggtgtttttccttgacacttttcgctaccgctagaccacggtctgcctggcaacaggcatcttcccagacgctggcgtcaccgctagaccaaggagcccttctgctggccctgtccgggcataacagaaggctcgcactcttgtcttctggtcatacctcactatgccccctcagctcctatctctgtatggcctggtttttcctaggttatgattgtagagtgaggattattataatattggaataaagagtaactgctaccaactaatcattaatgatattcatatataatcatatctaatatctatatctggtataactattcttgttttatattttgttatactggaacagctcatgtcctcggtctcttgcctcagcacctgggtggcttgccgcccacaacccgccaccacgcccagctaatttttgtacttttagtagagacggtggtttcaccatgttggtcaggctggtcttgaactcctgacctcatgatccgcccacctcagccaaccaaagtgctgggattacaggcatgagccaccgcacccggcctgtttattttaaaataaaaatatttaaaaataaagataaggaaactaaggcccaagccccgccccccaaccccacagctaatcaggcccagggctagggcagaagcctgtgttgtaggcctctagaggggccctcctctccatccgagcccctaacccgccatggttccaggagctgcctgagttcgagggggatgtccttgccgtgggcagccaggctctgaccactgagggcatctatgaggacgtcatccgggggtgcttgctgcagaggattgaccaagacccttggtgccaatgatgtatcctgcactctggacggctgcttggaggtcccatgggaacaggagggagcagatgaggaaactgaggctgagcgggaaggaggggcttgtcccaggcagccagactctggtgcccagatccagccactctgcccaccgccttctccaggaacattccggagctgaatcttcacccacatctatcttgtttctattggataaatgtctacaagtggaatttctgggccaaaacggatgtgccatctttaggcttttgtaacccctgcaacttcagaaaactgtaccattttatactccaagcagcagcatttatttgtgtattttccccaaggctttctttattttaattttttttttttttttgagactgagtcttgctctgtcacccgggctggagtgcagtggcaggatctcggctcactgcaacctccgcctcccgggttcaagcgattctcctgcctcagcctcccgagtagctgagatttcaggcacccgccaccatgcctggttaatttttgtgtttttagtagagatggggtttcaccatgttggccaggctggtctcgaactcctgtccttaagtgatctgcccccctcagcctcccaaagtgctgggattacaggtgtgagccaccacacgtggcctaattttttttttttaaataatagagacaaggtctcgctatgctgcccaggctgatctcaaactcctggactcaagcaatcctcctgccttggcctcccaaagtgctaggattataggagtgatccactatgtccagcctccaaatcctttctaaacactaggacttttcatgaaaagaaaaaagctatgccagttagacacacacagaaatctcatgattttattttgaatttctttgactaaattgaacttacaaataagtttattatggccaggcgtggcagtgcacacctgtaatcccagcactttgggaggctgaggcgggcagatcacttgagctcaggagttcaagaccagcctggcgaacatagtgagacctcatctctacaaaaaatacaaaattagcggccgggagtggtggctcacgcctgtcatcccagcactttgggaggctgagacaggtggattgcttgagccaaggagttttgaggccagcttgggcaatgtggtgaaacctgtctctactaaaaaataaaataaataaataaataaataaataaataaataaataaataaaatttaaaagaagctgggctgagatgggagatttacctgagcctgggaactcaaggctgcagtgagtggtgattgcaccactgcactccagcctgggtgatgggagtgagaccctgtctcaaaaaacaaaatccaaatatgttgattagccatttacatgtttgtagtttttttttttttaatttcagtgaattgcctgttcatagcttttttctacttttcaggagtgtttgcatttttcttattgatatctaataactctttatatctgaaggatatgaacgctttgtgatacaggttacagattttggggtttttttctccgcttgctgtgagccttttgggtttgtttcctagctccaaatcttaacttggtgtcaagtttcctggctgggagacaagcttttaccgacttcctctgcttgccagcaaagtcatctgctaactggatattggcagcttctctgctgtcttgcagctgcttccggagtgggttccacagggattcccgtgtgttcttggttcagcttgcagagggactttcacactccctggagaccgtttcctcccattctgtctggagttttcggcctaccccaagacaatgagatattcctgacctttccacctatttccctccaaccccaccttccgaaatacatttgctcaatacatttgcacttcataggc

SEQ ID NO: 131941 - DNA, 2073 bp, Homo sapiens
  Payload ID: 5761
  Gene Symbol: FAM129C
  Gene Name: family with sequence similarity 129, member C
  ENST ID: ENST00000599164
  CDS Start-End: 79-1941
atccaggtgcccctgagccgaggaacgcaggcggtggtcgtggggaagggaagaggagccccgggagacgacagcagcatgggtgggcggccttcgagccctctggacaagcagcagcggcagcacctaaggggtcaggtggacaccctgctgaggaacttcctgccttgctaccgtgggcagctggcagcgtctgtcctgcggcagatctctcgagagctgggccctcaggagccgaccggaagccagttgctacgcagcaaaaagctgccccgagtccgtgagcaccgaggacccctgacccagcttcggggccacccaccccggtggcagccgatcttctgtgttctgcgtggggacggccgcctagagtggttcagccacaaggaggaatatgaaaacgggggccactgccttggctcaacagccctgacaggatacacgctcctgacttcccagcgagaatatctccgccttttggatgctctctgccctgaatccttgggagaccatactcaggaagagcctgactccctcttggaagtgcctgtgagcttcccgctgttcctgcagcaccccttccgccggcacctctgcttctctgcagccaccagggaggcacagcatgcctggaggctggccctgcagggtggcatccggcttcagggcatagtcctgcagcgaagccaggcccctgctgcccgggccttcctggacgccgtccgactctaccggcagcaccaaggccactttggcgacgacgacgtgaccctaggctcagacgccgaggtgctgaccgcggtgctgatgcgggagcaacttcccgcgctgcgagcccagacccttcctggcctgcggggggcaggccgcgcccgcgcctgggcctggaccgagcttctagacgccgttcacgcagctgtcctggccggggcctccgccgggctctgcgccttccagcccgaaaaggacgagctgcttgcgtcgctggagaagacgatccgcccggacgtggaccagctgctgcggcagcgggcgcgtgtggcggggcggctgaggacggatatcaggggaccgctcgagtcgtgcctgcgccgggaggtggacccgcagctgccccgggtcgtgcagaccctgctgcgcaccgtggaagcctcgctcgaggcggtgcggaccctcctggctcaaggcatggaccgactgtcccaccgcctgcgccagagcccctcaggcacgcggctgcgcagggaggtttactcatttggggagatgccgtgggacttggcgctgatgcagacatgctaccgtgaggccgagcggagccgggggcgcttggggcagctggcagcaccgtttggctttctggggatgcagagcctcgtgtttggggcccaagatcttgcacagcagctcatggctgacgccgtggccaccttcctgcagctggctgaccagtgtctgacgacggccctcaactgtgaccaggctgcccagaggctggagagagtcagggggcgcgtgctgaagaaattcaaatcggacagcgggttggcgcagaggaggttcatccgaggctggggtctctgcatctttttaccttttgtgctgagccaactcgagccaggctgcaaaaaggagctgcctgagttcgagggggatgtccttgccgtgggcagccaggctctgaccactgagggcatctatgaggacgtcatccgggggtgcttgctgcagaggattgaccaagaattgaaaaagacccttggtgccaatgatgtatcctgcactctggacggctgcttggaggtcccatgggaacaggagggagcagatgaggaaactgaggctgagcgggaaggaggggcttgtcccaggcagccagactctggtgcccagatccagccactctgcccaccgccttctccaggaacattccggagctgaatcttcacccacatctatcttgtttctattggataaatgtctacaagtggaatttctgggccaaaacggatgtgccatctttaggcttttgtaacccctgcaacttcagaaaactgtaccattttatactcc

SEQ ID NO: 131942 - DNA, 2265 bp, Homo sapiens
  Payload ID: 5761
  Gene Symbol: FAM129C
  Gene Name: family with sequence similarity 129, member C
  Uniprot ID: Q86XR2
  ENST ID: ENST00000595684
  CDS Start-End: 139-2139
gctgagcaggagatgggaattgaaacctgcgcagaggcggctgtgcagggtgagagtggagccgaaaccacagaaagtgaagtttgcttcaacgtcttgtcccggcaggccactcagatgtgagagtgaggaagtgggatggggcctgaccggaaggaggtgcccctgagccgaggaacgcaggcggtggtcgtggggaagggaagaggagccccgggagacgacagcagcatgggtgggcggccttcgagccctctggacaagcagcagcggcagcacctaaggggtcaggtggacaccctgctgaggaacttcctgccttgctaccgtgggcagctggcagcgtctgtcctgcggcagatctctcgagagctgggccctcaggagccgaccggaagccagttgctacgcagcaaaaagctgccccgagtccgtgagcaccgaggacccctgacccagcttcggggccacccaccccggtggcagccgatcttctgtgttctgcgtggggacggccgcctagagtggttcagccacaaggaggaatatgaaaacgggggccactgccttggctcaacagccctgacaggatacacgctcctgacttcccagcgagaatatctccgccttttggatgctctctgccctgaatccttgggagaccatactcaggaagagcctgactccctcttggaagtgcctgtgagcttcccgctgttcctgcagcaccccttccgccggcacctctgcttctctgcagccaccagggaggcacagcatgcctggaggctggccctgcagggtggcatccggcttcagggcatagtcctgcagcgaagccaggcccctgctgcccgggccttcctggacgccgtccgactctaccggcagcaccaaggccactttggcgacgacgacgtgaccctaggctcagacgccgaggtgctgaccgcggtgctgatgcgggagcaacttcccgcgctgcgagcccagacccttcctggcctgcggggggcaggccgcgcccgcgcctgggcctggaccgagcttctagacgccgttcacgcagctgtcctggccggggcctccgccgggctctgcgccttccagcccgaaaaggacgagctgcttgcgtcgctggagaagacgatccgcccggacgtggaccagctgctgcggcagcgggcgcgtgtggcggggcggctgaggacggatatcaggggaccgctcgagtcgtgcctgcgccgggaggtggacccgcagctgccccgggtcgtgcagaccctgctgcgcaccgtggaagcctcgctcgaggcggtgcggaccctcctggctcaaggcatggaccgactgtcccaccgcctgcgccagagcccctcaggcacgcggctgcgcagggaggtttactcatttggggagatgccgtgggacttggcgctgatgcagacatgctaccgtgaggccgagcggagccgggggcgcttggggcagctggcagcaccgtttggctttctggggatgcagagcctcgtgtttggggcccaagatcttgcacagcagctcatggctgacgccgtggccaccttcctgcagctggctgaccagtgtctgacgacggccctcaactgtgaccaggctgcccagaggctggagagagtcagggggcgcgtgctgaagaaattcaaatcggacagcgggttggcgcagaggaggttcatccgaggctggggtctctgcatctttttaccttttgtgctgagccaactcgagccaggctgcaaaaaggagctgcctgagttcgagggggatgtccttgccgtgggcagccaggctctgaccactgagggcatctatgaggacgtcatccgggggtgcttgctgcagaggattgaccaagaattgaaaaagacccttggtgccaatgatgtatcctgcactctggacggctgcttggaggtcccatgggaacaggagggagcaggtggggaacttcacaggcttctgaaacatgccagtgattgctgggggtggggaggtggaggcccacatggggtgtatgggattgtcatgagtgtgggttcatggacggaacagaatgcactttgtctccttacccagccagcctggccaagctcgtgaacaagctcagtgggaagttgtggagtgcatctgagccacagagggaccctctaaacccaggctctgacatgcatgtgagctcagccctggggggctgagattgtggtgaatttgtgtcccatctct

SEQ ID NO: 131943 - DNA, 1918 bp, Homo sapiens
  Payload ID: 5761
  Gene Symbol: FAM129C
  Gene Name: family with sequence similarity 129, member C
  ENST ID: ENST00000599124
  CDS Start-End: 38-1792
ggggaagggaagaggagccccgggagacgacagcagcatgggtgggcggccttcgagccctctggacaagcagcagcggcagcacctaaggggtcaggtggacaccctgctgaggaacttcctgccttgctaccgtgggcagctggcagcgtctgtcctgcggcagatctctcgagagctgggccctcaggagccgaccggaagccagttgctacgcagcaaaaagctgccccgagtccgtgagcaccgaggacccctgacccagcttcggggccacccaccccggtggcagccgatcttctgtgttctgcgtggggacggccgcctagagtggttcagccacaaggaggaatatgaaaacgggggccactgccttggctcaacagccctgacaggatacacgctcctgacttcccagcgagaatatctccgccttttggatgctctctgccctgaatccttgggagaccatactcaggaagagcctgactccctcttggaagtgcctgtgagcttcccgctgttcctgcagcaccccttccgccggcacctctgcttctctgcagccaccagggaggcacagcatgcctggaggctggccctgcagggtggcatccggcttcagggcatagtcctgcagcgaagccaggcccctgctgcccgggccttcctggacgccgtccgactctaccggcagcaccaaggccactttggcgacgacgacgtgaccctaggctcagacgccgaggtgctgaccgcggtgctgatgcgggagcaacttcccgcgctgcgagcccagacccttcctggcctgcggggggcaggccgcgcccgcgcctgggcctggaccgagcttctagacgccgttcacgcagctgtcctggccggggcctccgccgggctctgcgccttccagcccgaaaaggacgagctgcttgcgtcgctggagaagacgatccgcccggacgtggaccagctgctgcggcagcgggcgcgtgtggcggggcggctgaggacggatatcaggggaccgctcgagtcgtgcctgcgccgggaggtggacccgcagctgccccgggtcgtgcagaccctgctgcgcaccgtggaagcctcgctcgaggcggtgcggaccctcctggctcaaggcatggaccgactgtcccaccgcctgcgccagagcccctcaggcacgcggctgcgcagggaggtttactcatttggggagatgccgtgggacttggcgctgatgcagacatgctaccgtgaggccgagcggagccgggggcgcttggggcagctggcagcaccgtttggctttctggggatgcagagcctcgtgtttggggcccaagatcttgcacagcagctcatggctgacgccgtggccaccttcctgcagctggctgaccagtgtctgacgacggccctcaactgtgaccaggctgcccagaggctggagagagtcagggggcgcgtgctgaaggagctgcctgagttcgagggggatgtccttgccgtgggcagccaggctctgaccactgagggcatctatgaggacgtcatccgggggtgcttgctgcagaggattgaccaagaattgaaaaagacccttggtgccaatgatgtatcctgcactctggacggctgcttggaggtcccatgggaacaggagggagcagatgaggaaactgaggctgagcgggaaggaggggcttgtcccaggcagccagactctggtgcccagatccagccactctgcccaccgccttctccaggaacattccggagctgaatcttcacccacatctatcttgtttctattggataaatgtctacaagtggaatttctgggccaaaacggatgtgccatctttaggcttttgtaacccctgcaacttcagaaaactgtaccatttta

SEQ ID NO: 131944 - DNA, 1822 bp, Homo sapiens
  Payload ID: 5761
  Gene Symbol: FAM129C
  Gene Name: family with sequence similarity 129, member C
  ENST ID: ENST00000600871
  CDS Start-End: 51-1760
aggcggtggtcgtggggaagggaagaggagccccgggagacgacagcagcatgggtgggcggccttcgagccctctggacaagcagcagcggcagcacctaaggggtcaggtggacaccctgctgaggaacttcctgccttgctaccgtgggcagctggcagcgtctaagctgccccgagtccgtgagcaccgaggacccctgacccagcttcggggccacccaccccggtggcagccgatcttctgtgttctgcgtggggacggccgcctagagtggttcagccacaaggaggaatatgaaaacgggggccactgccttggctcaacagccctgacaggatacacgctcctgacttcccagcgagaatatctccgccttttggatgctctctgccctgaatccttgggagaccatactcaggaagagcctgactccctcttggaagtgcctgtgagcttcccgctgttcctgcagcaccccttccgccggcacctctgcttctctgcagccaccagggaggcacagcatgcctggaggctggccctgcagggtggcatccggcttcagggcatagtcctgcagcgaagccaggcccctgctgcccgggccttcctggacgccgtccgactctaccggcagcaccaaggccactttggcgacgacgacgtgaccctaggctcagacgccgaggtgctgaccgcggtgctgatgcgggagcaacttcccgcgctgcgagcccagacccttcctggcctgcggggggcaggccgcgcccgcgcctgggcctggaccgagcttctagacgccgttcacgcagctgtcctggccggggcctccgccgggctctgcgccttccagcccgaaaaggacgagctgcttgcgtcgctggagaagacgatccgcccggacgtggaccagctgctgcggcagcgggcgcgtgtggcggggcggctgaggacggatatcaggggaccgctcgagtcgtgcctgcgccgggaggtggacccgcagctgccccgggtcgtgcagaccctgctgcgcaccgtggaagcctcgctcgaggcggtgcggaccctcctggctcaaggcatggaccgactgtcccaccgcctgcgccagagcccctcaggcacgcggctgcgcagggaggtttactcatttggggagatgccgtgggacttggcgctgatgcagacatgctaccgtgaggccgagcggagccgggggcgcttggggcagctggcagcaccgtttggctttctggggatgcagagcctcgtgtttggggcccaagatcttgcacagcagctcatggctgacgccgtggccaccttcctgcagctggctgaccagtgtctgacgacggccctcaactgtgaccaggctgcccagaggctggagagagtcagggggcgcgtgctgaagaaattcaaatcggacagcgggttggcgcagaggaggttcatccgaggctggggtctctgcatctttttaccttttgtgctgagccaactcgagccaggctgcaaaaaggagctgcctgagttcgagggggatgtccttgccgtgggcagccaggctctgaccactgagggcatctatgaggacgtcatccgggggtgcttgctgcagaggattgaccaagatgaggaaactgaggctgagcgggaaggaggggcttgtcccaggcagccagactctggtgcccagatccagccactctgcccaccgccttctccaggaacattccggagctgaatcttcacccacatctatcttgtttctattggataaatgtctacaagtggaatttctgggcc

SEQ ID NO: 131945 - DNA, 2180 bp, Homo sapiens
  Payload ID: 5761
  Gene Symbol: FAM129C
  Gene Name: family with sequence similarity 129, member C
  ENST ID: ENST00000601861
  CDS Start-End: 104-2104
actgtgaccaagcctctcacccgccatccaggtgcccctgagccgaggaacgcaggcggtggtcgtggggaagggaagaggagccccgggagacgacagcagcatgggtgggcggccttcgagccctctggacaagcagcagcggcagcacctaaggggtcaggtggacaccctgctgaggaacttcctgccttgctaccgtgggcagctggcagcgtctgtcctgcggcagatctctcgagagctgggccctcaggagccgaccggaagccagttgctacgcagcaaaaagctgccccgagtccgtgagcaccgaggacccctgacccagcttcggggccacccaccccggtggcagccgatcttctgtgttctgcgtggggacggccgcctagagtggttcagccacaaggaggaatatgaaaacgggggccactgccttggctcaacagccctgacaggatacacgctcctgacttcccagcgagaatatctccgccttttggatgctctctgccctgaatccttgggagaccatactcaggaagagcctgactccctcttggaagtgcctgtgagcttcccgctgttcctgcagcaccccttccgccggcacctctgcttctctgcagccaccagggaggcacagcatgcctggaggctggccctgcagggtggcatccggcttcagggcatagtcctgcagcgaagccaggcccctgctgcccgggccttcctggacgccgtccgactctaccggcagcaccaaggccactttggcgacgacgacgtgaccctaggctcagacgccgaggtgctgaccgcggtgctgatgcgggagcaacttcccgcgctgcgagcccagacccttcctggcctgcggggggcaggccgcgcccgcgcctgggcctggaccgagcttctagacgccgttcacgcagctgtcctggccggggcctccgccgggctctgcgccttccagcccgaaaaggacgagctgcttgcgtcgctggagaagacgatccgcccggacgtggaccagctgctgcggcagcgggcgcgtgtggcggggcggctgaggacggatatcaggggaccgctcgagtcgtgcctgcgccgggaggtggacccgcagctgccccgggtcgtgcagaccctgctgcgcaccgtggaagcctcgctcgaggcggtgcggaccctcctggctcaaggcatggaccgactgtcccaccgcctgcgccagagcccctcaggcacgcggctgcgcagggaggtttactcatttggggagatgccgtgggacttggcgctgatgcagacatgctaccgtgaggccgagcggagccgggggcgcttggggcagctggcagcaccgtttggctttctggggatgcagagcctcgtgtttggggcccaagatcttgcacagcagctcatggctgacgccgtggccaccttcctgcagctggctgaccagtgtctgacgacggccctcaactgtgaccaggctgcccagaggctggagagagtcagggggcgcgtgctgaagaaattcaaatcggacagcgggttggcgcagaggaggttcatccgaggctggggtctctgcatctttttaccttttgtgctgagccaactcgagccaggctgcaaaaaggagctgcctgagttcgagggggatgtccttgccgtgggcagccaggctctgaccactgagggcatctatgaggacgtcatccgggggtgcttgctgcagaggattgaccaagaattgaaaaagacccttggtgccaatgatgtatcctgcactctggacggctgcttggaggtcccatgggaacaggagggagcagctccaaatcttaacttggtgtcaagtttcctggctgggagacaagcttttaccgacttcctctgcttgccagcaaagtcatctgctaactggatattggcagcttctctgctgtcttgcagctgcttccggagtgggttccacagggattcccgtgtgttcttggttcagcttgcagagggactttcacactccctggagaccgtttcctcccattctgtctggagttttcggcctaccccaagacaatgagatattcctgacctttccacctatttccctccaaccccaccttccgaaatacatttgctcaatacatttgcacttc

SEQ ID NO: 131946 - DNA, 5858 bp, Homo sapiens
  Payload ID: 5762
  Gene Symbol: FAM13A
  Gene Name: family with sequence similarity 13, member A
  Uniprot ID: O94988
  ENST ID: ENST00000264344
  CDS Start-End: 209-3280
ccttccagccatgtgggttcagcggaaagagaagcaaaaccactcttcctaaaatgttagaagctgctcttcgcttaccttggggcctttgcattgggagctgtttttcacatcaaagaatatgtgctgaatggaattttagtattttgctgtcgttttaatattttcgtctggtcttcctcagttcttccagacgctttctgagagaatgggggcaggagctctagccatctgtcaaagtaaagcagcggttcggctgaaagaagacatgaaaaagatagtggcagtgccattaaatgaacagaaggattttacctatcagaagttatttggagtcagtctccaagaacttgaacggcaggggctcaccgagaatggcattccagcagtagtgtggaatatagtggaatatttgacgcagcatggacttacccaagaaggtctttttagggtgaatggtaacgtgaaggtggtggaacaacttcgactgaagttcgagagtggagtgcccgtggagctcgggaaggacggtgatgtctgctcagcagccagtctgttgaagctgtttctgagggagctgcctgacagtctgatcacctcagcgttgcagcctcgattcattcaactctttcaggatggcagaaatgatgttcaggagagtagcttaagagacttaataaaagagctgccagacacccactactgcctcctcaagtacctttgccagttcttgacaaaagtagccaagcatcatgtgcagaatcgcatgaatgttcacaatctcgccactgtatttgggccaaattgctttcatgtgccacctgggcttgaaggcatgaaggaacaggacctgtgcaacaagataatggctaaaattctagaaaattacaataccctgtttgaagtagagtatacagaaaatgatcatctgagatgtgaaaacctggctaggcttatcatagtaaaagaggtctattataagaactccctgcccatccttttaacaagaggcttagaaagagacatgccaaaaccacctccaaaaaccaagatcccaaaatccaggagtgagggatctattcaggcccacagagtactgcaaccagagctatctgatggcattcctcagctcagcttgcggctaagttatagaaaagcctgcttggaagacatgaattcagcagagggtgctattagtgccaagttggtacccagttcacaggaagatgaaagacctctgtcacctttctatttgagtgctcatgtaccccaagtcagcaatgtgtctgcaaccggagaactcttagaaagaaccatccgatcagctgtagaacaacatctttttgatgttaataactctggaggtcaaagttcagaggactcagaatctggaacactatcagcatcttctgccacatctgccagacagcgccgccgccagtccaaggagcaggatgaagttcgacatgggagagacaagggacttatcaacaaagaaaatactccttctgggttcaaccaccttgatgattgtattttgaatactcaggaagtcgaaaaggtacacaaaaatacttttggttgtgctggagaaaggagcaagcctaaacgtcagaaatccagtactaaactttctgagcttcatgacaatcaggacggtcttgtgaatatggaaagtctcaattccacacgatctcatgagagaactggacctgatgattttgaatggatgtctgatgaaaggaaaggaaatgaaaaagatggtggacacactcagcattttgagagccccacaatgaagatccaggagcatcccagcctatctgacaccaaacagcagagaaatcaagatgccggtgaccaggaggagagctttgtctccgaagtgccccagtcggacctgactgcattgtgtgatgaaaagaactgggaagagcctatccctgctttctcctcctggcagcgggagaacagtgactctgatgaagcccacctctcgccgcaggctgggcgcctgatccgtcagctgctggacgaagacagcgaccccatgctctctcctcggttctacgcttatgggcagagcaggcaatacctggatgacacagaagtgcctccttccccaccaaactcccattctttcatgaggcggcgaagctcctctctggggtcctatgatgatgagcaagaggacctgacacctgcccagctcacacgaaggattcagagccttaaaaagaagatccggaagtttgaagatagattcgaagaagagaagaagtacagaccttcccacagtgacaaagcagccaatccggaggttctgaaatggacaaatgaccttgccaaattccggagacaacttaaagaatcaaaactaaagatatctgaagaggacctaactcccaggatgcggcagcgaagcaacacactccccaagagttttggttcccaacttgagaaagaagatgagaagaagcaagagctggtggataaagcaataaagcccagtgttgaagccacattggaatctattcagaggaagctccaggagaagcgagcggaaagcagccgccctgaggacattaaggatatgaccaaagaccagattgctaatgagaaagtggctctgcagaaagctctgttatattatgaaagcattcatggacggccggtaacaaagaacgaacggcaggtgatgaagccactatacgacaggtaccggctggtcaaacagatcctctcccgagctaacaccatacccatcattggttccccctccagcaagcggagaagccctttgctgcagccaattatcgagggcgaaactgcttccttcttcaaggagataaaggaagaagaggaggggtcagaagacgatagcaatgtgaagccagacttcatggtcactctgaaaaccgatttcagtgcacgatgctttctggaccaattcgaagatgacgctgatggatttatttccccaatggatgataaaataccatcaaaatgcagccaggacacagggctttcaaatctccatgctgcctcaatacctgaactcctggaacacctccaggaaatgagagaagaaaagaaaaggattcgaaagaaacttcgggattttgaagacaactttttcagacagaatggaagaaatgtccagaaggaagaccgcactcctatggctgaagaatacagtgaatataagcacataaaggcgaaactgaggctcctggaggtgctcatcagcaagagagacactgattccaagtccatgtgaggggcatggccaagcacagggggctggcagctgcggtgagagtttactgtccccagagaaagtgcagctctggaaggcagccttggggctggccctgcaaagcatgcagcccttctgcctctagaccatttggcatcggctcctgtttccattgcctgccttagaaactggctggaagaagacaatgtgacctgacttaggcattttgtaattggaaagtcaagactgcagtatgtgcacatgcgcacgcgcatgcacgcacacacacacacagtagtggagctttcctaacactagcagagattaatcactacattagacaacactcatctacagagaatatacactgttcttccctggataactgagaaacaagagaccattctctgtctaactgtgataaaaacaagctcaggactttattctatagagcaaacttgctgtggagggccatgctctccttggacccagttaactgcaaacgtgcattggagccctatttgctgccgctgccattctagtgacctttccacagagctgcgccttcctcacgtgtgtgaaaggttttccccttcagccctcaggtagatggaagctgcatctgcccacgatggcagtgcagtcatcatcttcaggatgtttcttcaggacttcctcagctgacaaggaattttggtccctgcctaggaccgggtcatctgcagaggacagagagatggtaagcagctgtatgaatgctgattttaaaaccaggtcatgggagaagagcctggagattctttcctgaacactgactgcacttaccagtctgattttatcgtcaaacaccaagccaggctagcatgctcatggcaatctgtttggggctgttttgttgtggcactagccaaacataaaggggcttaagtcagcctgcatacagaggatcggggagagaaggggcctgtgttctcagcctcctgagtacttaccagagtttaatttttttaaaaaaaatctgcactaaaatccccaaactgacaggtaaatgtagccctcagagctcagcccaaggcagaatctaaatcacactattttcgagatcatgtataaaaagaaaaaaaagaagtcatgctgtgtggccaattataatttttttcaaagactttgtcacaaaactgtctatattagacattttggagggaccaggaaatgtaagacaccaaatcctccatctcttcagtgtgcctgatgtcacctcatgatttgctgttacttttttaactcctgcgccaaggacagtgggttctgtgtccacctttgtgctttgcgaggccgagcccaggcatctgctcgcctgccacggctgaccagagaaggtgcttcaggagctctgccttagacgacgtgttacagtatgaacacacagcagaggcaccctcgtatgttttgaaagttgccttctgaaagggcacagttttaaggaaaagaaaaagaatgtaaaactatactgacccgttttcagttttaaagggtcgtgagaaactggctggtccaatgggatttacagcaacattttccattgctgaagtgaggtagcagctctcttctgtcagctgaatgttaaggatggggaaaaagaatgcctttaagtttgctcttaatcgtatggaagcttgagctatgtgttggaagtgccctggttttaatccatacacaaagacggtacataatcctacaggtttaaatgtacataaaaatatagtttggaattctttgctctactgtttacattgcagattgctataatttcaaggagtgagattataaataaaatgatgcactttaggatgtttcctatttttgaaatctgaacatgaatcattcacatgaccaaaaattgtgtttttttaaaaatacatgtctagtctgtcctttaatagctctcttaaataagctatgatattaatcagatcattaccagttagcttttaaagcacatttgtttaagactatgtttttggaaaaatacgctacagaatttttttttaagctacaaataaatgagatgctactaattgttttggaatctgttgtttctgccaaaggtaaattaactaaagatttattcaggaatccccatttgaatttgtatgattcaataaaagaaaacaccaagtaagttatataaaataaattgtgtatgagatgttgtgttttcctttgtaatttccactaactaactaactaacttatattcttcatggaatggagcccagaagaaatgagaggaagcccttttcacactagatcttatttgaagaaatgtttgttagtcagtcagtcagtggtttctggctctgccgagggagatgtgttccccagcaaccatttctgcagcccagaatctcaaggcactagaggcggtgtcttaattaattggcttcacaaagacaaaatgctctggactgggatttttcctttgctgtgttgggaatatgtgtttattaattagcacatgccaacaaaataaatgtcaagagttatttcataagtgtaagtaaacttaagaattaaagagtgcagacttataattttc

SEQ ID NO: 131947 - DNA, 4945 bp, Homo sapiens
  Payload ID: 5762
  Gene Symbol: FAM13A
  Gene Name: family with sequence similarity 13, member A
  Uniprot ID: O94988
  ENST ID: ENST00000395002
  CDS Start-End: 358-2367
attgaggagcagaaggagtagggtgcgggggaggaggaggagcgcctttagtgctgcagcagctgctgctctgattggcccggtggttcagctgcttccctggaacaaaaggtcaaagtggactgcagtgtaaatgtagagaagcagccgataaaatagcattgcctgaagaagtttggaggctgagagcagcagtagactggccaactgcagagcaagttgtttctccagccgtgcggtgcagcctcatgcccccaacccagcttagccactgtaagaagacgttcactgtacagacgaccaaacttgccgtggaagagacagttgtgagattcccttgcaaatttacatacgagaatggcttgtgaaatcatgcctctgcaaagttcacaggaagatgaaagacctctgtcacctttctatttgagtgctcatgtaccccaagtcagcaatgtgtctgcaaccggagaactcttagaaagaaccatccgatcagctgtagaacaacatctttttgatgttaataactctggaggtcaaagttcagaggactcagaatctggaacactatcagcatcttctgccacatctgccagacagcgccgccgccagtccaaggagcaggatgaagttcgacatgggagagacaagggacttatcaacaaagaaaatactccttctgggttcaaccaccttgatgattgtattttgaatactcaggaagtcgaaaaggtacacaaaaatacttttggttgtgctggagaaaggagcaagcctaaacgtcagaaatccagtactaaactttctgagcttcatgacaatcaggacggtcttgtgaatatggaaagtctcaattccacacgatctcatgagagaactggacctgatgattttgaatggatgtctgatgaaaggaaaggaaatgaaaaagatggtggacacactcagcattttgagagccccacaatgaagatccaggagcatcccagcctatctgacaccaaacagcagagaaatcaagatgccggtgaccaggaggagagctttgtctccgaagtgccccagtcggacctgactgcattgtgtgatgaaaagaactgggaagagcctatccctgctttctcctcctggcagcgggagaacagtgactctgatgaagcccacctctcgccgcaggctgggcgcctgatccgtcagctgctggacgaagacagcgaccccatgctctctcctcggttctacgcttatgggcagagcaggcaatacctggatgacacagaagtgcctccttccccaccaaactcccattctttcatgaggcggcgaagctcctctctggggtcctatgatgatgagcaagaggacctgacacctgcccagctcacacgaaggattcagagccttaaaaagaagatccggaagtttgaagatagattcgaagaagagaagaagtacagaccttcccacagtgacaaagcagccaatccggaggttctgaaatggacaaatgaccttgccaaattccggagacaacttaaagaatcaaaactaaagatatctgaagaggacctaactcccaggatgcggcagcgaagcaacacactccccaagagttttggttcccaacttgagaaagaagatgagaagaagcaagagctggtggataaagcaataaagcccagtgttgaagccacattggaatctattcagaggaagctccaggagaagcgagcggaaagcagccgccctgaggacattaaggatatgaccaaagaccagattgctaatgagaaagtggctctgcagaaagctctgttatattatgaaagcattcatggacggccggtaacaaagaacgaacggcaggtgatgaagccactatacgacaggtaccggctggtcaaacagatcctctcccgagctaacaccatacccatcattgaagaagaggaggggtcagaagacgatagcaatgtgaagccagacttcatggtcactctgaaaaccgatttcagtgcacgatgctttctggaccaattcgaagatgacgctgatggatttatttccccaatggatgataaaataccatcaaaatgcagccaggacacagggctttcaaatctccatgctgcctcaatacctgaactcctggaacacctccaggaaatgagagaagaaaagaaaaggattcgaaagaaacttcgggattttgaagacaactttttcagacagaatggaagaaatgtccagaaggaagaccgcactcctatggctgaagaatacagtgaatataagcacataaaggcgaaactgaggctcctggaggtgctcatcagcaagagagacactgattccaagtccatgtgaggggcatggccaagcacagggggctggcagctgcggtgagagtttactgtccccagagaaagtgcagctctggaaggcagccttggggctggccctgcaaagcatgcagcccttctgcctctagaccatttggcatcggctcctgtttccattgcctgccttagaaactggctggaagaagacaatgtgacctgacttaggcattttgtaattggaaagtcaagactgcagtatgtgcacatgcgcacgcgcatgcacgcacacacacacacagtagtggagctttcctaacactagcagagattaatcactacattagacaacactcatctacagagaatatacactgttcttccctggataactgagaaacaagagaccattctctgtctaactgtgataaaaacaagctcaggactttattctatagagcaaacttgctgtggagggccatgctctccttggacccagttaactgcaaacgtgcattggagccctatttgctgccgctgccattctagtgacctttccacagagctgcgccttcctcacgtgtgtgaaaggttttccccttcagccctcaggtagatggaagctgcatctgcccacgatggcagtgcagtcatcatcttcaggatgtttcttcaggacttcctcagctgacaaggaattttggtccctgcctaggaccgggtcatctgcagaggacagagagatggtaagcagctgtatgaatgctgattttaaaaccaggtcatgggagaagagcctggagattctttcctgaacactgactgcacttaccagtctgattttatcgtcaaacaccaagccaggctagcatgctcatggcaatctgtttggggctgttttgttgtggcactagccaaacataaaggggcttaagtcagcctgcatacagaggatcggggagagaaggggcctgtgttctcagcctcctgagtacttaccagagtttaatttttttaaaaaaaatctgcactaaaatccccaaactgacaggtaaatgtagccctcagagctcagcccaaggcagaatctaaatcacactattttcgagatcatgtataaaaagaaaaaaaagaagtcatgctgtgtggccaattataatttttttcaaagactttgtcacaaaactgtctatattagacattttggagggaccaggaaatgtaagacaccaaatcctccatctcttcagtgtgcctgatgtcacctcatgatttgctgttacttttttaactcctgcgccaaggacagtgggttctgtgtccacctttgtgctttgcgaggccgagcccaggcatctgctcgcctgccacggctgaccagagaaggtgcttcaggagctctgccttagacgacgtgttacagtatgaacacacagcagaggcaccctcgtatgttttgaaagttgccttctgaaagggcacagttttaaggaaaagaaaaagaatgtaaaactatactgacccgttttcagttttaaagggtcgtgagaaactggctggtccaatgggatttacagcaacattttccattgctgaagtgaggtagcagctctcttctgtcagctgaatgttaaggatggggaaaaagaatgcctttaagtttgctcttaatcgtatggaagcttgagctatgtgttggaagtgccctggttttaatccatacacaaagacggtacataatcctacaggtttaaatgtacataaaaatatagtttggaattctttgctctactgtttacattgcagattgctataatttcaaggagtgagattataaataaaatgatgcactttaggatgtttcctatttttgaaatctgaacatgaatcattcacatgaccaaaaattgtgtttttttaaaaatacatgtctagtctgtcctttaatagctctcttaaataagctatgatattaatcagatcattaccagttagcttttaaagcacatttgtttaagactatgtttttggaaaaatacgctacagaatttttttttaagctacaaataaatgagatgctactaattgttttggaatctgttgtttctgccaaaggtaaattaactaaagatttattcaggaatccccatttgaatttgtatgattcaataaaagaaaacaccaagtaagttatataaaataaattgtgtatgagatgttgtgttttcctttgtaatttccactaactaactaactaacttatattcttcatggaatggagcccagaagaaatgagaggaagcccttttcacactagatcttatttgaagaaatgtttgttagtcagtcagtcagtggtttctggctctgccgagggagatgtgttccccagcaaccatttctgcagcccagaatctcaaggcactagaggcggtgtcttaattaattggcttcacaaagacaaaatgctctggactgggatttttcctttgctgtgttgggaatatgtgtttattaattagcacatgccaacaaaataaatgtcaagagttatttcataagtgtaagtaaacttaagaattaaagagtgcagacttataattttc

SEQ ID NO: 131948 - DNA, 581 bp, Homo sapiens
  Payload ID: 5762
  Gene Symbol: FAM13A
  Gene Name: family with sequence similarity 13, member A
  ENST ID: ENST00000506913
  CDS Start-End: 195-581
agtgtattgctccctctcttagctgcacacttcatttgtggctttaggtttttcattacttttcagtccttttaaccattatatctgagcaacatgtgagagatgttagagattttgatttgagttgaagtaaaaataagaccacaactattcatcttcaaacacattttaattcaggtgtttctgttgtaaccatgcaacctcctgtggtaaatatgactgactgctcttttttcttacgctcctttaagcaaagtaaagcagcggttcggctgaaagaagacatgaaaaagatagtggcagtgccattaaatgaacagaaggattttacctatcagaagttatttggagtcagtctccaagaacttgaacggcaggggctcaccgagaatggcattccagcagtagtgtggaatatagtggaatatttgacgcagcatggacttacccaagaaggtctttttagggtgaatggtaacgtgaaggtggtggaacaacttcgactgaagttcgagagtggagtgcccgtggagctcgggaaggacggtgatgtctgctcagcagccagtctgttgaagctg

SEQ ID NO: 131949 - DNA, 3169 bp, Homo sapiens
  Payload ID: 5762
  Gene Symbol: FAM13A
  Gene Name: family with sequence similarity 13, member A
  Uniprot ID: O94988
  ENST ID: ENST00000508369
  CDS Start-End: 198-2291
attgcctgaagaagtttggaggctgagagcagcagtagactggccaactgcagagcaagttgtttctccagccgtgcggtgcagcctcatgcccccaacccagcttagccactgtaagaagacgttcactgtacagacgaccaaacttgccgtggaagagacagttgtgagattcccttgcaaatttacatacgagaatggcttgtgaaatcatgcctctgcaaagttcacaggaagatgaaagacctctgtcacctttctatttgagtgctcatgtaccccaagtcagcaatgtgtctgcaaccggagaactcttagaaagaaccatccgatcagctgtagaacaacatctttttgatgttaataactctggaggtcaaagttcagaggactcagaatctggaacactatcagcatcttctgccacatctgccagacagcgccgccgccagtccaaggagcaggatgaagttcgacatgggagagacaagggacttatcaacaaagaaaatactccttctgggttcaaccaccttgatgattgtattttgaatactcaggaagtcgaaaaggtacacaaaaatacttttggttgtgctggagaaaggagcaagcctaaacgtcagaaatccagtactaaactttctgagcttcatgacaatcaggacggtcttgtgaatatggaaagtctcaattccacacgatctcatgagagaactggacctgatgattttgaatggatgtctgatgaaaggaaaggaaatgaaaaagatggtggacacactcagcattttgagagccccacaatgaagatccaggagcatcccagcctatctgacaccaaacagcagagaaatcaagatgccggtgaccaggaggagagctttgtctccgaagtgccccagtcggacctgactgcattgtgtgatgaaaagaactgggaagagcctatccctgctttctcctcctggcagcgggagaacagtgactctgatgaagcccacctctcgccgcaggctgggcgcctgatccgtcagctgctggacgaagacagcgaccccatgctctctcctcggttctacgcttatgggcagagcaggcaatacctggatgacacagaagtgcctccttccccaccaaactcccattctttcatgaggcggcgaagctcctctctggggtcctatgatgatgagcaagaggacctgacacctgcccagctcacacgaaggattcagagccttaaaaagaagatccggaagtttgaagatagattcgaagaagagaagaagtacagaccttcccacagtgacaaagcagccaatccggaggttctgaaatggacaaatgaccttgccaaattccggagacaacttaaagaatcaaaactaaagatatctgaagaggacctaactcccaggatgcggcagcgaagcaacacactccccaagagttttggttcccaacttgagaaagaagatgagaagaagcaagagctggtggataaagcaataaagcccagtgttgaagccacattggaatctattcagaggaagctccaggagaagcgagcggaaagcagccgccctgaggacattaaggatatgaccaaagaccagattgctaatgagaaagtggctctgcagaaagctctgttatattatgaaagcattcatggacggccggtaacaaagaacgaacggcaggtgatgaagccactatacgacaggtaccggctggtcaaacagatcctctcccgagctaacaccatacccatcattggttccccctccagcaagcggagaagccctttgctgcagccaattatcgagggcgaaactgcttccttcttcaaggagataaaggaagaagaggaggggtcagaagacgatagcaatgtgaagccagacttcatggtcactctgaaaaccgatttcagtgcacgatgctttctggaccaattcgaagatgacgctgatggatttatttccccaatggatgataaaataccatcaaaatgcagccaggacacagggctttcaaatctccatgctgcctcaatacctgaactcctggaacacctccaggaaatgagagaagaaaagaaaaggattcgaaagaaacttcgggattttgaagacaactttttcagacagaatggaagaaatgtccagaaggaagaccgcactcctatggctgaagaatacagtgaatataagcacataaaggcgaaactgaggctcctggaggtgctcatcagcaagagagacactgattccaagtccatgtgaggggcatggccaagcacagggggctggcagctgcggtgagagtttactgtccccagagaaagtgcagctctggaaggcagccttggggctggccctgcaaagcatgcagcccttctgcctctagaccatttggcatcggctcctgtttccattgcctgccttagaaactggctggaagaagacaatgtgacctgacttaggcattttgtaattggaaagtcaagactgcagtatgtgcacatgcgcacgcgcatgcacgcacacacacacacagtagtggagctttcctaacactagcagagattaatcactacattagacaacactcatctacagagaatatacactgttcttccctggataactgagaaacaagagaccattctctgtctaactgtgataaaaacaagctcaggactttattctatagagcaaacttgctgtggagggccatgctctccttggacccagttaactgcaaacgtgcattggagccctatttgctgccgctgccattctagtgacctttccacagagctgcgccttcctcacgtgtgtgaaaggttttccccttcagccctcaggtagatggaagctgcatctgcccacgatggcagtgcagtcatcatcttcaggatgtttcttcaggacttcctcagctgacaaggaattttggtccctgcctaggaccgggtcatctgcagaggacagagagatggtaagcagctgtatgaatgctgattttaaaaccaggtcatgggagaagagcctggagattctttcctgaacactgactgcacttaccagtctgattttatcgtcaaacaccaagccaggctagcatgctcatggcaatctgtttggggctgttttgttgt

SEQ ID NO: 131950 - DNA, 3579 bp, Homo sapiens
  Payload ID: 5762
  Gene Symbol: FAM13A
  Gene Name: family with sequence similarity 13, member A
  ENST ID: ENST00000511976
  CDS Start-End: 646-2475
gtgggttcagcggaaagagaagcaaaaccactcttcctaaaatgttagaagctgctcttcgcttaccttggggcctttgcattgggagctgtttttcacatcaaagaatatgtgctgaatggaattttagtattttgctgtcgttttaatattttcgtctggtcttcctcagttcttccagacgctttctgagagaatgggggcaggagctctagccatctgtcaaagtaaagcagcggttcggctgaaagaagacatgaaaaagatagtggcagtgccattaaatgaacagaaggattttacctatcagaagttatttggagtcagtctccaagaacttgaacggcaggggctcaccgagaatggcattccagcagtagtgtggaatatagtggaatatttgacgcagcatggacttacccaagaaggtctttttagggtgaatggtaacgtgaaggtggtggaacaacttcgactgaagttcgagagtggagtgcccgtggagctcgggaaggacggtgatgtctgctcagcagccagtctgttgaagctgtttctgagggagctgcctgacagtctgatcacctcagcgttgcagcctcgattcattcaactctttcaggtgtgccacctgggcttgaaggcatgaaggaacaggacctgtgcaacaagataatggctaaaattctagaaaattacaataccctgtttgaagtagagtatacagaaaatgatcatctgagatgtgaaaacctggctaggcttatcatagtaaaagaggtctattataagaactccctgcccatccttttaacaagaggcttagaaagagacatgccaaaaccacctccaaaaaccaagaatatggaaagtctcaattccacacgatctcatgagagaactggacctgatgattttgaatggatgtctgatgaaaggaaaggaaatgaaaaagatggtggacacactcagcattttgagagccccacaatgaagatccaggagcatcccagcctatctgacaccaaacagcagagaaatcaagatgccggtgaccaggaggagagctttgtctccgaagtgccccagtcggacctgactgcattgtgtgatgaaaagaactgggaagagcctatccctgctttctcctcctggcagcgggagaacagtgactctgatgaagcccacctctcgccgcaggctgggcgcctgatccgtcagctgctggacgaagacagcgaccccatgctctctcctcggttctacgcttatgggcagagcaggcaatacctggatgacacagaagtgcctccttccccaccaaactcccattctttcatgaggcggcgaagctcctctctggggtcctatgatgatgagcaagaggacctgacacctgcccagctcacacgaaggattcagagccttaaaaagaagatccggaagtttgaagatagattcgaagaagagaagaagtacagaccttcccacagtgacaaagcagccaatccggaggttctgaaatggacaaatgaccttgccaaattccggagacaacttaaagaatcaaaactaaagatatctgaagaggacctaactcccaggatgcggcagcgaagcaacacactccccaagagttttggttcccaacttgagaaagaagatgagaagaagcaagagctggtggataaagcaataaagcccagtgttgaagccacattggaatctattcagaggaagctccaggagaagcgagcggaaagcagccgccctgaggacattaaggatatgaccaaagaccagattgctaatgagaaagtggctctgcagaaagctctgttatattatgaaagcattcatggacggccggtaacaaagaacgaacggcaggtgatgaagccactatacgacaggtaccggctggtcaaacagatcctctcccgagctaacaccatacccatcattggttccccctccagcaagcggagaagccctttgctgcagccaattatcgagggcgaaactgcttccttcttcaaggagataaaggaagaagaggaggggtcagaagacgatagcaatgtgaagccagacttcatggtcactctgaaaaccgatttcagtgcacgatgctttctggaccaattcgaagatgacgctgatggatttatttccccaatggatgataaaataccatcaaaatgcagccaggacacagggctttcaaatctccatgctgcctcaatacctgaactcctggaacacctccaggaaatgagagaagaaaagaaaaggattcgaaagaaacttcgggattttgaagacaactttttcagacagaatggaagaaatgtccagaaggaagaccgcactcctatggctgaagaatacagtgaatataagcacataaaggcgaaactgaggctcctggaggtgctcatcagcaagagagacactgattccaagtccatgtgaggggcatggccaagcacagggggctggcagctgcggtgagagtttactgtccccagagaaagtgcagctctggaaggcagccttggggctggccctgcaaagcatgcagcccttctgcctctagaccatttggcatcggctcctgtttccattgcctgccttagaaactggctggaagaagacaatgtgacctgacttaggcattttgtaattggaaagtcaagactgcagtatgtgcacatgcgcacgcgcatgcacgcacacacacacacagtagtggagctttcctaacactagcagagattaatcactacattagacaacactcatctacagagaatatacactgttcttccctggataactgagaaacaagagaccattctctgtctaactgtgataaaaacaagctcaggactttattctatagagcaaacttgctgtggagggccatgctctccttggacccagttaactgcaaacgtgcattggagccctatttgctgccgctgccattctagtgacctttccacagagctgcgccttcctcacgtgtgtgaaaggttttccccttcagccctcaggtagatggaagctgcatctgcccacgatggcagtgcagtcatcatcttcaggatgtttcttcaggacttcctcagctgacaaggaattttggtccctgcctaggaccgggtcatctgcagaggacagagagatggtaagcagctgtatgaatgctgattttaaaaccaggtcatgggagaagagcctggagattctttcctgaacactgactgcacttaccagtctgattttatcgtcaaacaccaagccaggctagcatgctcatggcaatctgtttggggctgttttgttgtggcactagccaaacataaaggggcttaagtcagcctgcatacagaggatcggggagagaaggggcctgtgttctcagcctcctgagtacttaccagagtttaatttttttaaaaaaaatctgcactaaaatccccaaactgacaggtaaatgtagccctcagagctcagcccaaggcagaatctaaatcacactattttcgagatcatgtataaaaagaaaaaaaa

SEQ ID NO: 131951 - DNA, 2206 bp, Homo sapiens
  Payload ID: 5762
  Gene Symbol: FAM13A
  Gene Name: family with sequence similarity 13, member A
  ENST ID: ENST00000515600
  CDS Start-End: 253-861
ctattaatgaaagccaccaggtgactggcagttttcggagtcaaagaagcctgtgtgtaggatctagggagtcaggtttgaaaaaaagatgtcagcgacttaagacccgtgtcacgtgactccctctacttgccagcactgaggctgtggatcaaatttcaactccaggcagtccttccagccatgtgggttcagcggaaagagaagcaaaaccactcttcctaaaatttcttccagacgctttctgagagaatgggggcaggagctctagccatctgtcaaagtaaagcagcggttcggctgaaagaagacatgaaaaagatagtggcagtgccattaaatgaacagaaggattttacctatcagaagttatttggagtcagtctccaagaacttgaacggcaggggctcaccgagaatggcattccagcagtagtgtggaatatagtggaatatttgacgcagcatggacttacccaagaaggtctttttagggtgaatggtaacgtgaaggtggtggaacaacttcgactgaagttcgagagtggagtgcccgtggagctcgggaaggacggtgatgtctgctcagcagccagtctgttgaagctgtttctgagggagctgcctgacagtctgatcacctcagcgttgcagcctcgattcattcaactctttcaggatggcagaaatgatgttcaggagagtagcttaagagacttaataaaagagctgccagacacccactactgcctcctcaagtacctttgccagttcttgacaaaagtagccaagcatcatgtgcagaatcgcatgaatgttcacaatctcgccactgtatttgggccaaattgctttcagtaagttagtggagttttactgttaatatcatcatgtccccctttgtgtttactactgtctgaaattactgggatgtagaagcatatttcagtctgaaaattcagccagcttattttggagaagttgtatcttgttcttgggcatgttagccttgtttttcatcccaatttgaagaaggtagctatgccctttttacaaaactataatttgcaataaatcaaatagccttatttaaaaatctggaaataagttatattttaattaaaaggggcatttaaaaaatctgtaatcagaaatgttgattagcagaaagagaaggagtatgacatagtgaataattttttaaatagtaataaagttcaaattattgccaatagatggaaaattatgaacagactatgccagtatcagaaaaatataacctcagcttcatttactggaaataaaccagtctattttagtagattctttgttgctagccacaggaacttttgtaaagcttaatattttattctccttcttattccataaagctctttaatttttgatacgtgaaatgtgatcctgcaatccagggactttgcttttaactctcctattaatcacctctgatatcaaatacattcttctagttaagagagagagaacatttacactccaaaagctctcagaaactcagcaactttttttttaatagcatatctacttctccacttcattaatatacaggcttattcagctgcccagaactagtaatattacagtcttcagaatgactgtctaaatttagattctggcttagatcctagtgactacagggttccaggtcattcacagcctaatttgggtagaagttctactgtaataactatcctgattgtaattctaaaggtgttaacttttaagtaatggcatttcataggatatgttagggtctcgtgaataaatatctcagatgcaggatccactaattttttgtcttattcagaagctccgtgatagtaaaaagtctatattttttcttatatttgttctgcccagtaaacctttgtttggtgacttacatgtgagaaaggtgtaagtagaaaactgttgaataattctgaaacctagattctagaacaggtaaaaatgaatttgtaaatagaatgcttatttagtaagcattaaacacagatccatacctcattactaacttagacattgggcttgatctggaatttctggtaatctgctccaggtagtcagtcagaatatcagtaagtaatgagtatttattataggttctaattagtatggttttacagtttttctattgttgtaaaatatacataaaataaaatatacc

SEQ ID NO: 131952 - DNA, 2590 bp, Homo sapiens
  Payload ID: 5762
  Gene Symbol: FAM13A
  Gene Name: family with sequence similarity 13, member A
  Uniprot ID: O94988
  ENST ID: ENST00000513837
  CDS Start-End: 227-2236
aaatgtagagaagcagccgataaaatagcattgcctgaagaagtttggaggctgagagcagcagtagactggccaactgcagagcaagttgtttctccagccgtgcggtgcagcctcatgcccccaacccagcttagccactgtaagaagacgttcactgtacagacgaccaaacttgccgtggaagagacagttgtgagattcccttgcaaatttacatacgagaatggcttgtgaaatcatgcctctgcaaagactcttagaaagaaccatccgatcagctgtagaacaacatctttttgatgttaataactctggaggtcaaagttcagaggactcagaatctggaacactatcagcatcttctgccacatctgccagacagcgccgccgccagtccaaggagcaggatgaagttcgacatgggagagacaagggacttatcaacaaagaaaatactccttctgggttcaaccaccttgatgattgtattttgaatactcaggaagtcgaaaaggtacacaaaaatacttttggttgtgctggagaaaggagcaagcctaaacgtcagaaatccagtactaaactttctgagcttcatgacaatcaggacggtcttgtgaatatggaaagtctcaattccacacgatctcatgagagaactggacctgatgattttgaatggatgtctgatgaaaggaaaggaaatgaaaaagatggtggacacactcagcattttgagagccccacaatgaagatccaggagcatcccagcctatctgacaccaaacagcagagaaatcaagatgccggtgaccaggaggagagctttgtctccgaagtgccccagtcggacctgactgcattgtgtgatgaaaagaactgggaagagcctatccctgctttctcctcctggcagcgggagaacagtgactctgatgaagcccacctctcgccgcaggctgggcgcctgatccgtcagctgctggacgaagacagcgaccccatgctctctcctcggttctacgcttatgggcagagcaggcaatacctggatgacacagaagtgcctccttccccaccaaactcccattctttcatgaggcggcgaagctcctctctggggtcctatgatgatgagcaagaggacctgacacctgcccagctcacacgaaggattcagagccttaaaaagaagatccggaagtttgaagatagattcgaagaagagaagaagtacagaccttcccacagtgacaaagcagccaatccggaggttctgaaatggacaaatgaccttgccaaattccggagacaacttaaagaatcaaaactaaagatatctgaagaggacctaactcccaggatgcggcagcgaagcaacacactccccaagagttttggttcccaacttgagaaagaagatgagaagaagcaagagctggtggataaagcaataaagcccagtgttgaagccacattggaatctattcagaggaagctccaggagaagcgagcggaaagcagccgccctgaggacattaaggatatgaccaaagaccagattgctaatgagaaagtggctctgcagaaagctctgttatattatgaaagcattcatggacggccggtaacaaagaacgaacggcaggtgatgaagccactatacgacaggtaccggctggtcaaacagatcctctcccgagctaacaccatacccatcattggttccccctccagcaagcggagaagccctttgctgcagccaattatcgagggcgaaactgcttccttcttcaaggagataaaggaagaagaggaggggtcagaagacgatagcaatgtgaagccagacttcatggtcactctgaaaaccgatttcagtgcacgatgctttctggaccaattcgaagatgacgctgatggatttatttccccaatggatgataaaataccatcaaaatgcagccaggacacagggctttcaaatctccatgctgcctcaatacctgaactcctggaacacctccaggaaatgagagaagaaaagaaaaggattcgaaagaaacttcgggattttgaagacaactttttcagacagaatggaagaaatgtccagaaggaagaccgcactcctatggctgaagaatacagtgaatataagcacataaaggcgaaactgaggctcctggaggtgctcatcagcaagagagacactgattccaagtccatgtgaggggcatggccaagcacagggggctggcagctgcggtgagagtttactgtccccagagaaagtgcagctctggaaggcagccttggggctggccctgcaaagcatgcagcccttctgcctctagaccatttggcatcggctcctgtttccattgcctgccttagaaactggctggaagaagacaatgtgacctgacttaggcattttgtaattggaaagtcaagactgcagtatgtgcacatgcgcacgcgcatgcacgcacacacacacacagtagtggagctttcctaacactagcagagattaatcactacattagacaacactcatctacagagaatatacactgttctt

SEQ ID NO: 131953 - DNA, 1511 bp, Homo sapiens
  Payload ID: 5762
  Gene Symbol: FAM13A
  Gene Name: family with sequence similarity 13, member A
  ENST ID: ENST00000512339
  CDS Start-End: 187-639
cggaaagagaagcaaaaccactcttcctaaaatgttagaagctgctcttcgcttaccttggggcctttgcattgggagctgtttttcacatcaaagaatatgtgctgaatggaattttagtattttgctgtcgttttaatattttcgtctggtcttcctcagttcttccagacgctttctgagagaatgggggcaggagctctagccatctgtcaaagtaaagcagcggttcggctgaaagaagacatgaaaaagatagtggcagtgccattaaatgaacagaaggattttacctatcagaagttatttggagtcagtctccaagaacttgaacggcaggggctcaccgagaatggcattccagcagtagtgtggaatatagtggaatatttgacgcagcatggacttacccaagaaggtctttttagggtgaatggtaacgtgaaggtggtggaacaacttcgactgaagttcgagagtggagtgcccgtggagctcgggaaggacggtgatgtctgctcagcagccagtctgttgaagctgtttctgagggagctgcctgacagtctgatcacctcagcgttgcagcctcgattcattcaactctttcaggtgtgccacctgggcttgaaggcatgaaggaacaggacctgtgcaacaagataatggctaaaattctagaaaattacaataccctgtttgaagtagagtatacagaaaatgatcatctgagatgtgaaaacctggctaggcttatcatagtaaaagaggtctattataagaactccctgcccatccttttaacaagaggcttagaaagagacatgccaaaaccacctccaaaaaccaagttgactcacaagcacattacttttctgggaagaaacttttaagtggagaaaccttctactcctccacaatgaaaagaagctgtccagtaaacgaaatccctcctgcttcatgtccacttagcatggcagataattcgtactctacactctcctgtggaacagagagccttacagcttactgttgtatcatcacagttctatgatggcaatgtataaaaattaagattgaggcatgatattttaatgtcttttttattttcagtcacattaatttatcagggttaattagtgcctggtatcacatattttttttttttttggtgatgggttccttattcaatttttaaagattagaccatcttaaaatatttttagtgttgactgtgacaatttgttttttggctttcaaaacaaattattgtgtgttttaagtatgatgaccctagttttattggaggtatatatctacctccttttgcttttttatttgctaaactagctcatactgtatctcataaaaagtactttactatcttatttaaaactttgtaagtattttaatggctgggtaatcctttatcatgtgtatatgccataatttacgtatgatagtaatttggttatttagaatgcttacattttcattctattataaataaa

SEQ ID NO: 131954 - DNA, 1306 bp, Homo sapiens
  Payload ID: 5762
  Gene Symbol: FAM13A
  Gene Name: family with sequence similarity 13, member A
  ENST ID: ENST00000507352
  CDS Start-End: 201-692
agcattgcctgaagaagtttggaggctgagagcagcagtagactggccaactgcagagcaagttgtttctccagccgtgcggtgcagcctcatgcccccaacccagcttagccactgtaagaagacgttcactgtacagacgaccaaacttgccgtggaagagacagttgtgagattcccttgcaaatttacatacgagaatggcttgtgaaatcatgcctctgcaaagttcacaggaagatgaaagacctctgtcacctttctatttgagtgctcatgtaccccaagtcagcaatgtgtctgcaaccggagaactcttagaaagaaccatccgatcagctgtagaacaacatctttttgatgttaataactctggaggtcaaagttcagaggactcagaatctggaacactatcagcatcttctgccacatctgccagacagcgccgccgccagtccaaggagcaggatgaagttcgacatgggagagacaagggacttatcaacaaagaaaatactccttctgggttcaaccaccttgatgattgtattttgaatactcaggaagtcgaaaaggtacacaaaaatacttttggttgtgctggagaaaggagcaagcctaaacgtcagaaatccagtactaaactttctgagcttcatgacaatcaggacggtcttgtggaaaggaaatgaaaaagatggtggacacactcagcattttgagagccccacaatgaagatccaggagcatcccagcctatctgacaccaaacagcagagaaatcaagatgccggtgaccaggaggagagctttgtctccgaagtgccccagtcggacctgactgcattgtgtgatgaaaagaactgggaagagcctatccctgctttctcctcctggcagcgggagaacagtgactctgatgaagcccacctctcgccgcaggctgggcgcctgatccgtcagctgctggacgaagacagcgaccccatgctctctcctcggttctacgcttatgggcagagcaggcaatacctggatgacacagaagtgcctccttccccaccaaactcccattctttcatgaggcggcgaagctcctctctggggtcctatgatgatgagcaagaggacctgacacctgcccagctcacacgaaggattcagagccttaaaaagaagatccggaagtttgaagatagattcgaagaagagaagaagtacagaccttcccacagtgacaaagcagccaatccggaggttctgaaatggacaaatgaccttgccaaattccggagacaacttaaag

SEQ ID NO: 131955 - DNA, 2762 bp, Homo sapiens
  Payload ID: 5762
  Gene Symbol: FAM13A
  Gene Name: family with sequence similarity 13, member A
  ENST ID: ENST00000509094
  CDS Start-End: 199-1032
atgtgggttcagcggaaagagaagcaaaaccactcttcctaaaatgttagaagctgctcttcgcttaccttggggcctttgcattgggagctgtttttcacatcaaagaatatgtgctgaatggaattttagtattttgctgtcgttttaatattttcgtctggtcttcctcagttcttccagacgctttctgagagaatgggggcaggagctctagccatctgtcaaagtaaagcagcggttcggctgaaagaagacatgaaaaagatagtggcagtgccattaaatgaacagaaggattttacctatcagaagttatttggagtcagtctccaagaacttgaacggcaggggctcaccgagaatggcattccagcagtagtgtggaatatagtggaatatttgacgcagcatggacttacccaagaaggtctttttagggtgaatggtaacgtgaaggtggtggaacaacttcgactgaagttcgagagtggagtgcccgtggagctcgggaaggacggtgatgtctgctcagcagccagtctgttgaagctgtttctgagggagctgcctgacagtctgatcacctcagcgttgcagcctcgattcattcaactctttcaggatggcagaaatgatgttcaggagagtagcttaagagacttaataaaagagctgccagacacccactactgcctcctcaagtacctttgccagttcttgacaaaagtagccaagcatcatgtgcagaatcgcatgaatgttcacaatctcgccactgtatttgggccaaattgctttcatgtgccacctgggcttgaaggcatgaaggaacaggacctgtgcaacaagataatggctaaaattctagaaaattacaataccctgtttgaagtagagtatacagaaaatgatcatctgagatgtgaaaacctggctaggcttatcatagtaaaagtaagcaacttggtttttaattttcagtattgctataattttggacagaagattttatttaattctttctcataaaaattccatatggatataaccctcagattattattcctgtgtatagtgaatccttcttatgaaatctattattccaaatgcttattaaattgaaatatagccttctaaaattcaagaataatagcaattttatgttttcttgttgctataaagtcatctcaaaaacacttgcatgagcccagtgctctgatcaactggccgcaccacctttactacagaagcctgatgttacagcaggaataagtgcatatggctgtgatcaggagtgctaggttactaactagattgcaaattcctgaagacaatattactgtgtctttttgtctcttttgtgtctggcacaatttgaagcccaacctcagattctaagtcccatatattagtttttggtaacaatcatcagtaaaggagaatattttaaaaacctataaaggagtccttgacaatactatctaaatctttttatacattgataattttataatataccctgtatatattaggtaaatgcctgtaggtctccaaagacctagaattgagaatcagagggtaaacatccaaacaaatcccctagatgtgggaaaataaggaagttatcttatttcgtcgtcatttatattgaggtgaatcatgatggagctggtatgagatttcctcaggaggtttcttgaagcttatcaggtttacagaccataacatactctttgctgattcatatagcaatgaatgataaaatcagaggcacttggtttgggcacttaaaggaatgttttcatctcttctcccagttgaggccatgactttgaagaaaggttaaaatggtttgagtatcaagtagcatcctacaaaaggatctaaaactagattttctagtttgctcagttaaaatgataaaatgagataattggagactatcagttgtaaatctgagttagaaataacacggtagctgaaaaaaatgtcagtgattcacaagaaaaaataagaaaacaacattacttcagttttgcctcagaaaagttaaatgattttttaaatagaaaaaaatcgccctcaagtttgttcctctagtgcctatggtactttgaaaaggatctctttttaaaatgttaaaaggtaattaactttgtttcagcagcatctctcaatcacatataccccataaatatgtacaactattaaaggacctataatgataattaaaaataaaatattttaaaaatcttttataaacaatttttaacactcatacctttttactagggcagataaaataataaggtgaacctgaagtataatggaaatagataaatataatcttaggcagggcaaacttgctgagataaagctaattgctggaatatgccaatgggaagttgatatggtttggatgtttgtcccctccaaatctcatattgaaacgcagtccctggtgttggagctggggcctggtgggaggtgtttggatcatgagggcggatccttcgtgaatgacttagtgccatccccttggtgatgagtgagttcttgctgtgagttcacaggagacctgcttgtttaaaagtgtgtggcacttccccccctcactcttgctcccactctcgccatgtgatatgcctgctccccttcttcttctgccgtgattgtgagcttcctgaggcctcattagaggcagatgttctgtatggcctgctgaactgtgagtcaattaaacctctttttgaaataaa

SEQ ID NO: 131956 - DNA, 2287 bp, Homo sapiens
  Payload ID: 5762
  Gene Symbol: FAM13A
  Gene Name: family with sequence similarity 13, member A
  ENST ID: ENST00000504836
  CDS Start-End: 255-815
aacaaaaggtcaaagtggactgcagtgtaaatgtagagaagcagccgataaaatagcattgcctgaagaagtttggaggctgagagcagcagtagactggccaactgcagagcaagttgtttctccagccgtgcggtgcagcctcatgcccccaacccagcttagccactgtaagaagacgttcactgtacagacgaccaaacttgccgtggaagagacagttgtgagattcccttgcaaatttacatacgagaatggcttgtgaaatcatgcctctgcaaagtgctcatgtaccccaagtcagcaatgtgtctgcaaccggagaactcttagaaagaaccatccgatcagctgtagaacaacatctttttgatgttaataactctggaggtcaaagttcagaggactcagaatctggaacactatcagcatcttctgccacatctgccagacagcgccgccgccagtccaaggagcaggatgaagttcgacatgggagagacaagggacttatcaacaaagaaaatactccttctgggttcaaccaccttgatgattgtattttgaatactcaggaagtcgaaaaggtacacaaaaatacttttggttgtgctggagaaaggagcaagcctaaacgtcagaaatccagtactaaactttctgagcttcatgacaatcaggacggtcttgtgaatatggaaagtctcaattccacacgatctcatgagagaactggacctgatgattttgaatggatgtctgatgaaaggaaaggaaatgaaaaagatggtggacacactcagcattttgagtaatcaccaagactgtcagctgcctgcagttatcgggaagagcagcctggggaaagttaaaggagcacagatggacagttgctttctgcatgcaagtggccagctaggatccggggggcatcaagccatgatttttatttctgtgctggatgcattagcagctgtgacttggaaggttttatcctgaaggagtggaattgctgcagacgtcttggggttttggtgagcagtagatatttggggacattgtgctgttattgcagagccccacaatgaagatccaggagcatcccagcctatctgacaccaaacagcagagaaatcaagatgccggtgaccaggaggagagctttgtctccgaagtgccccagtcggacctgactgcattgtgtgatgaaaagaactgggaagagcctatccctgctttctcctcctggcagcgggagaacagtgactctgatgaagcccacctctcgccgcaggctgggcgcctgatccgtcagctgctggacgaagacagcgaccccatgctctctcctcggttctacgcttatgggcagagcaggcaatacctggatgacacagaagtgcctccttccccaccaaactcccattctttcatgaggcggcgaagctcctctctggggtcctatgatgatgagcaagaggacctgacacctgcccagctcacacgaaggattcagagccttaaaaagaagatccggaagtttgaagatagattcgaagaagagaagaagtacagaccttcccacagtgacaaagcagccaatccggaggttctgaaatggacaaatgaccttgccaaattccggagacaacttaaagaatcaaaactaaagatatctgaagaggacctaactcccaggatgcggcagcgaagcaacacactccccaagagttttggttcccaacttgagaaagaagatgagaagaagcaagagctggtggataaagcaataaagcccagtgttgaagccacattggaatctattcagaggaagctccaggagaagcgagcggaaagcagccgccctgaggacattaaggatatgaccaaagaccagattgctaatgagaaagtggctctgcagaaagctctgttatattatgaaagcattcatggacggccggtaacaaagaacgaacggcaggtgatgaagccactatacgacaggtaccggctggtcaaacagatcctctcccgagctaacaccatacccatcattgaagaagaggaggggtcagaagacgatagcaatgtgaagccagacttcatggtcactctgaaaaccgatttcagtgcacgatgctttctggaccaattcgaagatgacgctgatggatttatttccccaatggatgataaaataccatcaaaatgcagccaggacacagggctttcaaatctccatgctgcctcaatacctgaactcctggaacacctccaggaaatg

SEQ ID NO: 131957 - DNA, 3386 bp, Homo sapiens
  Payload ID: 5762
  Gene Symbol: FAM13A
  Gene Name: family with sequence similarity 13, member A
  Uniprot ID: O94988
  ENST ID: ENST00000503556
  CDS Start-End: 228-2279
taaatgtagagaagcagccgataaaatagcattgcctgaagaagtttggaggctgagagcagcagtagactggccaactgcagagcaagttgtttctccagccgtgcggtgcagcctcatgcccccaacccagcttagccactgtaagaagacgttcactgtacagacgaccaaacttgccgtggaagagacagttgtgagattcccttgcaaatttacatacgagaatggcttgtgaaatcatgcctctgcaaagtgctcatgtaccccaagtcagcaatgtgtctgcaaccggagaactcttagaaagaaccatccgatcagctgtagaacaacatctttttgatgttaataactctggaggtcaaagttcagaggactcagaatctggaacactatcagcatcttctgccacatctgccagacagcgccgccgccagtccaaggagcaggatgaagttcgacatgggagagacaagggacttatcaacaaagaaaatactccttctgggttcaaccaccttgatgattgtattttgaatactcaggaagtcgaaaaggtacacaaaaatacttttggttgtgctggagaaaggagcaagcctaaacgtcagaaatccagtactaaactttctgagcttcatgacaatcaggacggtcttgtgaatatggaaagtctcaattccacacgatctcatgagagaactggacctgatgattttgaatggatgtctgatgaaaggaaaggaaatgaaaaagatggtggacacactcagcattttgagagccccacaatgaagatccaggagcatcccagcctatctgacaccaaacagcagagaaatcaagatgccggtgaccaggaggagagctttgtctccgaagtgccccagtcggacctgactgcattgtgtgatgaaaagaactgggaagagcctatccctgctttctcctcctggcagcgggagaacagtgactctgatgaagcccacctctcgccgcaggctgggcgcctgatccgtcagctgctggacgaagacagcgaccccatgctctctcctcggttctacgcttatgggcagagcaggcaatacctggatgacacagaagtgcctccttccccaccaaactcccattctttcatgaggcggcgaagctcctctctggggtcctatgatgatgagcaagaggacctgacacctgcccagctcacacgaaggattcagagccttaaaaagaagatccggaagtttgaagatagattcgaagaagagaagaagtacagaccttcccacagtgacaaagcagccaatccggaggttctgaaatggacaaatgaccttgccaaattccggagacaacttaaagaatcaaaactaaagatatctgaagaggacctaactcccaggatgcggcagcgaagcaacacactccccaagagttttggttcccaacttgagaaagaagatgagaagaagcaagagctggtggataaagcaataaagcccagtgttgaagccacattggaatctattcagaggaagctccaggagaagcgagcggaaagcagccgccctgaggacattaaggatatgaccaaagaccagattgctaatgagaaagtggctctgcagaaagctctgttatattatgaaagcattcatggacggccggtaacaaagaacgaacggcaggtgatgaagccactatacgacaggtaccggctggtcaaacagatcctctcccgagctaacaccatacccatcattggttccccctccagcaagcggagaagccctttgctgcagccaattatcgagggcgaaactgcttccttcttcaaggagataaaggaagaagaggaggggtcagaagacgatagcaatgtgaagccagacttcatggtcactctgaaaaccgatttcagtgcacgatgctttctggaccaattcgaagatgacgctgatggatttatttccccaatggatgataaaataccatcaaaatgcagccaggacacagggctttcaaatctccatgctgcctcaatacctgaactcctggaacacctccaggaaatgagagaagaaaagaaaaggattcgaaagaaacttcgggattttgaagacaactttttcagacagaatggaagaaatgtccagaaggaagaccgcactcctatggctgaagaatacagtgaatataagcacataaaggcgaaactgaggctcctggaggtgctcatcagcaagagagacactgattccaagtccatgtgaggggcatggccaagcacagggggctggcagctgcggtgagagtttactgtccccagagaaagtgcagctctggaaggcagccttggggctggccctgcaaagcatgcagcccttctgcctctagaccatttggcatcggctcctgtttccattgcctgccttagaaactggctggaagaagacaatgtgacctgacttaggcattttgtaattggaaagtcaagactgcagtatgtgcacatgcgcacgcgcatgcacgcacacacacacacagtagtggagctttcctaacactagcagagattaatcactacattagacaacactcatctacagagaatatacactgttcttccctggataactgagaaacaagagaccattctctgtctaactgtgataaaaacaagctcaggactttattctatagagcaaacttgctgtggagggccatgctctccttggacccagttaactgcaaacgtgcattggagccctatttgctgccgctgccattctagtgacctttccacagagctgcgccttcctcacgtgtgtgaaaggttttccccttcagccctcaggtagatggaagctgcatctgcccacgatggcagtgcagtcatcatcttcaggatgtttcttcaggacttcctcagctgacaaggaattttggtccctgcctaggaccgggtcatctgcagaggacagagagatggtaagcagctgtatgaatgctgattttaaaaccaggtcatgggagaagagcctggagattctttcctgaacactgactgcacttaccagtctgattttatcgtcaaacaccaagccaggctagcatgctcatggcaatctgtttggggctgttttgttgtggcactagccaaacataaaggggcttaagtcagcctgcatacagaggatcggggagagaaggggcctgtgttctcagcctcctgagtacttaccagagtttaatttttttaaaaaaaatctgcactaaaatccccaaactgacaggtaaatgtagccctcagagctcagcccaaggcagaatctaaatcacactattttcgagatcatgtataaaaagaaaaaaaagaa

SEQ ID NO: 131958 - DNA, 5465 bp, Homo sapiens
  Payload ID: 5763
  Gene Symbol: FAM13B
  Gene Name: family with sequence similarity 13, member B
  Uniprot ID: Q9NYF5
  ENST ID: ENST00000033079
  CDS Start-End: 453-3200
ccgcctctgtcgccactctctccccctgttccgcgtctgcgtcgccaccaccgccgggggtatccggggggtcgcttaccgggctggccccgcgccacagccgtagctttaacctcccgtcagcggccgccccaggaagaggcttctcggccgcggagccacttggggcctcagttctcgccctcttgccgtcgccgcgggtcctggagaagcggccgcggccagggaacggggcatcgcggttccaacgattaactgctgaagtactgatcgagttctgcatttcttcaatgaggaactacaggctgatcttctgccataatctcaaacagccataaatgacaaaagaatgcttgctcagtgagggtagctggtgcagaagccattttttaaacttaggtatttaagtactgaaagaaaagacagctttgatttctggctgcaaaaaagatatgaggaagagctcctccccttccttgagtaactgcaactccgttcttgctaacaaaatatttggaattccacttgatgagctgcagcagggaggacatccagacaatgaggttccattcatagtccgccacgttgtggactatattgaggaacatggaggtctggagcaacaaggactttttcaagtcaatggaaatgctgagacagtggagtggcttcggcagagatacgacagcggagaagaggtggatttggttaaggaagcagatgttccctcagctattagccttcttagattttttcttcaagaacttcctgaacctgttatccctggcagtttacatattcacttgatgcagctttctcaagattataataatgaagatgaatttggaagaaagttgaggttcctcttgcaacagcttccacctgttaattatagtttgttaaagtttctgtgtagatttttagccaatgtagcatcacatcatgaagaaatttggtccgcaaattctttggctgctgtctttggtccagatgtcttccacatttacacagatgtggaagacatgaaagagcaagaaatagtgagcaggataatggctggacttctggaaaactactatgagttttttgagaatgaagaggaagatttttcatctaatgatttgagttcaattactgaacaggttaatgaactttctgaggaagaagaggaagatgaaaagctggaacatattgaagaacttccagaagagggtgcagaaaaatcaaatgacatgccagaggtggtacaattaaggatgactgaaaacatcctggaatcaaatagtgttacggcaacaagcacccatatatctcccatcagcatcctaccagcctctacagatattttagaaagaacaattagagcagctgtggaacagcacctttttgatcttcagagcagcatagatcatgatcttaagaatttacaacagcaaagtgtggtgtgtaataatgaagcagaaagtattcattgtgatggggaaggatctaataaccagattgatattgctgatgatattattaatgccagtgaaagtaacagagactgttcaaaacctgtggctagcactaatttagacaatgaagctatgcagcaagattgtgtatttgagaatgaagaaaatacccagtctgtaggtatattgttagagccatgcagtgaccgtggtgatagtgaagatggctgtcttgagagggaagaatatttgttatttgacagtgataaattgtcacacttgattctggattctagtagcaagatatgtgatttgaatgccaacactgaatcagaagtaccaggaggtcagagtgttggtgttcaaggggaagcagcgtgtgtcagtattccacatttagatctgaagaatgtttctgatggtgataaatgggaagagccatttcctgcttttaagtcttggcaggaggactctgagtctggagaagctcagctgtctccacaagctggaagaatgaatcatcaccccttggaagaggactgtcctccagtattatcacaccgcagtttagattttggtcaaagccagcgtttcctacatgatccagaaaagttggattcctcatctaaagcactgtcttttactagaattcgaagatcatcctttagttcaaaagatgaaaagagagaggacagaacaccttatcagctggtcaagaaacttcagaagaaaatcagacaatttgaggaacagtttgaaagggaaagaaatagcaagccctcctacagtgatattgctgccaatccaaaggtattaaaatggatgacagagcttacaaaactgcggaagcaaattaaagatgcaaaacacaaaaattctgatggagaatttgtacctcagacacgtccacgtagtaacacacttccaaaaagctttggctcttctctagaccatgaagatgaagagaatgaagatgaacccaaggtcattcagaaggagaaaaaaccatctaaagaagcaacccttgaacttattcttaaaagactgaaagaaaaacgtattgagaggtgtcttccagaagatatcaagaaaatgaccaaagatcatttggtagaagagaaagcttctcttcagaaaagtcttctttactatgaaagtcaacatggaaggccggtgaccaaggaagaaaggcacattgttaaacctctctatgatagatacaggcttgtaaaacaaatgctgacaagagctagcatcactcctgtccttggatctccatccaccaagcgaaggggtcagatgttacagccaatcatagaaggagaaactgcacatttttttgaagaaatcaaggaggaagaagaagatggtgttaatctgtcctctgagttaggtgatatgttgaaaactgcagtacaggtacagtcttcattagaaaactctgaatctgatgttgaagaaaatcaagaaaaactggctctggatctccgattgtcaagttctcgagcagcttctatgcctgaattattggaacaactttggaaagccagagctgaaaaaaagaaactacgcaaaacgttgcgggaatttgaagaagcattttatcaacaaaatggaaggaatgcccagaaagaggatcgtgttccagtgcttgaggagtacagagagtacaagaaaattaaagccaagcttaggcttcttgaagttcttataagcaaacaagattcttcaaaatccatataagatacgttccttgaaaattcatatcataaagtcagttgtattccttgaagctatcatcgtgtgtacttggctggtacttaaattcgttttgtcaggcactcagagaatctcattttgtacttggttgtggtgccactaaacaaaacaaatgatgggagagtaagtaggccctctcaagggagcgtaagtgatgttccatattaaccacagactgtcctctccacctttagcaaacatatggtttacttcattgttttgtactacagatacatccttttagcaaaagactggaattttatcctttcaacttcaagaactttggaaatgcaagctttttgttattaccaactttttgtttctcattactgaagaaaattggaggaaaatcttcatactgaattcttctgttgcctttttcttacagaatgactgaaaatttgaaagaaaagcctataaaagtgcacatacgcaactgtgttctctgttttcctagaaaaccaaaatcaaactgagatttcaagtcgtactatggaacacctttctgtttaattcccaaagtgacatcttctcacaggtagtatgttagtaaaattttgcaattcgctggtcacacagctcccggatgaagataacagttggtagaccaaaaggtgacctcgcttagtatattgaaaacacacaccacacatcacacacagaactgaatcataccacatgctgcctatgggacttcagttactgtttcctgagttactgtttatccgctggcaatggtgtgatttgtctggatcagatccgcgctattccccaacccacctccagataatgtgagaaaatagccatgtcagtatgtaggaactctgatggtgctcagatttgtgtgttcaatcaatgggcttaaatcagcaaaatattatgcctaaagtaaatctgttcttaacaagggctctaccactgcattttcacatgtaccttcagggggttatctttttttttttcccctcctattttaatcagcaaaatccataccaaaacaacgacaacaacgccctcttaagggaccaccctttggtcaatcataacatgctgtttaaagcagctgtttacaggatgtgtagtggtatgccccttgtcatatactcttagcatatctttttttcctttggctttgcatggcttttcttcaggtactgtctcggtatcattctgctaatcattgttacagaatggtgacttcatttgtgctaacagtacaacagcagatttgggtcaggcttaatctaagtgttaacttttttttctggtgcttttttggattgatgactgtctcactttgactatacccatgttttgcatgcaatgactcatgcatggttttcttaactagctaatattaacaatttattccatataaaaatggaattttgcaacatcctttaataaggtgagggaagcatgaacctcagacttctggcactattacatagtaagcacatgaagtagtttgataataaatagcagttctagtacttcacatttcacccgtgtgtgcaatgcctttttctggggggtggggggtgagggaaaacctggtagtgaatgtgtagttggggaataaagaaaagcactaaatcctgccctttttgtgtggtttccttttgatacaactaggttattcataatgtatacctagaaaagtgaaattgaaaataccaaaagatgtatcatttttatttgaatccatcatgcagtgtacatttcagataatttccttcagtctccagataggagtgtatccaaacatctaattttatgtgcactgtgtatcttatatgaatgttttattttatataccacatgcaaaaatgtccatatgcactatttaaatgttttaaataatatattccttctttataatgctaaatctatatgagtaccatatttttataagtcagtggtctgactggtttcattttagaattaacagctgcttcaatatgttattcaatgttaatgtttggctgtgagtagaatatgtaaaagtggcatggcagcacttatgctctgtgacagtattgtgtgtcatagttgagcagtagctggtagaattaggcagttggtgatagttttactttggtacaaataaaaactgtatatctatatacaaataatatatagatatatatgtccaccagtataatggcattgctgtgtctggcacttcattgtacagacttttataataaaagaacttgaaagttctaa

SEQ ID NO: 131959 - DNA, 3214 bp, Homo sapiens
  Payload ID: 5763
  Gene Symbol: FAM13B
  Gene Name: family with sequence similarity 13, member B
  Uniprot ID: Q9NYF5
  ENST ID: ENST00000420893
  CDS Start-End: 507-3170
cccgccagccgctctcctcccgctcgccgttagggaggctctgcacctcagccgccgcctctgtcgccactctctccccctgttccgcgtctgcgtcgccaccaccgccgggggtatccggggggtcgcttaccgggctggccccgcgccacagccgtagctttaacctcccgtcagcggccgccccaggaagaggcttctcggccgcggagccacttggggcctcagttctcgccctcttgccgtcgccgcgggtcctggagaagcggccgcggccagggaacggggcatcgcggttccaacgattaactgctgaagtactgatcgagttctgcatttcttcaatgaggaactacaggctgatcttctgccataatctcaaacagccataaatgacaaaagaatgcttgctcagtgagggtagctggtgcagaagccattttttaaacttaggtatttaagtactgaaagaaaagacagctttgatttctggctgcaaaaaagatatgaggaagagctcctccccttccttgagtaactgcaactccgttcttgctaacaaaatatttggaattccacttgatgagctgcagcagggaggacatccagacaatgaggttccattcatagtccgccacgttgtggactatattgaggaacatggaggtctggagcaacaaggactttttcaagtcaatggaaatgctgagacagtggagtggcttcggcagagatacgacagcggagaagaggtggatttggttaaggaagcagatgttccctcagctattagccttcttagattttttcttcaagaacttcctgaacctgttatccctggcagtttacatattcacttgatgcagctttctcaagattataataatgaagatgaatttggaagaaagttgaggttcctcttgcaacagcttccacctgttaattatagtttgttaaagtttctgtgtagatttttagccaatgtagcatcacatcatgaagaaatttggtccgcaaattctttggctgctgtctttggtccagatgtcttccacatttacacagatgtggaagacatgaaagagcaagaaatagtgagcaggataatggctggacttctggaaaactactatgagttttttgagaatgaagaggaagatttttcatctaatgatttgagttcaattactgaacaggttaatgaactttctgaggaagaagaggaagatgaaaagctggaacatattgaagaacttccagaagagggtgcagaaaaatcaaatgacatgccagaggtggtacaattaaggatgactgaaaacatcctggaatcaaatagtgttacggcaacaagcacccatatatctcccatcagcatcctaccagcctctacagatattttagaaagaacaattagagcagctgtggaacagcacctttttgatcttcagagcagcatagatcatgatcttaagaatttacaacagcaaagtgtggtgtgtaataatgaagcagaaagtattcattgtgatggggaaggatctaataaccagattgatattgctgatgatattattaatgccagtgaaagtaacagagactgttcaaaacctgtggctagcactaatttagacaatgaagctatgcagcaagattgtgtatttgagaatgaagaaaatacccagtctgtaggtatattgttagagccatgcagtgaccgtggtgatagtgaagatggctgtcttgagagggaagaatatttgttatttgacagtgataaattgtcacacttgattctggattctagtagcaagatatgtgatttgaatgccaacactgaatcagaagtaccaggaggtcagagtgttggtgttcaaggggaagcagcgtgtgtcagtattccacatttagatctgaagaatgtttctgatggtgataaatgggaagagccatttcctgcttttaagtcttggcaggaggactctgagtctggagaagctcagctgtctccacaagctggaagaatgaatcatcaccccttggaagaggactgtcctccagtattatcacaccgcagtttagattttggtcaaagccagcgtttcctacatgatccagaaaagttggattcctcatctaaagcactgtcttttactagaattcgaagatcatcctttagttcaaaagatgaaaagagagaggacagaacaccttatcagctggtcaagaaacttcagaagaaaatcagacaatttgaggaacagtttgaaagggaaagaaatagcaagccctcctacagtgatattgctgccaatccaaaggtattaaaatggatgacagagcttacaaaactgcggaagcaaattaaagatgcaaaacacaaaaattctgatggagaatttgtacctcagacacgtccacgtagtaacacacttccaaaaagctttggctcttctctagaccatgaagatgaagagaatgaagatgaacccaaggtcattcagaaggagaaaaaaccatctaaagaagcaacccttgaacttattcttaaaagactgaaagaaaaacgtattgagaggtgtcttccagaagatatcaaggtgaccaaggaagaaaggcacattgttaaacctctctatgatagatacaggcttgtaaaacaaatgctgacaagagctagcatcactcctgtccttggatctccatccaccaagcgaaggggtcagatgttacagccaatcatagaaggagaaactgcacatttttttgaagaaatcaaggaggaagaagaagatggtgttaatctgtcctctgagttaggtgatatgttgaaaactgcagtacaggtacagtcttcattagaaaactctgaatctgatgttgaagaaaatcaagaaaaactggctctggatctccgattgtcaagttctcgagcagcttctatgcctgaattattggaacaactttggaaagccagagctgaaaaaaagaaactacgcaaaacgttgcgggaatttgaagaagcattttatcaacaaaatggaaggaatgcccagaaagaggatcgtgttccagtgcttgaggagtacagagagtacaagaaaattaaagccaagcttaggcttcttgaagttcttataagcaaacaagattcttcaaaatccatataagatacgttccttgaaaattcatatcataaagtcagttgtattcc

SEQ ID NO: 131960 - DNA, 3098 bp, Homo sapiens
  Payload ID: 5763
  Gene Symbol: FAM13B
  Gene Name: family with sequence similarity 13, member B
  Uniprot ID: Q9NYF5
  ENST ID: ENST00000425075
  CDS Start-End: 670-3045
gcccgccagccgctctcctcccgctcgccgttagggaggctctgcacctcagccgccgcctctgtcgccactctctccccctgttccgcgtctgcgtcgccaccaccgccgggggtatccggggggtcgcttaccgggctggccccgcgccacagccgtagctttaacctcccgtcagcggccgccccaggaagaggcttctcggccgcggagccacttggggcctcagttctcgccctcttgccgtcgccgcgggtcctggagaagcggccgcggccagggaacggggcatcgcggttccaacgattaactgctgaagtactgatcgagttctgcatttcttcaatgaggaactacaggctgatcttctgccataatctcaaacagccataaatgacaaaagaatgcttgctcagtgagggtagctggtgcagaagccattttttaaacttaggtatttaagtactgaaaggaggtctggagcaacaaggactttttcaagtcaatggaaatgctgagacagtggagtggcttcggcagagatacgacagcggagaagaggtggatttggttaaggaagcagatgttccctcagctattagccttcttagattttttcttcaagaacttcctgaacctgttatccctggcagtttacatattcacttgatgcagctttctcaagattataataatgaagatgaatttggaagaaagttgaggttcctcttgcaacagcttccacctgttaattatagtttgttaaagtttctgtgtagatttttagccaatgtagcatcacatcatgaagaaatttggtccgcaaattctttggctgctgtctttggtccagatgtcttccacatttacacagatgtggaagacatgaaagagcaagaaatagtgagcaggataatggctggacttctggaaaactactatgagttttttgagaatgaagaggaagatttttcatctaatgatttgagttcaattactgaacaggttaatgaactttctgaggaagaagaggaagatgaaaagctggaacatattgaagaacttccagaagagggtgcagaaaaatcaaatgacatgccagaggtggtacaattaaggatgactgaaaacatcctggaatcaaatagtgttacggcaacaagcacccatatatctcccatcagcatcctaccagcctctacagatattttagaaagaacaattagagcagctgtggaacagcacctttttgatcttcagagcagcatagatcatgatcttaagaatttacaacagcaaagtgtggtgtgtaataatgaagcagaaagtattcattgtgatggggaaggatctaataaccagattgatattgctgatgatattattaatgccagtgaaagtaacagagactgttcaaaacctgtggctagcactaatttagacaatgaagctatgcagcaagattgtgtatttgagaatgaagaaaatacccagtctgtaggtatattgttagagccatgcagtgaccgtggtgatagtgaagatggctgtcttgagagggaagaatatttgttatttgacagtgataaattgtcacacttgattctggattctagtagcaagatatgtgatttgaatgccaacactgaatcagaagtaccaggaggtcagagtgttggtgttcaaggggaagcagcgtgtgtcagtattccacatttagatctgaagaatgtttctgatggtgataaatgggaagcgtcatgccctatcacttttcccctcattgatttcaaaacaatgcatctgcagagagatggggaggagccatttcctgcttttaagtcttggcaggaggactctgagtctggagaagctcagctgtctccacaagctggaagaatgaatcatcaccccttggaagaggactgtcctccagtattatcacaccgcagtttagattttggtcaaagccagcgtttcctacatgatccagaaaagttggattcctcatctaaagcactgtcttttactagaattcgaagatcatcctttagttcaaaagatgaaaagagagaggacagaacaccttatcagctggtcaagaaacttcagaagaaaatcagacaatttgaggaacagtttgaaagggaaagaaatagcaagccctcctacagtgatattgctgccaatccaaaggtattaaaatggatgacagagcttacaaaactgcggaagcaaattaaagatgcaaaacacaaaaattctgatggagaatttgtacctcagacacgtccacgtagtaacacacttccaaaaagctttggctcttctctagaccatgaagatgaagagaatgaagatgaacccaaggtcattcagaaggagaaaaaaccatctaaagaagcaacccttgaacttattcttaaaagactgaaagaaaaacgtattgagaggtgtcttccagaagatatcaaggtgaccaaggaagaaaggcacattgttaaacctctctatgatagatacaggcttgtaaaacaaatgctgacaagagctagcatcactcctgtccttggatctccatccaccaagcgaaggggtcagatgttacagccaatcatagaaggagaaactgcacatttttttgaagaaatcaaggaggaagaagaagatggtgttaatctgtcctctgagttaggtgatatgttgaaaactgcagtacaggtacagtcttcattagaaaactctgaatctgatgttgaagaaaatcaagaaaaactggctctggatctccgattgtcaagttctcgagcagcttctatgcctgaattattggaacaactttggaaagccagagctgaaaaaaagaaactacgcaaaacgttgcgggaatttgaagaagcattttatcaacaaaatggaaggaatgcccagaaagaggatcgtgttccagtgcttgaggagtacagagagtacaagaaaattaaagccaagcttaggcttcttgaagttcttataagcaaacaagattcttcaaaatccatataagatacgttccttgaaaattcatatcataaagtcagttgtattccttgaagcta

SEQ ID NO: 131961 - DNA, 590 bp, Homo sapiens
  Payload ID: 5763
  Gene Symbol: FAM13B
  Gene Name: family with sequence similarity 13, member B
  ENST ID: ENST00000509596
  CDS Start-End: 328-590
gtagcccatttacagatcatttcatagggtgttgatctaccggctgtcaaggagtccaaatggaagatctcaaagcccttaacagactataacaaagaagagattggctgaatattcatacccttattaactgctgaagtactgatcgagttctgcatttcttcaatgaggaactacaggctgatcttctgccataatctcaaacagccataaatgacaaaagaatgcttgctcagtgagggtagctggtgcagaagccattttttaaacttaggtatttaagtactgaaagaaaagacagctttgatttctggctgcaaaaaagatatgaggaagagctcctccccttccttgagtaactgcaactccgttcttgctaacaaaatatttggaattccacttgatgagctgcagcagggaggacatccagacaatgaggttccattcatagtccgccacgttgtggactatattgaggaacatggaggtctggagcaacaaggactttttcaagtcaatggaaatgctgagacagtggagtggcttcggcagagatacgacagcggagaagaggtggatttggttaagga

SEQ ID NO: 131962 - DNA, 529 bp, Homo sapiens
  Payload ID: 5763
  Gene Symbol: FAM13B
  Gene Name: family with sequence similarity 13, member B
  ENST ID: ENST00000505961
  CDS Start-End: 373-529
atggtttactctctctgatgaaatgtgggagacactgtggcctctgtagcccatttacagatcatttcataggattaactgctgaagtactgatcgagttctgcatttcttcaatgaggaactacaggctgatcttctgccataatctcaaacagccataaatgacaaaagaatgcttgctcagtgagggtagctggtgcagaagccattttttaaacttaggtatttaagtactgaaaggccgggtgcggtggctaacgcctgtaatcccagcactttgggggccgagacgggcagatcacgaggtcaggagatggagaccatcctggctaacacgaaaagacagctttgatttctggctgcaaaaaagatatgaggaagagctcctccccttccttgagtaactgcaactccgttcttgctaacaaaatatttggaattccacttgatgagctgcagcagggaggacatccagacaatgaggttccattcatagtccgccacgttgtggactatattgaggaacatg

SEQ ID NO: 131963 - DNA, 572 bp, Homo sapiens
  Payload ID: 5763
  Gene Symbol: FAM13B
  Gene Name: family with sequence similarity 13, member B
  ENST ID: ENST00000502471
  CDS Start-End: 287-572
gttttctggacgggaagaagagggtggtaaaaagcctaccatacttgccgactgaaagggacatctacagggctgagtgtttggattaactgctgaagtactgatcgagttctgcatttcttcaatgaggaactacaggctgatcttctgccataatctcaaacagccataaatgacaaaagaatgcttgctcagtgagggtagctggtgcagaagccattttttaaacttaggtatttaagtactgaaagaaaagacagctttgatttctggctgcaaaaaagatatgaggaagagctcctccccttccttgagtaactgcaactccgttcttgctaacaaaatatttggaattccacttgatgagctgcagcagggaggacatccagacaatgaggttccattcatagtccgccacgttgtggactatattgaggaacatggaggtctggagcaacaaggactttttcaagtcaatggaaatgctgagacagtggagtggcttcggcagagatacgacagcggagaagaggtggatttggttaaggaagcagatgttccctcagctatta

SEQ ID NO: 131964 - DNA, 669 bp, Homo sapiens
  Payload ID: 5763
  Gene Symbol: FAM13B
  Gene Name: family with sequence similarity 13, member B
  ENST ID: ENST00000514310
  CDS Start-End: 244-669
actccatttcttggaagagccagcaatacatctctctaatgattaactgctgaagtactgatcgagttctgcatttcttcaatgaggaactacaggctgatcttctgccataatctcaaacagccataaatgacaaaagaatgcttgctcagtgagggtagctggtgcagaagccattttttaaacttaggtatttaagtactgaaagaaaagacagctttgatttctggctgcaaaaaagatatgaggaagagctcctccccttccttgagtaactgcaactccgttcttgctaacaaaatatttggaattccacttgatgagctgcagcagggaggacatccagacaatgaggttccattcatagtccgccacgttgtggactatattgaggaacatggaggtctggagcaacaaggactttttcaagtcaatggaaatgctgagacagtggagtggcttcggcagagatacgacagcggagaagaggtggatttggttaaggaagcagatgttccctcagctattagccttcttagattttttcttcaagaacttcctgaacctgttatccctggcagtttacatattcacttgatgcagctttctcaagattataataatgaagatgaatttggaagaaagttgaggttcctcttgcaacagctt

SEQ ID NO: 131965 - DNA, 530 bp, Homo sapiens
  Payload ID: 5763
  Gene Symbol: FAM13B
  Gene Name: family with sequence similarity 13, member B
  ENST ID: ENST00000508403
  CDS Start-End: 338-530
gccgactgaaagggacatctacagggctgagtgtttggattaactgctgaagtactgatcgagttctgcatttcttcaatgaggaactacaggctgatcttctgccataatctcaaacagccataaatgacaaaagaatgcttgctcagtgagggtagctggtgcagaagccattttttaaacttaggtatttaagtactgaaaggccgggtgcggtggctaacgcctgtaatcccagcactttgggggccgagacgggcagatcacgaggtcaggagatggagaccatcctggctaacacgaaaagacagctttgatttctggctgcaaaaaagatatgaggaagagctcctccccttccttgagtaactgcaactccgttcttgctaacaaaatatttggaattccacttgatgagctgcagcagggaggacatccagacaatgaggttccattcatagtccgccacgttgtggactatattgaggaacatggaggtctggagcaacaaggactttttcaagtcaatg

SEQ ID NO: 131966 - DNA, 2088 bp, Homo sapiens
  Payload ID: 5764
  Gene Symbol: FAM13C
  Gene Name: family with sequence similarity 13, member C
  ENST ID: ENST00000435852
  CDS Start-End: 49-1770
actcccggagagcaatcagggagacggctccccggccagacttggctgatgttttcttgtttctgtttcagccttcaggataattccttcagcagcaccactgtaacagagtgtgacgaagatccagtctctctacatgaagaccagactgattgctccagtctcagagatgaaaacaataaagagaactaccccgacgcaggggctctggtagaagagcacgcgccgccctcttgggagccgcagcagcagaatgtagaggcgaccgtgctggtggacagcgtattgcgacccagcatgggcaacttcaagtccaggaagcccaagtccatcttcaaagcggagagcgggaggagccacggagaaagtcaggagacagagcatgtggtatccagccagtcagagtgtcaggtgagagcaggaacaccagctcatgagagtccacaaaacaatgccttcaagtgccaagaaacagtgcgacttcaaccaagaatagaccagaggactgccatttcgccaaaggatgcttttgaaactcggcaggacttaaatgaggaagaagctgctcaggtgcatggagtcaaggacccggcgccagcatcaacccagagcgtgcttgccgatgggacagattctgcagacccctcaccagtccacaaagatgggcagaatgaggccgacagtgcaccagaagacctccactctgtggggaccagcaggctgctctatcacatcactgatggtgataacccactgctgtcgccacgatgctccatcttcagccaaagccagagattcaacttagaccccgagtcagccccatctccacccagcactcagcagtttatgatgccgcggagttcttcacgctgcagctgtggagatggcaaggagccacagaccatcacccagctcaccaagcacatccagagcctcaagcggaaaattcggaaatttgaagaaaaatttgaacaagaaaagaaataccggccttcacatggtgacaagacttctaatcctgaagtcctgaaatggatgaatgatttggctaaaggtcgtaaacagctcaaagaactaaagctaaagctgtcagaagaacaagggagtgctcccaaaggtccacctagaaacctgttgtgtgagcaacccacagtccccagagaaaatgggaaaccggaagctgcgggcccggagccaagctcctctggagaagagactccagatgctgccttgacatgcctgaaggagagaagagagcaacttcctccccaggaggattctaaggtaactaagcaagacaagaacctcataaagccgctttatgaccgatacagaattatcaagcaaatcttgtcaacaccttcccttattccaacaattcaggaggaagaggactctgatgaagaccgtccacagggaagccaacaaccttctttggcagatccagcatctcaccttcctgttggtgaccacctcacctactctaatgagactgagcctgttagggcccttttaccagatgaaaagaaagaagtaaaaccaccagctctctccatgtctaatttacatgaggctaccatgcctgtacttcttgaccatctccgagaaactagggctgacaagaagagactgcggaaagccttaagagaatttgaagaacagttttttaaacaaacaggaaggtatgtgtcggcagagagatttttaaagctaatacttcctagagaattgctgttaaaaatgagctgcaattttttgcaggaacggtgactttttacaaaatgtatataatttccacactggcttagactcaggatttgtccaatgcaacattctaatagtgccagtattagggatgtttcatgggacatggtagctgtcaggtatgacatcaatctgtaaaaaataaaggataaactccaaaaatctctaactttgcacaataaatctcatcataaataaatgaatttatttaaacctttaaaaaaatctgttgatttttttagcccacataactgctttgttgttggtttcttagttccacaagttactccctaatttattaaataataattccttatttgcttt

SEQ ID NO: 131967 - DNA, 1963 bp, Homo sapiens
  Payload ID: 5764
  Gene Symbol: FAM13C
  Gene Name: family with sequence similarity 13, member C
  Uniprot ID: Q8NE31
  ENST ID: ENST00000422313
  CDS Start-End: 1-1377
atgttttcttgtttctgtttcagccttcaggataattccttcagcagcaccactgtaacagagtgtgacgaagatccagtctctctacatgaagaccagactgattgctccagtctcagagatgaaaacaataaagagaactaccccgacgcaggggctctggtagaagagcacgcgccgccctcttgggagccgcagcagcagaatgtagaggcgaccgtgctggtggacagcgtattgcgacccagcatgggcaacttcaagtccaggaagcccaagtccatcttcaaagcggagagcgggaggagccacggagaaagtcaggagacagagcatgtggtatccagccagtcagagtgtcaggtgagagcaggaacaccagctcatgagagtccacaaaacaatgccttcaagtgccaagaaacagtgcgacttcaaccaagaatagaccagaggactgccatttcgccaaaggatgcttttgaaactcggcaggacttaaatgaggaagaagctgctcaggtgcatggagtcaaggacccggcgccagcatcaacccagagcgtgcttgccgatgggacagattctgcagacccctcaccagtccacaaagatgggcagaatgaggccgacagtgcaccagaagacctccactctgtggggaccagcaggctgctctatcacatcactgatggtgataacccactgctgtcgccacgatgctccatcttcagccaaagccagagattcaacttagaccccgagtcagccccatctccacccagcactcagcagtttatgatgccgcggagttcttcacgctgcagctgtggagatggcaaggagccacagaccatcacccagctcaccaagcacatccagagcctcaagcggaaaattcggaaatttgaagaaaaatttgaacaagaaaagaaataccggccttcacatggtgacaagacttctaatcctgaagtcctgaaatggatgaatgatttggctaaaggtcgtaaacagctcaaagaactaaagctaaagctgtcagaagaacaagggagtgctcccaaaggtccacctagaaacctgttgtgtgagcaacccacagtccccagagaaaatgggaaaccggaagctgcgggcccggagccaagctcctctggagaagagactccagatgctgccttgacatgcctgaaggagagaagagagcaacttcctccccaggaggattctaaggtaactaagcaagacaagaacctcataaagccgctttatgaccgatacagaattatcaagcaaatcttgtcaacaccttcccttattccaacaattgtaagtcaggatacttgcatgctgttactttgtactgatgtgtagttaacaggatgtcacatagtagtacaagagttataaaagacccttcatggcagtatatactgcaaacaaggctagttgtcatttcaaaaagtgaaaatttggtcttctctaaccccattactatatttaacagtggctgatattagaactattgtaaaataggaacatatagcacttgtatgtctagagccaattttaacatttgctttcattatcttgggtgaaaagaaatgatagatttcagtttggcattttctaatttgtaacacagctagacaaaacagagcctttctgttctgtgtgttggttaattttttcctttaatcagaaaattaacaatatattcttgatataatgcaacatttgtttttggtaccatttgaccatactgtacaagatatgagaagatttatttcaatagaaaatataagtactgaaattgaattaggctacttttaataaagaatgatttatgggaatacagaactagaaaagcatcacaaatcctactccatcaatatcaaaacagttacttgttcaagatatcaatataaaaaggaataaatattaacaaatataaatttaa

SEQ ID NO: 131968 - DNA, 2110 bp, Homo sapiens
  Payload ID: 5764
  Gene Symbol: FAM13C
  Gene Name: family with sequence similarity 13, member C
  Uniprot ID: Q8NE31
  ENST ID: ENST00000468840
  CDS Start-End: 555-2063
aaaattggtaggagacatgtggaagaaagcaagtctcccgggtatttcagcacttcggcagaaacactggggcattctcattgccagcctcggggggtggctggcacaaagagcccaagattaaacgcggcgcctgggctggcgaggtcggggtcgtgtggtaactctccaggtgctcctcgctggatcccggggtcccagccccgccgccgcgccccgcccagctctgtccccgcagcctcgcgggctgccgggctttgtggttcgcccgtgccgctgggcccctgctgggggtgtcgttacgagcatgtgcagacagcagcccaagccttcaggataattccttcagcagcaccactgtaacagagtgtgacgaagatccagtctctctacatgaagaccagactgattgctccagtctcagagatgaaaacaataaagagaactaccccgacgcaggggctctggtagaagagcacgcgccgccctcttgggagccgcagcagcagaatgtagaggcgaccgtgctggtggacagcgtattgcgacccagcatgggcaacttcaagtccaggaagcccaagtccatcttcaaagcggagagcgggaggagccacggagaaagtcaggagacagagcatgtggtatccagccagtcagagtgtcaggtgagagcaggaacaccagctcatgagagtccacaaaacaatgccttcaagtgccaagaaacagtgcgacttcaaccaagaatagaccagaggactgccatttcgccaaaggatgcttttgaaactcggcaggacttaaatgaggaagaagctgctcaggtgcatggagtcaaggacccggcgccagcatcaacccagagcgtgcttgccgatgggacagattctgcagacccctcaccagtccacaaagatgggcagaatgaggccgacagtgcaccagaagacctccactctgtggggaccagcaggctgctctatcacatcactgatggtgataacccactgctgtcgccacgatgctccatcttcagccaaagccagagattcaacttagaccccgagtcagccccatctccacccagcactcagcagtttatgatgccgcggagttcttcacgctgcagctgtggagatggcaaggagccacagaccatcacccagctcaccaagcacatccagagcctcaagcggaaaattcggaaatttgaagaaaaatttgaacaagaaaagaaataccggccttcacatggtgacaagacttctaatcctgaagtcctgaaatggatgaatgatttggctaaaggtcgtaaacagctcaaagaactaaagctaaagctgtcagaagaacaagggagtgctcccaaaggtccacctagaaacctgttgtgtgagcaacccacagtccccagagaaaatgggaaaccggaagctgcgggcccggagccaagctcctctggagaagagactccagatgctgccttgacatgcctgaaggagagaagagagcaacttcctccccaggaggattctaaggtaactaagcaagacaagaacctcataaagccgctttatgaccgatacagaattatcaagcaaatcttgtcaacaccttcccttattccaacaattcaggaggaagaggactctgatgaagaccgtccacagggaagccaacaaccttctttggcagatccagcatctcaccttcctgttggtgaccacctcacctactctaatgagactgagcctgttagggcccttttaccagatgaaaagaaagaagtaaaaccaccagctctctccatgtctaatttacatgaggctaccatgcctgtacttcttgaccatctccgagaaactagggctgacaagaagagactgcggaaagccttaagagaatttgaagaacagttttttaaacaaacaggaagaagtccacaaaaggaagataggataccaatggcagatgagtattatgaatataagcacataaaagccaaactgagactattagaggtcctcatcagcaagcaagatgtggccaaaactatttgaggttcaggaaatgttatgatcactttcacccatgatataaagtaaag

SEQ ID NO: 131969 - DNA, 582 bp, Homo sapiens
  Payload ID: 5764
  Gene Symbol: FAM13C
  Gene Name: family with sequence similarity 13, member C
  ENST ID: ENST00000503444
  CDS Start-End: 567-582
attctcattgccagcctcggggggtggctggcacaaagagcccaagattaaacgcggcgcctgggctggcgaggtcggggtcgtgtggtaactctccaggtgctcctcgctggatcccggggtcccagccccgccgccgcgccccgcccagctctgtccccgcagcctcgcgggctgccgggctttgtggttcgcccgtgccgctgggcccctgctgggggtgtcgttacgagcatgtgcagacagcagcccaagccttcaggataattccttcagcagcaccactgtaacagagcctgagagaaggggagagaggtgtgccaaagtgtgcatctgcaggccgaagatgaggcctggacttcctgctccaggtgcacaggtgtgacgaagatccagtctctctacatgaagaccagactgattgctccagtctcagagatgaaaacaataaagagaactaccccgacgcaggggctctggtagaagagcacgcgccgccctcttgggagccgcagcagcagaatgtagaggcgaccgtgctggtggacagcgtattgcgacccagcatgggcaacttcaagt

SEQ ID NO: 131970 - DNA, 459 bp, Homo sapiens
  Payload ID: 5764
  Gene Symbol: FAM13C
  Gene Name: family with sequence similarity 13, member C
  ENST ID: ENST00000512919
  CDS Start-End: 385-459
attcacagctctgtagtccggggctgggcgcttcctctctgggactgaaataagagcgctctagacagatcagccttcaggataattccttcagcagcaccactgtaacagagcctgagagaaggggagagaggtgtgccaaagtgtgcatctgcaggccgaagatgaggcctggacttcctgctccaggtgcacaggtgtgacgaagatccagtctctctacatgaagaccagactgattgctccagtctcagagatgaaaacaataaagagaactaccccgacgcaggggctctggtagaagagcacgcgccgccctcttgggagccgcagcagcagaatgtagaggcgaccgtgctggtggacagcgtattgcgacccagcatgggcaacttcaagtccaggaagcccaagtccatcttcaaagcggagagcgggaggagccacggagaaagtcag

SEQ ID NO: 131971 - DNA, 561 bp, Homo sapiens
  Payload ID: 5764
  Gene Symbol: FAM13C
  Gene Name: family with sequence similarity 13, member C
  ENST ID: ENST00000468696
  CDS Start-End: 1-405
agcaggctgctctatcacatcactgatggtgataacccactgctgtcgccacgatgctccatcttcagccaaagccagagattcaacttagaccccgagtcagccccatctccacccagcactcagcagtttatgatgccgcggagttcttcacgctgcagctgtggagatggcaaggagccacagaccatcacccagctcaccaagcacatccagagcctcaagcggaaaattcggaaatttgaagaaaaatttgaacaagaaaagaaataccggccttcacatggtgacaagacttctaatcctgaagtcctgaaatggatgaatgatttggctaaaggtcgtaaacagctcaaaggtaaatcccagccaaagatcttttttcctcacaaaggaagcagttaaactagtgataatgtgctccagagcattttagattcatttccacctgtgccctcttgcaccttgttttctgcttagactgtaactcccttttgaaataaagcaccctgtatctctgtcattgtttggccccatgtaataaacctccttacaaagaaa

SEQ ID NO: 131972 - DNA, 3458 bp, Homo sapiens
  Payload ID: 5764
  Gene Symbol: FAM13C
  Gene Name: family with sequence similarity 13, member C
  Uniprot ID: Q8NE31
  ENST ID: ENST00000618427
  CDS Start-End: 469-1974
gtgcagacagcagcccaaggtagagcgagcgtgccgggcgagcccggagacttgccttgcaatgccatgtttgtgtatgtgctctaactcccggagagcaatcagggagacggctccccggccagacttggctgatgttttcttgtttctgtttcagccttcaggataattccttcagcagcaccactgtaacagagcctgagagaaggggagagaggtgtgccaaagtgtgcatctgcaggccgaagatgaggcctggacttcctgctccaggtgcacaggtgtgacgaagatccagtctctctacatgaagaccagactgattgctccagtctcagagatgaaaacaataaagagaactaccccgacgcaggggctctggtagaagagcacgcgccgccctcttgggagccgcagcagcagaatgtagaggcgaccgtgctggtggacagcgtattgcgacccagcatgggcaacttcaagtccaggaagcccaagtccatcttcaaagcggagagcgggaggagccacggagaaagtcaggagacagagcatgtggtatccagccagtcagagtgtcaggtgagagcaggaacaccagctcatgagagtccacaaaacaatgccttcaagtgccaagaaacagtgcgacttcaaccaagaatagaccagaggactgccatttcgccaaaggatgcttttgaaactcggcaggacttaaatgaggaagaagctgctcaggtgcatggagtcaaggacccggcgccagcatcaacccagagcgtgcttgccgatgggacagattctgcagacccctcaccagtccacaaagatgggcagaatgaggccgacagtgcaccagaagacctccactctgtggggaccagcaggctgctctatcacatcactgatggtgataacccactgctgtcgccacgatgctccatcttcagccaaagccagagattcaacttagaccccgagtcagccccatctccacccagcactcagcagtttatgatgccgcggagttcttcacgctgcagctgtggagatggcaaggagccacagaccatcacccagctcaccaagcacatccagagcctcaagcggaaaattcggaaatttgaagaaaaatttgaacaagaaaagaaataccggccttcacatggtgacaagacttctaatcctgaagtcctgaaatggatgaatgatttggctaaaggtcgtaaacagctcaaagaactaaagctaaagctgtcagaagaacaagggagtgctcccaaaggtccacctagaaacctgttgtgtgagcaacccacagtccccagagaaaatgggaaaccggaagctgcgggcccggagccaagctcctctggagaagagactccagatgctgccttgacatgcctgaaggagagaagagagcaacttcctccccaggaggattctaaggtaactaagcaagacaagaacctcataaagccgctttatgaccgatacagaattatcaagcaaatcttgtcaacaccttcccttattccaacaattgaggaagaggactctgatgaagaccgtccacagggaagccaacaaccttctttggcagatccagcatctcaccttcctgttggtgaccacctcacctactctaatgagactgagcctgttagggcccttttaccagatgaaaagaaagaagtaaaaccaccagctctctccatgtctaatttacatgaggctaccatgcctgtacttcttgaccatctccgagaaactagggctgacaagaagagactgcggaaagccttaagagaatttgaagaacagttttttaaacaaacaggaagaagtccacaaaaggaagataggataccaatggcagatgagtattatgaatataagcacataaaagccaaactgagactattagaggtcctcatcagcaagcaagatgtggccaaaactatttgaggttcaggaaatgttatgatcactttcacccatgatataaagtaaagtttattttcctctgccatccttgctaagtagttttgacacaatgaaaatggaagcactttagtggtagtattagctgtttttaagaaggaatagcaagtttaattatatacaaggagaagggatttaaacggggggaagaatacaacaggtagccatataattgggaaaaaattcagtgtcctccatgccaagcagaaaactcatagtcaatacaagtatttttaaaaatgtctaatattttatcaaatctaaataacatagctaggacacttgttagggaaagtttatttagtatccaaagactgtttatgttgatgtatggaaaagagcatgattttaaaaaatcaatcataggaggaaaagaaattcgcttttcaagtaggaaggaatacagctagcaagaaagcaatttatttgaaacttctaatggatttttgagtgataaaacatttactaccttgtcctttaagtctgctaggctctcagtaccctaaaataaactagattgtgttgctatttttttctttctctataaaaataacacattattttatccgttatttgaaattttacatttctggttaccaaagttcattctgatagcatgtactttgtgaattattatctttgtctataactgacagatgtttatattaaaataaaatattgtattaaaaatttaaaataggtattttggatagatatgtgtctgtagtatataatctaatgtgtccatagtattattgctaatcttttggtttactataagatgatataactattttttcattgggaatatacatttttcttaatgttccaacatctatactttgtaaagtcaaaacatttcccatgagctgtagttattcatccttctgtacaaaatgaaaagtttggaaattgtttgccctgataccttgaaaaagaagccagaatatttatttgcttcatcaacttcagtgtatatcattttgtgttattttatacgaaaacatgtttattattttcatttttgtaaaaggaagtaaaaggtcaacattttctctcatgtaccaaccttgtttgtatttctattttctgtaatgtttaagtatgatgttgaagaaattcacattctcttatagtttggatgggaagactattgactatttcagaaacagacttatttcagaggcttattgttttctctgtatttacctaatattttataacttttatgaatcagaataatgtccttcataaatttgtttaattgaagtcatctacttctaacaggacagatacacaactatttgaggtttacaaattacatctttgataagggaaatggtttcgtgacatgtacacagttgctattaaaatgtaactctatatattctatatgattgtaaatattttatacaacaatacaaataaaatatttttctattatattt

SEQ ID NO: 131973 - DNA, 3033 bp, Homo sapiens
  Payload ID: 5764
  Gene Symbol: FAM13C
  Gene Name: family with sequence similarity 13, member C
  Uniprot ID: Q8NE31
  ENST ID: ENST00000611933
  CDS Start-End: 135-1598
gtgcagacagcagcccaaggtagagcgagcgtgccgggcgagcccggagacttgccttgcaatgccatgtttgtgtatgtgctctaactcccggagagcaatcagggagacggctccccggccagacttggctgatgttttcttgtttctgtttcagccttcaggataattccttcagcagcaccactgtaacagagtgtgacgaagatccagtctctctacatgaagaccagactgattgctccagtctcagagatgaaaacaataaagagaactaccccgacgcaggggctctggtagaagagcacgcgccgccctcttgggagccgcagcagcagaatgtagaggcgaccgtgctggtggacagcgtattgcgacccagcatgggcaacttcaagtccaggaagcccaagtccatcttcaaagcggagagcgggaggagccacggagaaagtcaggagacagagcatgtggtatccagccagtcagagtgtcaggtgagagcaggaacaccagctcatgagagtccacaaaacaatgccttcaagtgccaagaaacagtgcgacttcaaccaagaatagaccagaggactgccatttcgccaaaggatgcttttgaaactcggcaggacttaaatgaggaagaagctgctcaggtgcatggagtcaaggacccggcgccagcatcaacccagagcgtgcttgccgatgggacagattctgcagacccctcaccagtccacaaagatgggcagaatgaggccgacagtgcaccagaagacctccactctgtggggaccagcaggctgctctatcacatcactgatggtgataacccactgctgtcgccacgatgctccatcttcagccaaagccagagattcaacttagaccccgagtcagccccatctccacccagcactcagcagtttatgatgccgcggagttcttcacgctgcagctgtggagatggcaaggagccacagaccatcacccagctcaccaagcacatccagagcctcaagcggaaaattcggaaatttgaagaaaaatttgaacaagaaaagaaataccgggtaactaagcaagacaagaacctcataaagccgctttatgaccgatacagaattatcaagcaaatcttgtcaacaccttcccttattccaacaattcaggaggaagaggactctgatgaagaccgtccacagggaagccaacaaccttctttggcagatccagcatctcaccttcctgttggtgaccacctcacctactctaatgagactgagcctgttagggcccttttaccagatgaaaagaaagaagtaaaaccaccagctctctccatgtctaatttacatgaggctaccatgcctgtacttcttgaccatctccgagaaactagggctgacaagaagagactgcggaaagccttaagagaatttgaagaacagttttttaaacaaacaggaagaagtccacaaaaggaagataggataccaatggcagatgagtattatgaatataagcacataaaagccaaactgagactattagaggtcctcatcagcaagcaagatgtggccaaaactatttgaggttcaggaaatgttatgatcactttcacccatgatataaagtaaagtttattttcctctgccatccttgctaagtagttttgacacaatgaaaatggaagcactttagtggtagtattagctgtttttaagaaggaatagcaagtttaattatatacaaggagaagggatttaaacggggggaagaatacaacaggtagccatataattgggaaaaaattcagtgtcctccatgccaagcagaaaactcatagtcaatacaagtatttttaaaaatgtctaatattttatcaaatctaaataacatagctaggacacttgttagggaaagtttatttagtatccaaagactgtttatgttgatgtatggaaaagagcatgattttaaaaaatcaatcataggaggaaaagaaattcgcttttcaagtaggaaggaatacagctagcaagaaagcaatttatttgaaacttctaatggatttttgagtgataaaacatttactaccttgtcctttaagtctgctaggctctcagtaccctaaaataaactagattgtgttgctatttttttctttctctataaaaataacacattattttatccgttatttgaaattttacatttctggttaccaaagttcattctgatagcatgtactttgtgaattattatctttgtctataactgacagatgtttatattaaaataaaatattgtattaaaaatttaaaataggtattttggatagatatgtgtctgtagtatataatctaatgtgtccatagtattattgctaatcttttggtttactataagatgatataactattttttcattgggaatatacatttttcttaatgttccaacatctatactttgtaaagtcaaaacatttcccatgagctgtagttattcatccttctgtacaaaatgaaaagtttggaaattgtttgccctgataccttgaaaaagaagccagaatatttatttgcttcatcaacttcagtgtatatcattttgtgttattttatacgaaaacatgtttattattttcatttttgtaaaaggaagtaaaaggtcaacattttctctcatgtaccaaccttgtttgtatttctattttctgtaatgtttaagtatgatgttgaagaaattcacattctcttatagtttggatgggaagactattgactatttcagaaacagacttatttcagaggcttattgttttctctgtatttacctaatattttataacttttatgaatcagaataatgtccttcataaatttgtttaattgaagtcatctacttctaacaggacagatacacaactatttgaggtttacaaattacatctttgataagggaaatggtttcgtgacatgtacacagttgctattaaaatgtaactctatatattctatatgatt

SEQ ID NO: 131974 - DNA, 3333 bp, Homo sapiens
  Payload ID: 5764
  Gene Symbol: FAM13C
  Gene Name: family with sequence similarity 13, member C
  Uniprot ID: Q8NE31
  ENST ID: ENST00000618804
  CDS Start-End: 91-1848
cggagacttgccttgcaatgccatgtttgtgtatgtgctctaactcccggagagcaatcagggagacggctccccggccagacttggctgatgttttcttgtttctgtttcagccttcaggataattccttcagcagcaccactgtaacagagtgtgacgaagatccagtctctctacatgaagaccagactgattgctccagtctcagagatgaaaacaataaagagaactaccccgacgcaggggctctggtagaagagcacgcgccgccctcttgggagccgcagcagcagaatgtagaggcgaccgtgctggtggacagcgtattgcgacccagcatgggcaacttcaagtccaggaagcccaagtccatcttcaaagcggagagcgggaggagccacggagaaagtcaggagacagagcatgtggtatccagccagtcagagtgtcaggtgagagcaggaacaccagctcatgagagtccacaaaacaatgccttcaagtgccaagaaacagtgcgacttcaaccaagaatagaccagaggactgccatttcgccaaaggatgcttttgaaactcggcaggacttaaatgaggaagaagctgctcaggtgcatggagtcaaggacccggcgccagcatcaacccagagcgtgcttgccgatgggacagattctgcagacccctcaccagtccacaaagatgggcagaatgaggccgacagtgcaccagaagacctccactctgtggggaccagcaggctgctctatcacatcactgatggtgataacccactgctgtcgccacgatgctccatcttcagccaaagccagagattcaacttagaccccgagtcagccccatctccacccagcactcagcagtttatgatgccgcggagttcttcacgctgcagctgtggagatggcaaggagccacagaccatcacccagctcaccaagcacatccagagcctcaagcggaaaattcggaaatttgaagaaaaatttgaacaagaaaagaaataccggccttcacatggtgacaagacttctaatcctgaagtcctgaaatggatgaatgatttggctaaaggtcgtaaacagctcaaagaactaaagctaaagctgtcagaagaacaagggagtgctcccaaaggtccacctagaaacctgttgtgtgagcaacccacagtccccagagaaaatgggaaaccggaagctgcgggcccggagccaagctcctctggagaagagactccagatgctgccttgacatgcctgaaggagagaagagagcaacttcctccccaggaggattctaaggtaactaagcaagacaagaacctcataaagccgctttatgaccgatacagaattatcaagcaaatcttgtcaacaccttcccttattccaacaattcaggaggaagaggactctgatgaagaccgtccacagggaagccaacaaccttctttggcagatccagcatctcaccttcctgttggtgaccacctcacctactctaatgagactgagcctgttagggcccttttaccagatgaaaagaaagaagtaaaaccaccagctctctccatgtctaatttacatgaggctaccatgcctgtacttcttgaccatctccgagaaactagggctgacaagaagagactgcggaaagccttaagagaatttgaagaacagttttttaaacaaacaggaagaagtccacaaaaggaagataggataccaatggcagatgagtattatgaatataagcacataaaagccaaactgagactattagaggtcctcatcagcaagcaagatgtggccaaaactatttgaggttcaggaaatgttatgatcactttcacccatgatataaagtaaagtttattttcctctgccatccttgctaagtagttttgacacaatgaaaatggaagcactttagtggtagtattagctgtttttaagaaggaatagcaagtttaattatatacaaggagaagggatttaaacggggggaagaatacaacaggtagccatataattgggaaaaaattcagtgtcctccatgccaagcagaaaactcatagtcaatacaagtatttttaaaaatgtctaatattttatcaaatctaaataacatagctaggacacttgttagggaaagtttatttagtatccaaagactgtttatgttgatgtatggaaaagagcatgattttaaaaaatcaatcataggaggaaaagaaattcgcttttcaagtaggaaggaatacagctagcaagaaagcaatttatttgaaacttctaatggatttttgagtgataaaacatttactaccttgtcctttaagtctgctaggctctcagtaccctaaaataaactagattgtgttgctatttttttctttctctataaaaataacacattattttatccgttatttgaaattttacatttctggttaccaaagttcattctgatagcatgtactttgtgaattattatctttgtctataactgacagatgtttatattaaaataaaatattgtattaaaaatttaaaataggtattttggatagatatgtgtctgtagtatataatctaatgtgtccatagtattattgctaatcttttggtttactataagatgatataactattttttcattgggaatatacatttttcttaatgttccaacatctatactttgtaaagtcaaaacatttcccatgagctgtagttattcatccttctgtacaaaatgaaaagtttggaaattgtttgccctgataccttgaaaaagaagccagaatatttatttgcttcatcaacttcagtgtatatcattttgtgttattttatacgaaaacatgtttattattttcatttttgtaaaaggaagtaaaaggtcaacattttctctcatgtaccaaccttgtttgtatttctattttctgtaatgtttaagtatgatgttgaagaaattcacattctcttatagtttggatgggaagactattgactatttcagaaacagacttatttcagaggcttattgttttctctgtatttacctaatattttataacttttatgaatcagaataatgtccttcataaatttgtttaattgaagtcatctacttctaacaggacagatacacaactatttgaggtttacaaattacatctttgataagggaaatggtttcgtgacatgtacacagttgctattaaaatgtaactctatatattctatatgattgtaaatattttatacaacaatacaaataaaatatttttctattatattta

SEQ ID NO: 131975 - DNA, 3388 bp, Homo sapiens
  Payload ID: 5764
  Gene Symbol: FAM13C
  Gene Name: family with sequence similarity 13, member C
  ENST ID: ENST00000614220
  CDS Start-End: 88-1908
agacttgccttgcaatgccatgtttgtgtatgtgctctaactcccggagagcaatcagggagacggctccccggccagacttggctgatgttttcttgtttctgtttcagccttcaggataattccttcagcagcaccactgtaacagagtgtgacgaagatccagtctctctacatgaagaccagactgattgctccagtctcagagatgaaaacaataaagagaactaccccgacgcaggggctctggtagaagagcacgcgccgccctcttgggagccgcagcagcagaatgtagaggcgaccgtgctggtggacagcgtattgcgacccagcatgggcaacttcaagtccaggaagcccaagtccatcttcaaagcggagagcgggaggagccacggagaaagtcaggagacagagcatgtggtatccagccagtcagagtgtcaggtgagagcaggaacaccagctcatgagagtccacaaaacaatgccttcaagtgccaagaaacagtgcgacttcaaccaagaatagaccagaggactgccatttcgccaaaggatgcttttgaaactcggcaggacttaaatgagaattccttgctgaagctgcaagccctcgaatctgatctgtgctctgcatttttaacaaaccaggaagaagctgctcaggtgcatggagtcaaggacccggcgccagcatcaacccagagcgtgcttgccgatgggacagattctgcagacccctcaccagtccacaaagatgggcagaatgaggccgacagtgcaccagaagacctccactctgtggggaccagcaggctgctctatcacatcactgatggtgataacccactgctgtcgccacgatgctccatcttcagccaaagccagagattcaacttagaccccgagtcagccccatctccacccagcactcagcagtttatgatgccgcggagttcttcacgctgcagctgtggagatggcaaggagccacagaccatcacccagctcaccaagcacatccagagcctcaagcggaaaattcggaaatttgaagaaaaatttgaacaagaaaagaaataccggccttcacatggtgacaagacttctaatcctgaagtcctgaaatggatgaatgatttggctaaaggtcgtaaacagctcaaagaactaaagctaaagctgtcagaagaacaagggagtgctcccaaaggtccacctagaaacctgttgtgtgagcaacccacagtccccagagaaaatgggaaaccggaagctgcgggcccggagccaagctcctctggagaagagactccagatgctgccttgacatgcctgaaggagagaagagagcaacttcctccccaggaggattctaaggtaactaagcaagacaagaacctcataaagccgctttatgaccgatacagaattatcaagcaaatcttgtcaacaccttcccttattccaacaattcaggaggaagaggactctgatgaagaccgtccacagggaagccaacaaccttctttggcagatccagcatctcaccttcctgttggtgaccacctcacctactctaatgagactgagcctgttagggcccttttaccagatgaaaagaaagaagtaaaaccaccagctctctccatgtctaatttacatgaggctaccatgcctgtacttcttgaccatctccgagaaactagggctgacaagaagagactgcggaaagccttaagagaatttgaagaacagttttttaaacaaacaggaagaagtccacaaaaggaagataggataccaatggcagatgagtattatgaatataagcacataaaagccaaactgagactattagaggtcctcatcagcaagcaagatgtggccaaaactatttgaggttcaggaaatgttatgatcactttcacccatgatataaagtaaagtttattttcctctgccatccttgctaagtagttttgacacaatgaaaatggaagcactttagtggtagtattagctgtttttaagaaggaatagcaagtttaattatatacaaggagaagggatttaaacggggggaagaatacaacaggtagccatataattgggaaaaaattcagtgtcctccatgccaagcagaaaactcatagtcaatacaagtatttttaaaaatgtctaatattttatcaaatctaaataacatagctaggacacttgttagggaaagtttatttagtatccaaagactgtttatgttgatgtatggaaaagagcatgattttaaaaaatcaatcataggaggaaaagaaattcgcttttcaagtaggaaggaatacagctagcaagaaagcaatttatttgaaacttctaatggatttttgagtgataaaacatttactaccttgtcctttaagtctgctaggctctcagtaccctaaaataaactagattgtgttgctatttttttctttctctataaaaataacacattattttatccgttatttgaaattttacatttctggttaccaaagttcattctgatagcatgtactttgtgaattattatctttgtctataactgacagatgtttatattaaaataaaatattgtattaaaaatttaaaataggtattttggatagatatgtgtctgtagtatataatctaatgtgtccatagtattattgctaatcttttggtttactataagatgatataactattttttcattgggaatatacatttttcttaatgttccaacatctatactttgtaaagtcaaaacatttcccatgagctgtagttattcatccttctgtacaaaatgaaaagtttggaaattgtttgccctgataccttgaaaaagaagccagaatatttatttgcttcatcaacttcagtgtatatcattttgtgttattttatacgaaaacatgtttattattttcatttttgtaaaaggaagtaaaaggtcaacattttctctcatgtaccaaccttgtttgtatttctattttctgtaatgtttaagtatgatgttgaagaaattcacattctcttatagtttggatgggaagactattgactatttcagaaacagacttatttcagaggcttattgttttctctgtatttacctaatattttataacttttatgaatcagaataatgtccttcataaatttgtttaattgaagtcatctacttctaacaggacagatacacaactatttgaggtttacaaattacatctttgataagggaaatggtttcgtgacatgtacacagttgctattaaaatgtaactctatatattctatatgattgtaaatattttatacaacaatacaaataaaatatttttctattat

SEQ ID NO: 131976 - DNA, 585 bp, Homo sapiens
  Payload ID: 5764
  Gene Symbol: FAM13C
  Gene Name: family with sequence similarity 13, member C
  ENST ID: ENST00000489341
  CDS Start-End: 1-149
agaggactgccatttcgccaaaggatgcttttgaaactcggcaggacttaaatgaggaagaagctgctcaggtgcatggagtcaaggacccggcgccagcatcaacccagagcgtgcttgccgatgggacagattctgcaggtaactaagcaagacaagaacctcataaagccgctttatgaccgatacagaattatcaagcaaatcttgtcaacaccttcccttattccaacaattcaggaggaagaggactctgatgaagaccgtccacagggaagccaacaaccttctttggcagatccagcatctcaccttcctgttggtgaccacctcacctactctaatgagactgagcctgttagggcccttttaccagatgaaaagaaagaagtaaaaccaccagctctctccatgtctaatttacatgaggctaccatgcctgtacttcttgaccatctccgagaaactagggctgacaagaagagactgcggaaagccttaagagaatttgaagaacagttttttaaacaaacaggaagaagtccacaaaaggaagataggataccaatggcagatgagtattat

SEQ ID NO: 131977 - DNA, 3448 bp, Homo sapiens
  Payload ID: 5764
  Gene Symbol: FAM13C
  Gene Name: family with sequence similarity 13, member C
  ENST ID: ENST00000622363
  CDS Start-End: 131-283
agacagcagcccaaggtagagcgagcgtgccgggcgagcccggagacttgccttgcaatgccatgtttgtgtatgtgctctaactcccggagagcaatcagggagacggctccccggccagacttggctgatgttttcttgtttctgtttcagccttcaggataattccttcagcagcaccactgtaacagagcctgagagaaggggagagaggtgtgccaaagtgtgcatctgcaggccgaagatgaggcctggacttcctgctccaggtgcacaggtgtgacgaagatccagtctctctacatgaagaccagactgattgctccagtctcagagatgaaaacaataaagagaactaccccgacgcaggggctctggtagaagagcacgcgccgccctcttgggagccgcagcagcagaatgtagaggcgaccgtgctggtggacagcgtattgcgacccagcatgggcaacttcaagtccaggaagcccaagtccatcttcaaagcggagagcgggaggagccacggagaaagtcaggagacagagcatgtggtatccagccagtcagagtgtcaggtgagagcaggaacaccagctcatgagagtccacaaaacaatgccttcaagtgccaagaaacagtgcgacttcaaccaagaatagaccagaggactgccatttcgccaaaggatgcttttgaaactcggcaggacttaaatgaggaagaagctgctcaggtgcatggagtcaaggacccggcgccagcatcaacccagagcgtgcttgccgatgggacagattctgcagacccctcaccagtccacaaagatgggcagaatgaggccgacagtgcaccagaagacctccactctgtggggaccagcaggctgctctatcacatcactgatggtgataacccactgctgtcgccacgatgctccatcttcagccaaagccagagattcaacttagaccccgagtcagccccatctccacccagcactcagcagtttatgatgccgcggagttcttcacgctgcagctgtggagatggcaaggagccacagaccatcacccagctcaccaagcacatccagagcctcaagcggaaaattcggaaatttgaagaaaaatttgaacaagaaaagaaataccggccttcacatggtgacaagacttctaatcctgaagtcctgaaatggatgaatgatttggctaaaggtcgtaaacagctcaaagaactaaagctaaagctgtcagaagaacaagggagtgctcccaaaggtccacctagaaacctgttgtgtgagcaacccacagtccccagagaaaatgggaaaccggaagctgcgggcccggagccaagctcctctggagaagagactccagatgctgccttgacatgcctgaaggagagaagagagcaacttcctccccaggaggattctaaggtaactaagcaagacaagaacctcataaagccgctttatgaccgatacagaattatcaagcaaatcttgtcaacaccttcccttattccaacaattgaggaagaggactctgatgaagaccgtccacagggaagccaacaaccttctttggcagatccagcatctcaccttcctgttggtgaccacctcacctactctaatgagactgagcctgttagggcccttttaccagatgaaaagaaagaagtaaaaccaccagctctctccatgtctaatttacatgaggctaccatgcctgtacttcttgaccatctccgagaaactagggctgacaagaagagactgcggaaagccttaagagaatttgaagaacagttttttaaacaaacaggaagaagtccacaaaaggaagataggataccaatggcagatgagtattatgaatataagcacataaaagccaaactgagactattagaggtcctcatcagcaagcaagatgtggccaaaactatttgaggttcaggaaatgttatgatcactttcacccatgatataaagtaaagtttattttcctctgccatccttgctaagtagttttgacacaatgaaaatggaagcactttagtggtagtattagctgtttttaagaaggaatagcaagtttaattatatacaaggagaagggatttaaacggggggaagaatacaacaggtagccatataattgggaaaaaattcagtgtcctccatgccaagcagaaaactcatagtcaatacaagtatttttaaaaatgtctaatattttatcaaatctaaataacatagctaggacacttgttagggaaagtttatttagtatccaaagactgtttatgttgatgtatggaaaagagcatgattttaaaaaatcaatcataggaggaaaagaaattcgcttttcaagtaggaaggaatacagctagcaagaaagcaatttatttgaaacttctaatggatttttgagtgataaaacatttactaccttgtcctttaagtctgctaggctctcagtaccctaaaataaactagattgtgttgctatttttttctttctctataaaaataacacattattttatccgttatttgaaattttacatttctggttaccaaagttcattctgatagcatgtactttgtgaattattatctttgtctataactgacagatgtttatattaaaataaaatattgtattaaaaatttaaaataggtattttggatagatatgtgtctgtagtatataatctaatgtgtccatagtattattgctaatcttttggtttactataagatgatataactattttttcattgggaatatacatttttcttaatgttccaacatctatactttgtaaagtcaaaacatttcccatgagctgtagttattcatccttctgtacaaaatgaaaagtttggaaattgtttgccctgataccttgaaaaagaagccagaatatttatttgcttcatcaacttcagtgtatatcattttgtgttattttatacgaaaacatgtttattattttcatttttgtaaaaggaagtaaaaggtcaacattttctctcatgtaccaaccttgtttgtatttctattttctgtaatgtttaagtatgatgttgaagaaattcacattctcttatagtttggatgggaagactattgactatttcagaaacagacttatttcagaggcttattgttttctctgtatttacctaatattttataacttttatgaatcagaataatgtccttcataaatttgtttaattgaagtcatctacttctaacaggacagatacacaactatttgaggtttacaaattacatctttgataagggaaatggtttcgtgacatgtacacagttgctattaaaatgtaactctatatattctatatgattgtaaatattttatacaacaatacaaataaaatatttttctatt

SEQ ID NO: 131978 - DNA, 3400 bp, Homo sapiens
  Payload ID: 5764
  Gene Symbol: FAM13C
  Gene Name: family with sequence similarity 13, member C
  ENST ID: ENST00000621119
  CDS Start-End: 105-1922
gtgccgggcgagcccggagacttgccttgcaatgccatgtttgtgtatgtgctctaactcccggagagcaatcagggagacggctccccggccagacttggctgatgttttcttgtttctgtttcagccttcaggataattccttcagcagcaccactgtaacagagtgtgacgaagatccagtctctctacatgaagaccagactgattgctccagtctcagagatgaaaacaataaagagaactaccccgacgcaggggctctggtagaagagcacgcgccgccctcttgggagccgcagcagcagaatgtagaggcgaccgtgctggtggacagcgtattgcgacccagcatgggcaacttcaagtccaggaagcccaagtccatcttcaaagcggagagcgggaggagccacggagaaagtcaggagacagagcatgtggtatccagccagtcagagtgtcaggtgagagcaggaacaccagctcatgagagtccacaaaacaatgccttcaagtgccaagaaacagtgcgacttcaaccaagaatagaccagaggactgccatttcgccaaaggatgcttttgaaactcggcaggacttaaatgagaattccttgctgaagctgcaagccctcgaatctgatctgtgctctgcatttttaacaaaccaggaagaagctgctcaggtgcatggagtcaaggacccggcgccagcatcaacccagagcgtgcttgccgatgggacagattctgcagacccctcaccagtccacaaagatgggcagaatgaggccgacagtgcaccagaagacctccactctgtggggaccagcaggctgctctatcacatcactgatggtgataacccactgctgtcgccacgatgctccatcttcagccaaagccagagattcaacttagaccccgagtcagccccatctccacccagcactcagcagtttatgatgccgcggagttcttcacgctgcagctgtggagatggcaaggagccacagaccatcacccagctcaccaagcacatccagagcctcaagcggaaaattcggaaatttgaagaaaaatttgaacaagaaaagaaataccggccttcacatggtgacaagacttctaatcctgaagtcctgaaatggatgaatgatttggctaaaggtcgtaaacagctcaaagaactaaagctaaagctgtcagaagaacaagggagtgctcccaaaggtccacctagaaacctgttgtgtgagcaacccacagtccccagagaaaatgggaaaccggaagctgcgggcccggagccaagctcctctggagaagagactccagatgctgccttgacatgcctgaaggagagaagagagcaacttcctccccaggaggattctaaggtaactaagcaagacaagaacctcataaagccgctttatgaccgatacagaattatcaagcaaatcttgtcaacaccttcccttattccaacaattgaggaagaggactctgatgaagaccgtccacagggaagccaacaaccttctttggcagatccagcatctcaccttcctgttggtgaccacctcacctactctaatgagactgagcctgttagggcccttttaccagatgaaaagaaagaagtaaaaccaccagctctctccatgtctaatttacatgaggctaccatgcctgtacttcttgaccatctccgagaaactagggctgacaagaagagactgcggaaagccttaagagaatttgaagaacagttttttaaacaaacaggaagaagtccacaaaaggaagataggataccaatggcagatgagtattatgaatataagcacataaaagccaaactgagactattagaggtcctcatcagcaagcaagatgtggccaaaactatttgaggttcaggaaatgttatgatcactttcacccatgatataaagtaaagtttattttcctctgccatccttgctaagtagttttgacacaatgaaaatggaagcactttagtggtagtattagctgtttttaagaaggaatagcaagtttaattatatacaaggagaagggatttaaacggggggaagaatacaacaggtagccatataattgggaaaaaattcagtgtcctccatgccaagcagaaaactcatagtcaatacaagtatttttaaaaatgtctaatattttatcaaatctaaataacatagctaggacacttgttagggaaagtttatttagtatccaaagactgtttatgttgatgtatggaaaagagcatgattttaaaaaatcaatcataggaggaaaagaaattcgcttttcaagtaggaaggaatacagctagcaagaaagcaatttatttgaaacttctaatggatttttgagtgataaaacatttactaccttgtcctttaagtctgctaggctctcagtaccctaaaataaactagattgtgttgctatttttttctttctctataaaaataacacattattttatccgttatttgaaattttacatttctggttaccaaagttcattctgatagcatgtactttgtgaattattatctttgtctataactgacagatgtttatattaaaataaaatattgtattaaaaatttaaaataggtattttggatagatatgtgtctgtagtatataatctaatgtgtccatagtattattgctaatcttttggtttactataagatgatataactattttttcattgggaatatacatttttcttaatgttccaacatctatactttgtaaagtcaaaacatttcccatgagctgtagttattcatccttctgtacaaaatgaaaagtttggaaattgtttgccctgataccttgaaaaagaagccagaatatttatttgcttcatcaacttcagtgtatatcattttgtgttattttatacgaaaacatgtttattattttcatttttgtaaaaggaagtaaaaggtcaacattttctctcatgtaccaaccttgtttgtatttctattttctgtaatgtttaagtatgatgttgaagaaattcacattctcttatagtttggatgggaagactattgactatttcagaaacagacttatttcagaggcttattgttttctctgtatttacctaatattttataacttttatgaatcagaataatgtccttcataaatttgtttaattgaagtcatctacttctaacaggacagatacacaactatttgaggtttacaaattacatctttgataagggaaatggtttcgtgacatgtacacagttgctattaaaatgtaactctatatattctatatgattgtaaatattttatacaacaatacaaataaaatatttttctatt

SEQ ID NO: 131979 - DNA, 596 bp, Homo sapiens
  Payload ID: 5764
  Gene Symbol: FAM13C
  Gene Name: family with sequence similarity 13, member C
  ENST ID: ENST00000619059
  CDS Start-End: 63-215
gtgtatgtgctctaactcccggagagcaatcagggagacggctccccggccagacttggctgatgttttcttgtttctgtttcagccttcaggataattccttcagcagcaccactgtaacagagcctgagagaaggggagagaggtgtgccaaagtgtgcatctgcaggccgaagatgaggcctggacttcctgctccaggtgcacaggtgtgacgaagatccagtctctctacatgaagaccagactgattgctccagtctcagagatgaaaacaataaagagaactaccccgacgcaggggctctggtagaagagcacgcgccgccctcttgggagccgcagcagcagaatgtagaggcgaccgtgctggtggacagcgtattgcgacccagcatgggcaacttcaagtccaggaagcccaagtccatcttcaaagcggagagcgggaggagccacggagaaagtcagaatacataccctactttaatgttctacaatttttgagccgaatgttacagccgattctaaacagagtgatgaagcttaaatgggcaaaggagacagagcatgtggtatccagccagtcagagtgt

SEQ ID NO: 131980 - DNA, 3677 bp, Homo sapiens
  Payload ID: 5765
  Gene Symbol: FAM131A
  Gene Name: family with sequence similarity 131, member A
  Uniprot ID: Q6UXB0
  ENST ID: ENST00000310585
  CDS Start-End: 1365-2372
gaacgtgccaccatgcccagctaatttttgtatttttagtagagacggggtttcaccatgttggccaggctggtcttgaactcgtgacctcatgatccgctcacctcggcctcccaaagtgctgggattacaggcatgagccactgacgcctggccagcctatgcatttttaagaaattattctgtattaggtgctgtgctaaacattgggcactacagtgaccaaaacagactgaattccccaagagccaaagaccagtgagggagaccaacaagaaacaggaaatgcaaaagagaccattattactcactatgactaagggccacaaatggggtacgttgatggagagtgatttgttaagagactacagagggaggacagactaccaagaggggggccaggaaagctcctctgacgaggtggtatttcagcccaaactggaagaatgagaaagagctagccagccatcagaatagtccagaagagatggggagcactacactcactacactttggcctgagaaaatagcatgggattggaggaggctgggggaacaccacttctgccgacctgggcaggaggcattgagggcttgagaaagggcaatggcagtagcagtagaaaggacagggtaggagcagggactttgcaggtggaatcattaggtcttatcaacagatatgggcaagcaaagccaggggagaattgatggtaatgctgaggtttggagccaggctagatgggacagtggtgggtgatgcaaaggaaagaggtcaggaagcagggccagacgtggggagaaggtgtgggggtttggtttccatcttgccgagtctgccggaatgtggatgggaagaccaagaggaggagcaaggggcagaggggaagggaatcttaaagaagtcctggatgccacactcttcttccttcctcctcttccctctcctcagaggtctcactcgtggttcttcatttcctgccctgcctccatctcctctgggtgctgggaaagtggaggattagctgaagttttgcttctcggggcctgtctgaatctccattgctttctgggaggacataattcacctgtcctagcttcttatcatcttacatttccctgtagccactgggacatatgtggtgttccttcctagctcctgtctcctcctcatgcctttgctgggtatgggcatgttagggggaaggtcattgctgtcagaggggcactgactttctaatggtgttacccaaggtgaatgttggagacacagtcgcgatgctgcccaagtcccggcgagccctaactatccaggagatcgctgcgctggccaggtcctccctgcatggtatgcagcccctcccatgtttctggccactttgtcctttctcctcccgtttgcacatccctttggaactgtttcctgtgagtacatgctggggtctcccctttcttcccttgctcaggtgaatctcagccccttctcccacccaaaggttcacatggatcctaactactgccacccttccacctccctgcacctgtgctccctggcctggtcctttaccaggcttctccaccctcccctatctccaggtatttcccaggtggtgaaggaccacgtgaccaagcctaccgccatggcccagggccgagtggctcacctcattgagtggaagggctggagcaagccgagtgactcacctgctgccctggaatcagccttttcctcctattcagacctcagcgagggcgaacaagaggctcgctttgcagcaggagtggctgagcagtttgccatcgcggaagccaagctccgagcatggtcttcggtggatggcgaggactccactgatgactcctatgatgaggactttgctgggggaatggacacagacatggctgggcagctgcccctggggccgcacctccaggacctgttcaccggccaccggttctcccggcctgtgcgccagggctccgtggagcctgagagcgactgctcacagaccgtgtccccagacaccctgtgctctagtctgtgcagcctggaggatgggttgttgggctccccggcccggctggcctcccagctgctgggcgatgagctgcttctcgccaaactgccccccagccgggaaagtgccttccgcagcctgggcccactggaggcccaggactcactctacaactcgcccctcacagagtcctgcctttcccccgcggaggaggagccagccccctgcaaggactgccagccactctgcccaccactaacgggcagctgggaacggcagcggcaagcctctgacctggcctcttctggggtggtgtccttagatgaggatgaggcagagccagaggaacagtgacccacatcatgcctggcagtggcatgcatcccccggctgctgccaggggcagagcctctgtgcccaagtgtgggctcaaggctcccagcagagctccacagcctagagggctcctgggagcgctcgcttctccgttgtgtgttttgcatgaaagtgtttggagaggaggcaggggctgggctgggggcgcatgtcctgcccccactcccggggcttgccgggggttgcccggggcctctggggcatggctacagctgtggcagacagtgatgttcatgttcttaaaatgccacacacacatttcctcctcggataatgtgaaccactaagggggttgtgactgggctgtgtgagggtggggtgggagggggcccagcaaccccccaccctccccatgcctctctcttctctgcttttcttctcacttccgagtccatgtgcagtgcttgatagaatcacccccacctggaggggctggctcctgccctcccggagcctatgggttgagccgtccctcaagggcccctgcccagctgggctcgtgctgtgcttcattcacctctccatcgtctctaaatcttcctcttttttcctaaagacagaaggtttttggtctgttttttcagtcggatcttctcttctctgggaggctttggaatgatgaaagcatgtaccctccacccttttcctggccccctaatggggcctgggccctttcccaacccctcctaggatgtgcgggcagtgtgctggcgcctcacagccagccgggctgcccattcacgcagagctctctgagcgggaggtggaagaaaggatggctctggttgccacagagctgggacttcatgttcttctagagagggccacaagagggccacaggggtggccgggagttgtcagctgatgcctgctgagaggcaggaattgtgccagtgagtgacagtcatgagggagtgtctcttcttggggaggaaagaaggtagagcctttctgtctgaatgaaaggccaaggctacagtacagggccccaccccagccagggtgttaatgcccacgtagtggaggcctctggcagatcctgcattccaaggtcactggactgtacgtttttatggttgtgggaagggtgggtggctttagaattaagggccttgtaggctttggcaggtaagagggcccaaggtaagaacgagagccaacgggcacaagcattctatatataagtggctcattaggtgtttattttgttctatttaagaatttgttttattaaattaatataaaaatctttgtaaatctcta

SEQ ID NO: 131981 - DNA, 2421 bp, Homo sapiens
  Payload ID: 5765
  Gene Symbol: FAM131A
  Gene Name: family with sequence similarity 131, member A
  Uniprot ID: Q6UXB0
  ENST ID: ENST00000340957
  CDS Start-End: 273-1118
ggttccctctccggggagcggcggcggacgcgcggctcccacccctcccctctcacgggctctcccctccccagtgtggccgcgaccctaccctctgcaaggcgatggcccgcgccccgagcgcaggctagcgtgcctgggtgcccggccatgggctgtatcggctctcggagcccggcgggtcaggcatttctggggaccaacagctggccgaggctcagggatagagacggctgctccagctaaaggtgaatgttggagacacagtcgcgatgctgcccaagtcccggcgagccctaactatccaggagatcgctgcgctggccaggtcctccctgcatggtatttcccaggtggtgaaggaccacgtgaccaagcctaccgccatggcccagggccgagtggctcacctcattgagtggaagggctggagcaagccgagtgactcacctgctgccctggaatcagccttttcctcctattcagacctcagcgagggcgaacaagaggctcgctttgcagcaggagtggctgagcagtttgccatcgcggaagccaagctccgagcatggtcttcggtggatggcgaggactccactgatgactcctatgatgaggactttgctgggggaatggacacagacatggctgggcagctgcccctggggccgcacctccaggacctgttcaccggccaccggttctcccggcctgtgcgccagggctccgtggagcctgagagcgactgctcacagaccgtgtccccagacaccctgtgctctagtctgtgcagcctggaggatgggttgttgggctccccggcccggctggcctcccagctgctgggcgatgagctgcttctcgccaaactgccccccagccgggaaagtgccttccgcagcctgggcccactggaggcccaggactcactctacaactcgcccctcacagagtcctgcctttcccccgcggaggaggagccagccccctgcaaggactgccagccactctgcccaccactaacgggcagctgggaacggcagcggcaagcctctgacctggcctcttctggggtggtgtccttagatgaggatgaggcagagccagaggaacagtgacccacatcatgcctggcagtggcatgcatcccccggctgctgccaggggcagagcctctgtgcccaagtgtgggctcaaggctcccagcagagctccacagcctagagggctcctgggagcgctcgcttctccgttgtgtgttttgcatgaaagtgtttggagaggaggcaggggctgggctgggggcgcatgtcctgcccccactcccggggcttgccgggggttgcccggggcctctggggcatggctacagctgtggcagacagtgatgttcatgttcttaaaatgccacacacacatttcctcctcggataatgtgaaccactaagggggttgtgactgggctgtgtgagggtggggtgggagggggcccagcaaccccccaccctccccatgcctctctcttctctgcttttcttctcacttccgagtccatgtgcagtgcttgatagaatcacccccacctggaggggctggctcctgccctcccggagcctatgggttgagccgtccctcaagggcccctgcccagctgggctcgtgctgtgcttcattcacctctccatcgtctctaaatcttcctcttttttcctaaagacagaaggtttttggtctgttttttcagtcggatcttctcttctctgggaggctttggaatgatgaaagcatgtaccctccacccttttcctggccccctaatggggcctgggccctttcccaacccctcctaggatgtgcgggcagtgtgctggcgcctcacagccagccgggctgcccattcacgcagagctctctgagcgggaggtggaagaaaggatggctctggttgccacagagctgggacttcatgttcttctagagagggccacaagagggccacaggggtggccgggagttgtcagctgatgcctgctgagaggcaggaattgtgccagtgagtgacagtcatgagggagtgtctcttcttggggaggaaagaaggtagagcctttctgtctgaatgaaaggccaaggctacagtacagggccccaccccagccagggtgttaatgcccacgtagtggaggcctctggcagatcctgcattccaaggtcactggactgtacgtttttatggttgtgggaagggtgggtggctttagaattaagggccttgtaggctttggcaggtaagagggcccaaggtaagaacgagagccaacgggcacaagcattctatatataagtggctcattaggtgtttattttgttctatttaagaatttgttttattaaattaatataaaaatctttgtaaatctc

SEQ ID NO: 131982 - DNA, 1483 bp, Homo sapiens
  Payload ID: 5765
  Gene Symbol: FAM131A
  Gene Name: family with sequence similarity 131, member A
  Uniprot ID: Q6UXB0
  ENST ID: ENST00000383847
  CDS Start-End: 180-1280
gccctggtgttcccacctcctcagagccatgaggcaggaatgttctccttatgtgactaggcacaggttccaaatggggaggggactggctcagcatccggagccaaaacaggaatagaactgggagctgagcctggagcggttctgggcttttggttctctgcatcaacacagccagcatgcctatgatttctgtgctgggcaaaatgtttctgtggcagcgtgaagggcctggaggacgatggacttgtcagacaagtcgcagagtgtcctcggaccccgcttgggctgtggagtggatcgaacttcctcggggtctctctctatcctctttgggatctgctcgaaccctccgaggctggagcaggtcctcccgcccttcctcggtggacagtcaggacttgccagaggtgaatgttggagacacagtcgcgatgctgcccaagtcccggcgagccctaactatccaggagatcgctgcgctggccaggtcctccctgcatggtatttcccaggtggtgaaggaccacgtgaccaagcctaccgccatggcccagggccgagtggctcacctcattgagtggaagggctggagcaagccgagtgactcacctgctgccctggaatcagccttttcctcctattcagacctcagcgagggcgaacaagaggctcgctttgcagcaggagtggctgagcagtttgccatcgcggaagccaagctccgagcatggtcttcggtggatggcgaggactccactgatgactcctatgatgaggactttgctgggggaatggacacagacatggctgggcagctgcccctggggccgcacctccaggacctgttcaccggccaccggttctcccggcctgtgcgccagggctccgtggagcctgagagcgactgctcacagaccgtgtccccagacaccctgtgctctagtctgtgcagcctggaggatgggttgttgggctccccggcccggctggcctcccagctgctgggcgatgagctgcttctcgccaaactgccccccagccgggaaagtgccttccgcagcctgggcccactggaggcccaggactcactctacaactcgcccctcacagagtcctgcctttcccccgcggaggaggagccagccccctgcaaggactgccagccactctgcccaccactaacgggcagctgggaacggcagcggcaagcctctgacctggcctcttctggggtggtgtccttagatgaggatgaggcagagccagaggaacagtgacccacatcatgcctggcagtggcatgcatcccccggctgctgccaggggcagagcctctgtgcccaagtgtgggctcaaggctcccagcagagctccacagcctagagggctcctgggagcgctcgcttctccgttgtgtgttttgcatgaaagtgtttggagaggaggcaggggctgggctgggggcgcatgtcctgccccc

SEQ ID NO: 131983 - DNA, 1335 bp, Homo sapiens
  Payload ID: 5765
  Gene Symbol: FAM131A
  Gene Name: family with sequence similarity 131, member A
  Uniprot ID: Q6UXB0
  ENST ID: ENST00000450976
  CDS Start-End: 427-1272
gtcaccggcccggttccctctccggggagcggcggcggacgcgcggctcccacccctcccctctcacgggctctcccctccccagtgtggccgcgaccctaccctctgcaaggcgatggcccgcgccccgagcgcaggctagcgtgcctgggtgcccggccatgggctgtatcggctctcggagcccggcgggtcaggcatttctggggaccaacagctggccgaggctcagggatagagacggctgctccagctaaagtgtcctcggaccccgcttgggctgtggagtggatcgaacttcctcggggtctctctctatcctctttgggatctgctcgaaccctccgaggctggagcaggtcctcccgcccttcctcggtggacagtcaggacttgccagaggtgaatgttggagacacagtcgcgatgctgcccaagtcccggcgagccctaactatccaggagatcgctgcgctggccaggtcctccctgcatggtatttcccaggtggtgaaggaccacgtgaccaagcctaccgccatggcccagggccgagtggctcacctcattgagtggaagggctggagcaagccgagtgactcacctgctgccctggaatcagccttttcctcctattcagacctcagcgagggcgaacaagaggctcgctttgcagcaggagtggctgagcagtttgccatcgcggaagccaagctccgagcatggtcttcggtggatggcgaggactccactgatgactcctatgatgaggactttgctgggggaatggacacagacatggctgggcagctgcccctggggccgcacctccaggacctgttcaccggccaccggttctcccggcctgtgcgccagggctccgtggagcctgagagcgactgctcacagaccgtgtccccagacaccctgtgctctagtctgtgcagcctggaggatgggttgttgggctccccggcccggctggcctcccagctgctgggcgatgagctgcttctcgccaaactgccccccagccgggaaagtgccttccgcagcctgggcccactggaggcccaggactcactctacaactcgcccctcacagagtcctgcctttcccccgcggaggaggagccagccccctgcaaggactgccagccactctgcccaccactaacgggcagctgggaacggcagcggcaagcctctgacctggcctcttctggggtggtgtccttagatgaggatgaggcagagccagaggaacagtgacccacatcatgcctggcagtggcatgcatcccccggctgctgccaggggcagagcctctgtgc

SEQ ID NO: 131984 - DNA, 1038 bp, Homo sapiens
  Payload ID: 5765
  Gene Symbol: FAM131A
  Gene Name: family with sequence similarity 131, member A
  Uniprot ID: Q6UXB0
  ENST ID: ENST00000453072
  CDS Start-End: 177-1022
ccgcagctgcgcggagcgccgggcacggatggcggcggctgaggggagcgaagcgagggagggagagcaagctaagaaacacccagcaggtgctcccccgcctaggcctggctggaggctactggcgccaccctgggggccctgtcagccaggtgaatgttggagacacagtcgcgatgctgcccaagtcccggcgagccctaactatccaggagatcgctgcgctggccaggtcctccctgcatggtatttcccaggtggtgaaggaccacgtgaccaagcctaccgccatggcccagggccgagtggctcacctcattgagtggaagggctggagcaagccgagtgactcacctgctgccctggaatcagccttttcctcctattcagacctcagcgagggcgaacaagaggctcgctttgcagcaggagtggctgagcagtttgccatcgcggaagccaagctccgagcatggtcttcggtggatggcgaggactccactgatgactcctatgatgaggactttgctgggggaatggacacagacatggctgggcagctgcccctggggccgcacctccaggacctgttcaccggccaccggttctcccggcctgtgcgccagggctccgtggagcctgagagcgactgctcacagaccgtgtccccagacaccctgtgctctagtctgtgcagcctggaggatgggttgttgggctccccggcccggctggcctcccagctgctgggcgatgagctgcttctcgccaaactgccccccagccgggaaagtgccttccgcagcctgggcccactggaggcccaggactcactctacaactcgcccctcacagagtcctgcctttcccccgcggaggaggagccagccccctgcaaggactgccagccactctgcccaccactaacgggcagctgggaacggcagcggcaagcctctgacctggcctcttctggggtggtgtccttagatgaggatgaggcagagccagaggaacagtgacccacatcatgcctgg

SEQ ID NO: 131985 - DNA, 573 bp, Homo sapiens
  Payload ID: 5765
  Gene Symbol: FAM131A
  Gene Name: family with sequence similarity 131, member A
  ENST ID: ENST00000433578
  CDS Start-End: 204-573
ctccggggagcggcggcggacgcgcggctcccacccctcccctctcacgggctctcccctccccagtgtggccgcgaccctaccctctgcaaggcgatggcccgcgccccgagcgcaggctagcgtgcctgggtgcccggccatgggctgtatcggctctcggagcccggcgggtcagggtgaatgttggagacacagtcgcgatgctgcccaagtcccggcgagccctaactatccaggagatcgctgcgctggccaggtcctccctgcatggtatttcccaggtggtgaaggaccacgtgaccaagcctaccgccatggcccagggccgagtggctcacctcattgagtggaagggctggagcaagccgagtgactcacctgctgccctggaatcagccttttcctcctattcagacctcagcgagggcgaacaagaggctcgctttgcagcaggagtggctgagcagtttgccatcgcggaagccaagctccgagcatggtcttcggtggatggcgaggactccactgatgactcctatgatgaggactttgctgggggaatggacacag

SEQ ID NO: 131986 - DNA, 1664 bp, Homo sapiens
  Payload ID: 5765
  Gene Symbol: FAM131A
  Gene Name: family with sequence similarity 131, member A
  ENST ID: ENST00000418281
  CDS Start-End: 301-1056
accggcccggttccctctccggggagcggcggcggacgcgcggctcccacccctcccctctcacgggctctcccctccccagtgtggccgcgaccctaccctctgcaaggcgatggcccgcgccccgagcgcaggctagcgtgcctgggtgcccggccatgggctgtatcggctctcggagcccggcgggtcaggcatttctggggaccaacagctggccgaggctcagggatagagacggctgctccagctaaaggtatttcccaggtggtgaaggaccacgtgaccaagcctaccgccatggcccagggccgagtggctcacctcattgagtggaagggctggagcaagccgagtgactcacctgctgccctggaatcagccttttcctcctattcagacctcagcgagggcgaacaagaggctcgctttgcagcaggagtggctgagcagtttgccatcgcggaagccaagctccgagcatggtcttcggtggatggcgaggactccactgatgactcctatgatgaggactttgctgggggaatggacacagacatggctgggcagctgcccctggggccgcacctccaggacctgttcaccggccaccggttctcccggcctgtgcgccagggctccgtggagcctgagagcgactgctcacagaccgtgtccccagacaccctgtgctctagtctgtgcagcctggaggatgggttgttgggctccccggcccggctggcctcccagctgctgggcgatgagctgcttctcgccaaactgccccccagccgggaaagtgccttccgcagcctgggcccactggaggcccaggactcactctacaactcgcccctcacagagggctggctcctgccctcccggagcctatgggttgagccgtccctcaagggcccctgcccagctgggctcgtgctgtgcttcattcacctctccatcgtctctaaatcttcctcttttttcctaaagacagaaggtttttggtctgttttttcagtcggatcttctcttctctgggaggctttggaatgatgaaagcatgtaccctccacccttttcctggccccctaatggggcctgggccctttcccaacccctcctaggatgtgcgggcagtgtgctggcgcctcacagccagccgggctgcccattcacgcagagctctctgagcgggaggtggaagaaaggatggctctggttgccacagagctgggacttcatgttcttctagagagggccacaagagggccacaggggtggccgggagttgtcagctgatgcctgctgagaggcaggaattgtgccagtgagtgacagtcatgagggagtgtctcttcttggggaggaaagaaggtagagcctttctgtctgaatgaaaggccaaggctacagtacagggccccaccccagccagggtgttaatgcccacgtagtggaggcctctggcagatcctgcattccaaggtcactggactgtacgtttttatggttgtgggaagggtgggtggctttagaattaagggccttgtaggctttggcaggtaagagggcccaaggtaagaacgagagccaacgggcacaagcattctatatataagtggctcattaggtgtttattttgttctatttaagaatttgtt

SEQ ID NO: 131987 - DNA, 812 bp, Homo sapiens
  Payload ID: 5765
  Gene Symbol: FAM131A
  Gene Name: family with sequence similarity 131, member A
  ENST ID: ENST00000418768
  CDS Start-End: 118-812
gttcaggaagtcatcaccttctcttgtcagggcatttctggggaccaacagctggccgaggctcagggatagagacggctgctccagctaaaggtgaatgttggagacacagtcgcgatgctgcccaagtcccggcgagccctaactatccaggagatcgctgcgctggccaggtcctccctgcatggtatttcccaggtggtgaaggaccacgtgaccaagcctaccgccatggcccagggccgagtggctcacctcattgagtggaagggctggagcaagccgagtgactcacctgctgccctggaatcagccttttcctcctattcagacctcagcgagggcgaacaagaggctcgctttgcagcaggagtggctgagcagtttgccatcgcggaagccaagctccgagcatggtcttcggtggatggcgaggactccactgatgactcctatgatgaggactttgctgggggaatggacacagacatggctgggcagctgcccctggggccgcacctccaggacctgttcaccggccaccggttctcccggcctgtgcgccagggctccgtggagcctgagagcgactgctcacagaccgtgtccccagacaccctgtgctctagtctgtgcagcctggaggatgggttgttgggctccccggcccggctggcctcccagctgctgggcgatgagctgcttctcgccaaactgccccccagccgggaaagtgccttccgcagcctgggcccactggaggcccaggactcactctacaactcgcccctcacagagtcctgcctttcccc

SEQ ID NO: 131988 - DNA, 4164 bp, Homo sapiens
  Payload ID: 5766
  Gene Symbol: FAM131B
  Gene Name: family with sequence similarity 131, member B
  ENST ID: ENST00000410085
  CDS Start-End: 1-35
ctgatttctcctgggacggcatcaacgcactgtgagcactcacgttctcaacctgtgccccagttttccagagcactggggatatatccctccttgggactcttggctctccatggaggacaccacttccattcttccgaagcttaagcgaaactctaacgcctatggcattggggccctggccaagtcatcattctcagggatctcacggagcatgaaggaccatgtgacaaagcccacagccatggggcaaggccgggtggcccacatgattgagtggcagggctgggggaagacaccagctgttcagccacaacacagccatgagtccgtgcgcagggatacggatgcctactccgacctcagcgatggcgagaaggaggcacgttttctagcaggcgtcatggagcagtttgctatctctgaggccacactcatggcctggtcttccatggatggtgaggacatgagtgtgaactccacccaggagccattgggctgcaactacagtgacaactaccaggaactgatggacagtcaggatgccctggctcaagcacccatggatggatggcctcactcttacgtgtcccagggtatgtactgtctggggtcgtcagatgcctgggaagccagcgatcagtccctcattgcctctccggccacaggatcctatcttgggcctgcatttgatgactcacaacccagcttgcatgaaatgggaccttcccaaccagcttcaggatactctgctctggagcctccacctttgctggggggagacactgactgggctccgggggtaggcgcagtggacctggcaaggggccctgctgaggaggagaagaggccattggcacctgaggaggaagaggatgcgggatgccgggacctggagtcactttccccacgagaagaccctgagatgtctaccgctctcagccggaaggtgtctgacgtcacatcctcaggtgtgcagtcctttgatgaggaggaaggcgaggccaacaactagtttcctcccccaatgccctgccttccactcccacctgagggccatggctgtgacccataccctccctccccccagcagtacagctgaaactgggcagacaacattggggaacccaggagcttccagtcctctcctggaaatggaggaccaggatgggattttatccaggcttacactctagaaacccacaggcctgggaactgagacctgggcaactagatggccgtgagcttggtgtggctgtggagaaggacctgggctgtgggcttctgggtctgtgccgacaaagcctccagtgtgtgcaccctgaggacgggggcagcgcagctgtgctcaagactggatctcagttcttcacgccccgatttcgtcttccaggagctgtaactctgctgtctgaatgcctcctttctccatttcactcttgcttttcccaactctgttttctctggctgtggccccagctcatccctactgagagaacagacctcaggggctgttggacatggctggacaggcgcaggggaggctgcctgaagggcacgtccatggggagggtggagaggctgcctcagcaggtcatttggcttctgagatcaggagtcgaggaggaggtggatgtggcagctgagatctacagggggcacggatgtggttctttctatcaaggcctgcccggagacaagagagtcactgaggagactaagaacaaacacagccccttgctctgggatctttaatatcccatggctaaaaggaagatcctaaggatctgggaaaagacccagccagggctggctgctccagctcttgcttccctttcagctttcttccatccctgctccgggagcctgaggagggtgtggggacacccatcttggatacaccaacgcaggatgcaggtgtcgccaacagcagggggagcatgagggctgtctccccttattcacccctgtcctctgaagctgtttacacttttctctttgccttttctacatttttataacttcttgggcactcagggttgagtggagtggagggaggagtccggtgctgtcactccctcagccaggcagggttgcagctgagggccagggtgggcactcggcactttctgccccttcttcagctcctcccaggactcccaaacagcctcacagctgtcctccctgcctccccaggcctcctaccagaggaagagaggaaaatcagcggattcttccttccaggatggtgtatggtgaggcacaagcttgccctcccacacttggcatccatgctggtggggactgagcagcatatgcgccccagcactaccgtgagagcacaggcagaggatgggcggagcaaagcagcggtgctgtggggttggagagcacttggccctgccactgcccaggtagcccctccccagcccttggcacaggcagagttcgggtaggagagagaggcctaagaggctcactgccctatctccttctttcctcacgcccttccaaggctccggctcccaggcctgtgtcctacccacactctgtcaggagtcctaccacttgcatcctctgctggaagggagcactgttgtcctctcctggccctgggcacaaactttgccctcacccccaggccccagaacttattattttggagtgagaaggttgagagttggggtgtttctgtccatctatggtcctgtcccgccatcaagttcatactctcttactcacacttctgggatgcaagcagggcagggggttctgtgtcttccatggaagggggacaatggttatcctgaggttggtttttggaggaaacatgggcgtaggcaaggtgaaccaaggcaggtgcagtcacctaaccgaatgctgcctgtacaggggaagagtcctcttgtgcttgctaacgtgtgctgactccatgtcccaggacctcatttccaggagctctgagaggtggtctagcatgcccgccctggcagctattccccacccgtctcctgctgcaggctctggggttttgcatgttcatgtgaccttccttccatggggtccctggttcctcaccttctccaatgtgtgctattcccacatcacctcttcctgtcgtctcatcctctcagtgcccatatcatacccccagaccacggtggacagctcacctagtgagtgcgttcattcattacagttcgtttttgctcaggcccgggggagttaggaaaggtagaccacagcagctttcgttcctccttccctttcccaaggaagccaaatggtccctgacaaaagatgactaaagatctgaaggactctagcagggttcatacatgaacctgctttccccagggtgctggcatattgctgcagatggaagtcaggtgggggtctgtcttctgcaaggagctcctactcgctctgaagagggagactgaggagctggcctgggaccatcttaggactcttctggtgctgggggcagggtgcatgggggttgcttatcgtctatttcagggggtggggaggggcatgtgcaggaagaggctgtttcggggtgggaaagggttgcttttcctttggggttaaggctgtgcagcacgttttacagcagtcctggaacagggctgtttttatattcttgtgaatgaaactgctcttgctaaatgattttctttttttggagggggggtgcactttcattttcaattgactttattaaatgaaaatccaaatcttccactcctccccctccattgtcccctcccccaccacacaccttccttcttgtccttgtgttgaagagggtatcttggggaatgagtttattatcttctccacgacctcacctatacatcccacacaccatcctccaggtctgggaaatatccatttttctggccagtcttagcatgttttcttaatgtcacattcccacgccaggcccaagagagattctatgacatatattatagagagaattctatatcaatatatataaatattagagattatgtacacaagggcatgggctcaaatgcccactgccagtcccccacccaggcttcagcatctctcttggcctggggaagtgggagggatgtgatgctggagaaggctacaggctgtgttcaatgacactaaacagaatgtggtggc

SEQ ID NO: 131989 - DNA, 4286 bp, Homo sapiens
  Payload ID: 5766
  Gene Symbol: FAM131B
  Gene Name: family with sequence similarity 131, member B
  Uniprot ID: Q86XD5
  ENST ID: ENST00000409578
  CDS Start-End: 91-1137
agagcggctggggcggcggcgcggctcccggtgctccccccggcgcgcgccccgagtcggtgagggcccggctctgcggcccccggagccatgggctgcatcggctcccggactgtggggaatgaggtgattgcagtggattggaagggcctgaaggatgtcgatcaaatcaacatggacagcaccagctcactgcacgggagcagcctccatcggccatcgactgagctctccatggaggacaccacttccattcttccgaagcttaagcgaaactctaacgcctatggcattggggccctggccaagtcatcattctcagggatctcacggagcatgaaggaccatgtgacaaagcccacagccatggggcaaggccgggtggcccacatgattgagtggcagggctgggggaagacaccagctgttcagccacaacacagccatgagtccgtgcgcagggatacggatgcctactccgacctcagcgatggcgagaaggaggcacgttttctagcaggcgtcatggagcagtttgctatctctgaggccacactcatggcctggtcttccatggatggtgaggacatgagtgtgaactccacccaggagccattgggctgcaactacagtgacaactaccaggaactgatggacagtcaggatgccctggctcaagcacccatggatggatggcctcactcttacgtgtcccagggtatgtactgtctggggtcgtcagatgcctgggaagccagcgatcagtccctcattgcctctccggccacaggatcctatcttgggcctgcatttgatgactcacaacccagcttgcatgaaatgggaccttcccaaccagcttcaggatactctgctctggagcctccacctttgctggggggagacactgactgggctccgggggtaggcgcagtggacctggcaaggggccctgctgaggaggagaagaggccattggcacctgaggaggaagaggatgcgggatgccgggacctggagtcactttccccacgagaagaccctgagatgtctaccgctctcagccggaaggtgtctgacgtcacatcctcaggtgtgcagtcctttgatgaggaggaaggcgaggccaacaactagtttcctcccccaatgccctgccttccactcccacctgagggccatggctgtgacccataccctccctccccccagcagtacagctgaaactgggcagacaacattggggaacccaggagcttccagtcctctcctggaaatggaggaccaggatgggattttatccaggcttacactctagaaacccacaggcctgggaactgagacctgggcaactagatggccgtgagcttggtgtggctgtggagaaggacctgggctgtgggcttctgggtctgtgccgacaaagcctccagtgtgtgcaccctgaggacgggggcagcgcagctgtgctcaagactggatctcagttcttcacgccccgatttcgtcttccaggagctgtaactctgctgtctgaatgcctcctttctccatttcactcttgcttttcccaactctgttttctctggctgtggccccagctcatccctactgagagaacagacctcaggggctgttggacatggctggacaggcgcaggggaggctgcctgaagggcacgtccatggggagggtggagaggctgcctcagcaggtcatttggcttctgagatcaggagtcgaggaggaggtggatgtggcagctgagatctacagggggcacggatgtggttctttctatcaaggcctgcccggagacaagagagtcactgaggagactaagaacaaacacagccccttgctctgggatctttaatatcccatggctaaaaggaagatcctaaggatctgggaaaagacccagccagggctggctgctccagctcttgcttccctttcagctttcttccatccctgctccgggagcctgaggagggtgtggggacacccatcttggatacaccaacgcaggatgcaggtgtcgccaacagcagggggagcatgagggctgtctccccttattcacccctgtcctctgaagctgtttacacttttctctttgccttttctacatttttataacttcttgggcactcagggttgagtggagtggagggaggagtccggtgctgtcactccctcagccaggcagggttgcagctgagggccagggtgggcactcggcactttctgccccttcttcagctcctcccaggactcccaaacagcctcacagctgtcctccctgcctccccaggcctcctaccagaggaagagaggaaaatcagcggattcttccttccaggatggtgtatggtgaggcacaagcttgccctcccacacttggcatccatgctggtggggactgagcagcatatgcgccccagcactaccgtgagagcacaggcagaggatgggcggagcaaagcagcggtgctgtggggttggagagcacttggccctgccactgcccaggtagcccctccccagcccttggcacaggcagagttcgggtaggagagagaggcctaagaggctcactgccctatctccttctttcctcacgcccttccaaggctccggctcccaggcctgtgtcctacccacactctgtcaggagtcctaccacttgcatcctctgctggaagggagcactgttgtcctctcctggccctgggcacaaactttgccctcacccccaggccccagaacttattattttggagtgagaaggttgagagttggggtgtttctgtccatctatggtcctgtcccgccatcaagttcatactctcttactcacacttctgggatgcaagcagggcagggggttctgtgtcttccatggaagggggacaatggttatcctgaggttggtttttggaggaaacatgggcgtaggcaaggtgaaccaaggcaggtgcagtcacctaaccgaatgctgcctgtacaggggaagagtcctcttgtgcttgctaacgtgtgctgactccatgtcccaggacctcatttccaggagctctgagaggtggtctagcatgcccgccctggcagctattccccacccgtctcctgctgcaggctctggggttttgcatgttcatgtgaccttccttccatggggtccctggttcctcaccttctccaatgtgtgctattcccacatcacctcttcctgtcgtctcatcctctcagtgcccatatcatacccccagaccacggtggacagctcacctagtgagtgcgttcattcattacagttcgtttttgctcaggcccgggggagttaggaaaggtagaccacagcagctttcgttcctccttccctttcccaaggaagccaaatggtccctgacaaaagatgactaaagatctgaaggactctagcagggttcatacatgaacctgctttccccagggtgctggcatattgctgcagatggaagtcaggtgggggtctgtcttctgcaaggagctcctactcgctctgaagagggagactgaggagctggcctgggaccatcttaggactcttctggtgctgggggcagggtgcatgggggttgcttatcgtctatttcagggggtggggaggggcatgtgcaggaagaggctgtttcggggtgggaaagggttgcttttcctttggggttaaggctgtgcagcacgttttacagcagtcctggaacagggctgtttttatattcttgtgaatgaaactgctcttgctaaatgattttctttttttggagggggggtgcactttcattttcaattgactttattaaatgaaaatccaaatcttccactcctccccctccattgtcccctcccccaccacacaccttccttcttgtccttgtgttgaagagggtatcttggggaatgagtttattatcttctccacgacctcacctatacatcccacacaccatcctccaggtctgggaaatatccatttttctggccagtcttagcatgttttcttaatgtcacattcccacgccaggcccaagagagattctatgacatatattatagagagaattctatatcaatatatataaatattagagattatgtacacaagggcatgggctcaaatgcccactgccagtcccccacccaggcttcagcatctctcttggcctggggaagtgggagggatgtgatgctggagaaggctacaggctgtgttcaatgacactaaacagaatgtggtggc

SEQ ID NO: 131990 - DNA, 4295 bp, Homo sapiens
  Payload ID: 5766
  Gene Symbol: FAM131B
  Gene Name: family with sequence similarity 131, member B
  Uniprot ID: Q86XD5
  ENST ID: ENST00000409346
  CDS Start-End: 148-1146
gcggagccgagcggagacagccgcggcgctgcagagcggctggggcggcggcgcggctcccggtgctccccccggcgcgcgccccgagtcgggaatgaggtgattgcagtggattggaagggcctgaaggatgtcgatcaaatcaacatggacagcaccagctcactgcacgggagcagcctccatcggccatcgactgagcaaactcgaactgatttctcctgggacggcatcaacctctccatggaggacaccacttccattcttccgaagcttaagcgaaactctaacgcctatggcattggggccctggccaagtcatcattctcagggatctcacggagcatgaaggaccatgtgacaaagcccacagccatggggcaaggccgggtggcccacatgattgagtggcagggctgggggaagacaccagctgttcagccacaacacagccatgagtccgtgcgcagggatacggatgcctactccgacctcagcgatggcgagaaggaggcacgttttctagcaggcgtcatggagcagtttgctatctctgaggccacactcatggcctggtcttccatggatggtgaggacatgagtgtgaactccacccaggagccattgggctgcaactacagtgacaactaccaggaactgatggacagtcaggatgccctggctcaagcacccatggatggatggcctcactcttacgtgtcccagggtatgtactgtctggggtcgtcagatgcctgggaagccagcgatcagtccctcattgcctctccggccacaggatcctatcttgggcctgcatttgatgactcacaacccagcttgcatgaaatgggaccttcccaaccagcttcaggatactctgctctggagcctccacctttgctggggggagacactgactgggctccgggggtaggcgcagtggacctggcaaggggccctgctgaggaggagaagaggccattggcacctgaggaggaagaggatgcgggatgccgggacctggagtcactttccccacgagaagaccctgagatgtctaccgctctcagccggaaggtgtctgacgtcacatcctcaggtgtgcagtcctttgatgaggaggaaggcgaggccaacaactagtttcctcccccaatgccctgccttccactcccacctgagggccatggctgtgacccataccctccctccccccagcagtacagctgaaactgggcagacaacattggggaacccaggagcttccagtcctctcctggaaatggaggaccaggatgggattttatccaggcttacactctagaaacccacaggcctgggaactgagacctgggcaactagatggccgtgagcttggtgtggctgtggagaaggacctgggctgtgggcttctgggtctgtgccgacaaagcctccagtgtgtgcaccctgaggacgggggcagcgcagctgtgctcaagactggatctcagttcttcacgccccgatttcgtcttccaggagctgtaactctgctgtctgaatgcctcctttctccatttcactcttgcttttcccaactctgttttctctggctgtggccccagctcatccctactgagagaacagacctcaggggctgttggacatggctggacaggcgcaggggaggctgcctgaagggcacgtccatggggagggtggagaggctgcctcagcaggtcatttggcttctgagatcaggagtcgaggaggaggtggatgtggcagctgagatctacagggggcacggatgtggttctttctatcaaggcctgcccggagacaagagagtcactgaggagactaagaacaaacacagccccttgctctgggatctttaatatcccatggctaaaaggaagatcctaaggatctgggaaaagacccagccagggctggctgctccagctcttgcttccctttcagctttcttccatccctgctccgggagcctgaggagggtgtggggacacccatcttggatacaccaacgcaggatgcaggtgtcgccaacagcagggggagcatgagggctgtctccccttattcacccctgtcctctgaagctgtttacacttttctctttgccttttctacatttttataacttcttgggcactcagggttgagtggagtggagggaggagtccggtgctgtcactccctcagccaggcagggttgcagctgagggccagggtgggcactcggcactttctgccccttcttcagctcctcccaggactcccaaacagcctcacagctgtcctccctgcctccccaggcctcctaccagaggaagagaggaaaatcagcggattcttccttccaggatggtgtatggtgaggcacaagcttgccctcccacacttggcatccatgctggtggggactgagcagcatatgcgccccagcactaccgtgagagcacaggcagaggatgggcggagcaaagcagcggtgctgtggggttggagagcacttggccctgccactgcccaggtagcccctccccagcccttggcacaggcagagttcgggtaggagagagaggcctaagaggctcactgccctatctccttctttcctcacgcccttccaaggctccggctcccaggcctgtgtcctacccacactctgtcaggagtcctaccacttgcatcctctgctggaagggagcactgttgtcctctcctggccctgggcacaaactttgccctcacccccaggccccagaacttattattttggagtgagaaggttgagagttggggtgtttctgtccatctatggtcctgtcccgccatcaagttcatactctcttactcacacttctgggatgcaagcagggcagggggttctgtgtcttccatggaagggggacaatggttatcctgaggttggtttttggaggaaacatgggcgtaggcaaggtgaaccaaggcaggtgcagtcacctaaccgaatgctgcctgtacaggggaagagtcctcttgtgcttgctaacgtgtgctgactccatgtcccaggacctcatttccaggagctctgagaggtggtctagcatgcccgccctggcagctattccccacccgtctcctgctgcaggctctggggttttgcatgttcatgtgaccttccttccatggggtccctggttcctcaccttctccaatgtgtgctattcccacatcacctcttcctgtcgtctcatcctctcagtgcccatatcatacccccagaccacggtggacagctcacctagtgagtgcgttcattcattacagttcgtttttgctcaggcccgggggagttaggaaaggtagaccacagcagctttcgttcctccttccctttcccaaggaagccaaatggtccctgacaaaagatgactaaagatctgaaggactctagcagggttcatacatgaacctgctttccccagggtgctggcatattgctgcagatggaagtcaggtgggggtctgtcttctgcaaggagctcctactcgctctgaagagggagactgaggagctggcctgggaccatcttaggactcttctggtgctgggggcagggtgcatgggggttgcttatcgtctatttcagggggtggggaggggcatgtgcaggaagaggctgtttcggggtgggaaagggttgcttttcctttggggttaaggctgtgcagcacgttttacagcagtcctggaacagggctgtttttatattcttgtgaatgaaactgctcttgctaaatgattttctttttttggagggggggtgcactttcattttcaattgactttattaaatgaaaatccaaatcttccactcctccccctccattgtcccctcccccaccacacaccttccttcttgtccttgtgttgaagagggtatcttggggaatgagtttattatcttctccacgacctcacctatacatcccacacaccatcctccaggtctgggaaatatccatttttctggccagtcttagcatgttttcttaatgtcacattcccacgccaggcccaagagagattctatgacatatattatagagagaattctatatcaatatatataaatattagagattatgtacacaagggcatgggctcaaatgcccactgccagtcccccacccaggcttcagcatctctcttggcctggggaagtgggagggatgtgatgctggagaaggctacaggctgtgttcaatgacactaaacagaatgtggtggc

SEQ ID NO: 131991 - DNA, 5856 bp, Homo sapiens
  Payload ID: 5766
  Gene Symbol: FAM131B
  Gene Name: family with sequence similarity 131, member B
  Uniprot ID: Q86XD5
  ENST ID: ENST00000409408
  CDS Start-End: 1710-2708
ggcggggcggggccggctctttatttacctttgacgcggggagggaagagaggcgcctcctaatccatcttctccctccagcttctgcctggctaccgcccctgacccccacccaggcacccactccactctcgccgctcagcgaattcatccggccctctcccaccccctcccccattcttcccctttccaactcccaatttctcccgcctacacctcccggtgacctcaggctgagagaataattcgtattattattacaaacaaactcactctccagaagcctgatttccctgagacccggtttatttccatggataccccctcctcctctgctttcaccccttctccgcggctctctccctccccgctgccccccacagctctgactcagctctccgtctctcacaaaggccacctcccgctcccctctccccccgcaccccgccctcccctgtctcccttctcctcaggctcttctccacctgccccattcctgctgtgtccggagggccatctttcctcttttcccccagtcaccaccccgcggagccccaggggacagcaggccaactttggagggtcctccctcctcagtccggttcaccacaagccccttcctttcccccagccctgctgatgtgctgaatgcctcctcgtgcccagccccattcaatgctccccttcccaaaaatggagccgacccctaaactcacaattgtaaaacctcatgagtataaagggcctgtacggtcagatggttcaggcagccatctgctgcttgaatagtccctttatgaagacccaagcagttcttccgcaagactctccgcggcaccatcctgccctcagtccaggagtctccctccaccaggagctctggcccggctgtaacaaggaccctccttcccctgagtcctgcagtttcccactcagccctcagaccctgtccacccctcccaccatcttctgtcttctctctgacttgaattcctattttcttaattcctattttaaaaagttctcttttctcctcctgctcaccagcttccctccactttaatccatcacttctctccccacagtcaggtgaaatgcctccagctcacccttggtttctctgctcactgtttttgggaggacacacccaactccttgctatccaactcctgcctcgattcccaggaagtcctcttccagtcagtcagactcatggactcttaggaagggcccaccgggggagacacatcccttccaccctaagcatagagaaaagttcctcatagagcagctctgcccttatctgtagacttgtaatagagaaaaagcccagctcccatacagaaaccctccaagagtcctcaggacggaataattggttttctgataaaacccaacctctgacccctccacataaacaacaacaaataaggccatacatcactttttctgagtgcactattctgggttgagctaaaactgaatatttgggctcagcattactacttgtctcccctagaatttggagagtgcagggatataagaggaaatgggcagctggggtaaggaaggggtgtgaagggctggccccagggtgtcgcctcggctgcacagggaggtgagggccggcggctaaccttctggccccctcagggaatgaggtgattgcagtggattggaagggcctgaaggatgtcgatcaaatcaacatggacagcaccagctcactgcacgggagcagcctccatcggccatcgactgagcaaactcgaactgatttctcctgggacggcatcaacctctccatggaggacaccacttccattcttccgaagcttaagcgaaactctaacgcctatggcattggggccctggccaagtcatcattctcagggatctcacggagcatgaaggaccatgtgacaaagcccacagccatggggcaaggccgggtggcccacatgattgagtggcagggctgggggaagacaccagctgttcagccacaacacagccatgagtccgtgcgcagggatacggatgcctactccgacctcagcgatggcgagaaggaggcacgttttctagcaggcgtcatggagcagtttgctatctctgaggccacactcatggcctggtcttccatggatggtgaggacatgagtgtgaactccacccaggagccattgggctgcaactacagtgacaactaccaggaactgatggacagtcaggatgccctggctcaagcacccatggatggatggcctcactcttacgtgtcccagggtatgtactgtctggggtcgtcagatgcctgggaagccagcgatcagtccctcattgcctctccggccacaggatcctatcttgggcctgcatttgatgactcacaacccagcttgcatgaaatgggaccttcccaaccagcttcaggatactctgctctggagcctccacctttgctggggggagacactgactgggctccgggggtaggcgcagtggacctggcaaggggccctgctgaggaggagaagaggccattggcacctgaggaggaagaggatgcgggatgccgggacctggagtcactttccccacgagaagaccctgagatgtctaccgctctcagccggaaggtgtctgacgtcacatcctcaggtgtgcagtcctttgatgaggaggaaggcgaggccaacaactagtttcctcccccaatgccctgccttccactcccacctgagggccatggctgtgacccataccctccctccccccagcagtacagctgaaactgggcagacaacattggggaacccaggagcttccagtcctctcctggaaatggaggaccaggatgggattttatccaggcttacactctagaaacccacaggcctgggaactgagacctgggcaactagatggccgtgagcttggtgtggctgtggagaaggacctgggctgtgggcttctgggtctgtgccgacaaagcctccagtgtgtgcaccctgaggacgggggcagcgcagctgtgctcaagactggatctcagttcttcacgccccgatttcgtcttccaggagctgtaactctgctgtctgaatgcctcctttctccatttcactcttgcttttcccaactctgttttctctggctgtggccccagctcatccctactgagagaacagacctcaggggctgttggacatggctggacaggcgcaggggaggctgcctgaagggcacgtccatggggagggtggagaggctgcctcagcaggtcatttggcttctgagatcaggagtcgaggaggaggtggatgtggcagctgagatctacagggggcacggatgtggttctttctatcaaggcctgcccggagacaagagagtcactgaggagactaagaacaaacacagccccttgctctgggatctttaatatcccatggctaaaaggaagatcctaaggatctgggaaaagacccagccagggctggctgctccagctcttgcttccctttcagctttcttccatccctgctccgggagcctgaggagggtgtggggacacccatcttggatacaccaacgcaggatgcaggtgtcgccaacagcagggggagcatgagggctgtctccccttattcacccctgtcctctgaagctgtttacacttttctctttgccttttctacatttttataacttcttgggcactcagggttgagtggagtggagggaggagtccggtgctgtcactccctcagccaggcagggttgcagctgagggccagggtgggcactcggcactttctgccccttcttcagctcctcccaggactcccaaacagcctcacagctgtcctccctgcctccccaggcctcctaccagaggaagagaggaaaatcagcggattcttccttccaggatggtgtatggtgaggcacaagcttgccctcccacacttggcatccatgctggtggggactgagcagcatatgcgccccagcactaccgtgagagcacaggcagaggatgggcggagcaaagcagcggtgctgtggggttggagagcacttggccctgccactgcccaggtagcccctccccagcccttggcacaggcagagttcgggtaggagagagaggcctaagaggctcactgccctatctccttctttcctcacgcccttccaaggctccggctcccaggcctgtgtcctacccacactctgtcaggagtcctaccacttgcatcctctgctggaagggagcactgttgtcctctcctggccctgggcacaaactttgccctcacccccaggccccagaacttattattttggagtgagaaggttgagagttggggtgtttctgtccatctatggtcctgtcccgccatcaagttcatactctcttactcacacttctgggatgcaagcagggcagggggttctgtgtcttccatggaagggggacaatggttatcctgaggttggtttttggaggaaacatgggcgtaggcaaggtgaaccaaggcaggtgcagtcacctaaccgaatgctgcctgtacaggggaagagtcctcttgtgcttgctaacgtgtgctgactccatgtcccaggacctcatttccaggagctctgagaggtggtctagcatgcccgccctggcagctattccccacccgtctcctgctgcaggctctggggttttgcatgttcatgtgaccttccttccatggggtccctggttcctcaccttctccaatgtgtgctattcccacatcacctcttcctgtcgtctcatcctctcagtgcccatatcatacccccagaccacggtggacagctcacctagtgagtgcgttcattcattacagttcgtttttgctcaggcccgggggagttaggaaaggtagaccacagcagctttcgttcctccttccctttcccaaggaagccaaatggtccctgacaaaagatgactaaagatctgaaggactctagcagggttcatacatgaacctgctttccccagggtgctggcatattgctgcagatggaagtcaggtgggggtctgtcttctgcaaggagctcctactcgctctgaagagggagactgaggagctggcctgggaccatcttaggactcttctggtgctgggggcagggtgcatgggggttgcttatcgtctatttcagggggtggggaggggcatgtgcaggaagaggctgtttcggggtgggaaagggttgcttttcctttggggttaaggctgtgcagcacgttttacagcagtcctggaacagggctgtttttatattcttgtgaatgaaactgctcttgctaaatgattttctttttttggagggggggtgcactttcattttcaattgactttattaaatgaaaatccaaatcttccactcctccccctccattgtcccctcccccaccacacaccttccttcttgtccttgtgttgaagagggtatcttggggaatgagtttattatcttctccacgacctcacctatacatcccacacaccatcctccaggtctgggaaatatccatttttctggccagtcttagcatgttttcttaatgtcacattcccacgccaggcccaagagagattctatgacatatattatagagagaattctatatcaatatatataaatattagagattatgtacacaagggcatgggctcaaatgcccactgccagtcccccacccaggcttcagcatctctcttggcctggggaagtgggagggatgtgatgctggagaaggctacaggctgtgttcaatgacactaaacagaatgtggtgg

SEQ ID NO: 131992 - DNA, 3823 bp, Homo sapiens
  Payload ID: 5766
  Gene Symbol: FAM131B
  Gene Name: family with sequence similarity 131, member B
  Uniprot ID: Q86XD5
  ENST ID: ENST00000409222
  CDS Start-End: 97-1095
tttactgtcgttcctgcctcctccgattcgctttgttcacggaatgaggtgattgcagtggattggaagggcctgaaggatgtcgatcaaatcaacatggacagcaccagctcactgcacgggagcagcctccatcggccatcgactgagcaaactcgaactgatttctcctgggacggcatcaacctctccatggaggacaccacttccattcttccgaagcttaagcgaaactctaacgcctatggcattggggccctggccaagtcatcattctcagggatctcacggagcatgaaggaccatgtgacaaagcccacagccatggggcaaggccgggtggcccacatgattgagtggcagggctgggggaagacaccagctgttcagccacaacacagccatgagtccgtgcgcagggatacggatgcctactccgacctcagcgatggcgagaaggaggcacgttttctagcaggcgtcatggagcagtttgctatctctgaggccacactcatggcctggtcttccatggatggtgaggacatgagtgtgaactccacccaggagccattgggctgcaactacagtgacaactaccaggaactgatggacagtcaggatgccctggctcaagcacccatggatggatggcctcactcttacgtgtcccagggtatgtactgtctggggtcgtcagatgcctgggaagccagcgatcagtccctcattgcctctccggccacaggatcctatcttgggcctgcatttgatgactcacaacccagcttgcatgaaatgggaccttcccaaccagcttcaggatactctgctctggagcctccacctttgctggggggagacactgactgggctccgggggtaggcgcagtggacctggcaaggggccctgctgaggaggagaagaggccattggcacctgaggaggaagaggatgcgggatgccgggacctggagtcactttccccacgagaagaccctgagatgtctaccgctctcagccggaaggtgtctgacgtcacatcctcaggtgtgcagtcctttgatgaggaggaaggcgaggccaacaactagtttcctcccccaatgccctgccttccactcccacctgagggccatggctgtgacccataccctccctccccccagcagtacagctgaaactgggcagacaacattggggaacccaggagcttccagtcctctcctggaaatggaggaccaggatgggattttatccaggcttacactctagaaacccacaggcctgggaactgagacctgggcaactagatggccgtgagcttggtgtggctgtggagaaggacctgggctgtgggcttctgggtctgtgccgacaaagcctccagtgtgtgcaccctgaggacgggggcagcgcagctgtgctcaagactggatctcagttcttcacgccccgatttcgtcttccaggagctgtaactctgctgtctgaatgcctcctttctccatttcactcttgcttttcccaactctgttttctctggctgtggccccagctcatccctactgagagaacagacctcaggggctgttggacatggctggacaggcgcaggggaggctgcctgaagggcacgtccatggggagggtggagaggctgcctcagcaggtcatttggcttctgagatcaggagtcgaggaggaggtggatgtggcagctgagatctacagggggcacggatgtggttctttctatcaaggcctgcccggagacaagagagtcactgaggagactaagaacaaacacagccccttgctctgggatctttaatatcccatggctaaaaggaagatcctaaggatctgggaaaagacccagccagggctggctgctccagctcttgcttccctttcagctttcttccatccctgctccgggagcctgaggagggtgtggggacacccatcttggatacaccaacgcaggatgcaggtgtcgccaacagcagggggagcatgagggctgtctccccttattcacccctgtcctctgaagctgtttacacttttctctttgccttttctacatttttataacttcttgggcactcagggttgagtggagtggagggaggagtccggtgctgtcactccctcagccaggcagggttgcagctgagggccagggtgggcactcggcactttctgccccttcttcagctcctcccaggactcccaaacagcctcacagctgtcctccctgcctccccaggcctcctaccagaggaagagaggaaaatcagcggattcttccttccaggatggtgtatggtgaggcacaagcttgccctcccacacttggcatccatgctggtggggactgagcagcatatgcgccccagcactaccgtgagagcacaggcagaggatgggcggagcaaagcagcggtgctgtggggttggagagcacttggccctgccactgcccaggtagcccctccccagcccttggcacaggcagagttcgggtaggagagagaggcctaagaggctcactgccctatctccttctttcctcacgcccttccaaggctccggctcccaggcctgtgtcctacccacactctgtcaggagtcctaccacttgcatcctctgctggaagggagcactgttgtcctctcctggccctgggcacaaactttgccctcacccccaggccccagaacttattattttggagtgagaaggttgagagttggggtgtttctgtccatctatggtcctgtcccgccatcaagttcatactctcttactcacacttctgggatgcaagcagggcagggggttctgtgtcttccatggaagggggacaatggttatcctgaggttggtttttggaggaaacatgggcgtaggcaaggtgaaccaaggcaggtgcagtcacctaaccgaatgctgcctgtacaggggaagagtcctcttgtgcttgctaacgtgtgctgactccatgtcccaggacctcatttccaggagctctgagaggtggtctagcatgcccgccctggcagctattccccacccgtctcctgctgcaggctctggggttttgcatgttcatgtgaccttccttccatggggtccctggttcctcaccttctccaatgtgtgctattcccacatcacctcttcctgtcgtctcatcctctcagtgcccatatcatacccccagaccacggtggacagctcacctagtgagtgcgttcattcattacagttcgtttttgctcaggcccgggggagttaggaaaggtagaccacagcagctttcgttcctccttccctttcccaaggaagccaaatggtccctgacaaaagatgactaaagatctgaaggactctagcagggttcatacatgaacctgctttccccagggtgctggcatattgctgcagatggaagtcaggtgggggtctgtcttctgcaaggagctcctactcgctctgaagagggagactgaggagctggcctgggaccatcttaggactcttctggtgctgggggcagggtgcatgggggttgcttatcgtctatttcagggggtggggaggggcatgtgcaggaagaggctgtttcggggtgggaaagggttgcttttcctttggggttaaggctgtgcagcacgttttacagcagtcctggaacagggctgtttttatattcttgtgaatgaaactgctcttgctaaatgattttctttttttggagggggggtgcactttcattttcaattgactttattaaatgaaaatccaaatct

SEQ ID NO: 131993 - DNA, 4382 bp, Homo sapiens
  Payload ID: 5766
  Gene Symbol: FAM131B
  Gene Name: family with sequence similarity 131, member B
  Uniprot ID: Q86XD5
  ENST ID: ENST00000443739
  CDS Start-End: 150-1232
ggggagggatggagaggggaggggggagcggagccgagcggagacagccgcggcgctgcagagcggctggggcggcggcgcggctcccggtgctccccccggcgcgcgccccgagtcggtgagggcccggctctgcggcccccggagccatgggctgcatcggctcccggactgtggggaatgaggtgattgcagtggattggaagggcctgaaggatgtcgatcaaatcaacatggacagcaccagctcactgcacgggagcagcctccatcggccatcgactgagcaaactcgaactgatttctcctgggacggcatcaacctctccatggaggacaccacttccattcttccgaagcttaagcgaaactctaacgcctatggcattggggccctggccaagtcatcattctcagggatctcacggagcatgaaggaccatgtgacaaagcccacagccatggggcaaggccgggtggcccacatgattgagtggcagggctgggggaagacaccagctgttcagccacaacacagccatgagtccgtgcgcagggatacggatgcctactccgacctcagcgatggcgagaaggaggcacgttttctagcaggcgtcatggagcagtttgctatctctgaggccacactcatggcctggtcttccatggatggtgaggacatgagtgtgaactccacccaggagccattgggctgcaactacagtgacaactaccaggaactgatggacagtcaggatgccctggctcaagcacccatggatggatggcctcactcttacgtgtcccagggtatgtactgtctggggtcgtcagatgcctgggaagccagcgatcagtccctcattgcctctccggccacaggatcctatcttgggcctgcatttgatgactcacaacccagcttgcatgaaatgggaccttcccaaccagcttcaggatactctgctctggagcctccacctttgctggggggagacactgactgggctccgggggtaggcgcagtggacctggcaaggggccctgctgaggaggagaagaggccattggcacctgaggaggaagaggatgcgggatgccgggacctggagtcactttccccacgagaagaccctgagatgtctaccgctctcagccggaaggtgtctgacgtcacatcctcaggtgtgcagtcctttgatgaggaggaaggcgaggccaacaactagtttcctcccccaatgccctgccttccactcccacctgagggccatggctgtgacccataccctccctccccccagcagtacagctgaaactgggcagacaacattggggaacccaggagcttccagtcctctcctggaaatggaggaccaggatgggattttatccaggcttacactctagaaacccacaggcctgggaactgagacctgggcaactagatggccgtgagcttggtgtggctgtggagaaggacctgggctgtgggcttctgggtctgtgccgacaaagcctccagtgtgtgcaccctgaggacgggggcagcgcagctgtgctcaagactggatctcagttcttcacgccccgatttcgtcttccaggagctgtaactctgctgtctgaatgcctcctttctccatttcactcttgcttttcccaactctgttttctctggctgtggccccagctcatccctactgagagaacagacctcaggggctgttggacatggctggacaggcgcaggggaggctgcctgaagggcacgtccatggggagggtggagaggctgcctcagcaggtcatttggcttctgagatcaggagtcgaggaggaggtggatgtggcagctgagatctacagggggcacggatgtggttctttctatcaaggcctgcccggagacaagagagtcactgaggagactaagaacaaacacagccccttgctctgggatctttaatatcccatggctaaaaggaagatcctaaggatctgggaaaagacccagccagggctggctgctccagctcttgcttccctttcagctttcttccatccctgctccgggagcctgaggagggtgtggggacacccatcttggatacaccaacgcaggatgcaggtgtcgccaacagcagggggagcatgagggctgtctccccttattcacccctgtcctctgaagctgtttacacttttctctttgccttttctacatttttataacttcttgggcactcagggttgagtggagtggagggaggagtccggtgctgtcactccctcagccaggcagggttgcagctgagggccagggtgggcactcggcactttctgccccttcttcagctcctcccaggactcccaaacagcctcacagctgtcctccctgcctccccaggcctcctaccagaggaagagaggaaaatcagcggattcttccttccaggatggtgtatggtgaggcacaagcttgccctcccacacttggcatccatgctggtggggactgagcagcatatgcgccccagcactaccgtgagagcacaggcagaggatgggcggagcaaagcagcggtgctgtggggttggagagcacttggccctgccactgcccaggtagcccctccccagcccttggcacaggcagagttcgggtaggagagagaggcctaagaggctcactgccctatctccttctttcctcacgcccttccaaggctccggctcccaggcctgtgtcctacccacactctgtcaggagtcctaccacttgcatcctctgctggaagggagcactgttgtcctctcctggccctgggcacaaactttgccctcacccccaggccccagaacttattattttggagtgagaaggttgagagttggggtgtttctgtccatctatggtcctgtcccgccatcaagttcatactctcttactcacacttctgggatgcaagcagggcagggggttctgtgtcttccatggaagggggacaatggttatcctgaggttggtttttggaggaaacatgggcgtaggcaaggtgaaccaaggcaggtgcagtcacctaaccgaatgctgcctgtacaggggaagagtcctcttgtgcttgctaacgtgtgctgactccatgtcccaggacctcatttccaggagctctgagaggtggtctagcatgcccgccctggcagctattccccacccgtctcctgctgcaggctctggggttttgcatgttcatgtgaccttccttccatggggtccctggttcctcaccttctccaatgtgtgctattcccacatcacctcttcctgtcgtctcatcctctcagtgcccatatcatacccccagaccacggtggacagctcacctagtgagtgcgttcattcattacagttcgtttttgctcaggcccgggggagttaggaaaggtagaccacagcagctttcgttcctccttccctttcccaaggaagccaaatggtccctgacaaaagatgactaaagatctgaaggactctagcagggttcatacatgaacctgctttccccagggtgctggcatattgctgcagatggaagtcaggtgggggtctgtcttctgcaaggagctcctactcgctctgaagagggagactgaggagctggcctgggaccatcttaggactcttctggtgctgggggcagggtgcatgggggttgcttatcgtctatttcagggggtggggaggggcatgtgcaggaagaggctgtttcggggtgggaaagggttgcttttcctttggggttaaggctgtgcagcacgttttacagcagtcctggaacagggctgtttttatattcttgtgaatgaaactgctcttgctaaatgattttctttttttggagggggggtgcactttcattttcaattgactttattaaatgaaaatccaaatcttccactcctccccctccattgtcccctcccccaccacacaccttccttcttgtccttgtgttgaagagggtatcttggggaatgagtttattatcttctccacgacctcacctatacatcccacacaccatcctccaggtctgggaaatatccatttttctggccagtcttagcatgttttcttaatgtcacattcccacgccaggcccaagagagattctatgacatatattatagagagaattctatatcaatatatataaatattagagattatgtacacaagggcatgggctcaaatgcccactgccagtcccccacccaggcttcagcatctctcttggcctggggaagtgggagggatgtgatgctggagaaggctacaggctgtgttcaatgacactaaacagaatgtggtggca

SEQ ID NO: 131994 - DNA, 597 bp, Homo sapiens
  Payload ID: 5766
  Gene Symbol: FAM131B
  Gene Name: family with sequence similarity 131, member B
  ENST ID: ENST00000519279
  CDS Start-End: 30-221
gagggcccggctctgcggcccccggagccatgggctgcatcggctcccggactgtggggaatgaggtgattgcagtggattggaagggcctgaaggatgtcgatcaaatcaacatggacagcaccagctcactgcacgggagcagcctccatcggccatcgactgagcaaactcgaactgatttctcctgggacggcatcaacggatctcacggagcatgaaggaccatgtgacaaagcccacagccatggggcaaggccgggtggcccacatgattgagtggcagggctgggggaagacaccagctgttcagccacaacacagccatgagtccgtgcgcagggatacggatgcctactccgacctcagcgatggcgagaaggaggcacgttttctagcaggcgtcatggagcagtttgctatctctgaggccacactcatggcctggtcttccatggatggtgaggacatgagtgtgaactccacccaggagccattgggctgcaactacagtgacaactaccaggaactgatggacagtcaggatgccctggctcaagcacccatggatggatggcctcactcttacgtgtccca

SEQ ID NO: 131995 - DNA, 729 bp, Homo sapiens
  Payload ID: 5766
  Gene Symbol: FAM131B
  Gene Name: family with sequence similarity 131, member B
  ENST ID: ENST00000521347
  CDS Start-End: 122-256
atctctctctccctctccgttgccttttactgtcgttcctgcctcctccgattcgctttgttcacggaatgaggtgattgcagtggattggaagggcctgaaggatgtcgatcaaatcaacatggacagcaccagctcactgcacgggagcagcctccatcggccatcgactgagcaaactcgaactgatttctcctgggacggcatcaacctcgaatgctttttcctggaaaccatgaacctcctccatgtataaagcacgcccgtaccttcttattcctctgcccttcctcccacattcccatcccagctctccatggaggacaccacttccattcttccgaagcttaagcgaaactctaacgcctatggcattggggccctggccaagtcatcattctcagggatctcacggagcatgaaggaccatgtgacaaagcccacagccatggggcaaggccgggtggcccacatgattgagtggcagggctgggggaagacaccagctgttcagccacaacacagccatgagtccgtgcgcagggatacggatgcctactccgacctcagcgatggcgagaaggaggcgtcatggagcagtttgctatctctgaggccacactcatggcctggtcttccatggatggtgaggacatgagtgtgaactccacccaggagccattgggctgcaactacagtgacaactaccaggaactgatggacagtcag

SEQ ID NO: 131996 - DNA, 1695 bp, Homo sapiens
  Payload ID: 5767
  Gene Symbol: FAM131C
  Gene Name: family with sequence similarity 131, member C
  Uniprot ID: Q96AQ9
  ENST ID: ENST00000375662
  CDS Start-End: 185-1027
gcgagccgggcgcggcggcagcagggacgacccaggctggagctgaggccgagctgagggcgcccgagccccccgccccgcccgtcctctggctccgcagcgctcagccccgggcccgcggagacatgaacgccccgcggccccacgcaccccgggcgcagcggcccggccccgcggccccgtgatgggctcctgcgtgtcgcgagacctgttcacaagtgcccacaagaactgccccatgccccagggtgcggaccccttgaacccagatctgccctcgggccgcactcccaccgtggctccagactgtgtcattggcaaggacaaacagatggatttctgttgggatccttggcagaggtgcttccagaccaccaacggctacctgtccgactccagatcccgccccggcaactacaacgtggcagccctggccacctcgtcccttgtgggggtggtgcagagcatcaaggaccacatcacaaagcccacggccatggcccgaggccgcgtggcccacctcatcgagtggaagggctggagtgcccagccggcaggctgggagctgtccccagctgaggacgagcattactgctgcctcccggatgagctgcgtgaggcccgctttgctgcaggggtcgccgagcagtttgccatcacagaggccacactgagcgcttggtcctcgctggacgaagaggagctgcaccccgagaacagcccccaaggcatcgtccagctccaagatctggagagcatctaccttcaggacagccttcccagcggcccctcacaggatgacagccttcaggccttctcctcgcccagcccctcccctgacagctgtccctcacctgaggagccccccagcaccgctggcatcccgcagccccccagcccagagctgcagcatcggcggcggctgcccggggcccaaggacccgagggtgggacccaccccccgggctccctcccctccatggacagcggctccctctgggaggaggacgaggtgttctataactgaggtgggggctgtgctggtccagcacctgctctcaccatgacctcgcctggtgggcagcccaggcatatctggaccccggggtccagggcagggcatcccttgacccctcgggtaggcacagggtaggtgcggcagggatggggccagtgctcatggtggcctctctgtgcctcggtggacctgccccagcagtgggagccataaccccctcccccttcattacttcactcaggtgggcaccttcccctgcagggtgtctgccctcagggaactcacggactctcagagacaccagggcagcctggcccagaggagcaacagccaggcccccaggaggacagccatggagagaactgagacccacttacagtggggtctgggaaccctgcctgtacctggggttcagtccctcccaactccctccttgtgtctgccccccagcaaaggtggggtgaccacttctggtagctaagcacctgctccccggctctcttcacccaggacatctgtctctctggagtgtctgtctgtctgtccctccctctctgaacctgcttcctccgtgtcccctgctcctcacccctgggagcccactccccctccttgcggctccctcccatctcactcaaggttctctgaggacattaaagtggtggattcaccctgga

SEQ ID NO: 131997 - DNA, 1036 bp, Homo sapiens
  Payload ID: 5768
  Gene Symbol: FAM132A
  Gene Name: family with sequence similarity 132, member A
  Uniprot ID: Q5T7M4
  ENST ID: ENST00000330388
  CDS Start-End: 33-941
ctcgccgcgctgagccgcctcgggacggagccatgcggcgctgggcctgggccgcggtcgtggtcctcctcgggccgcagctcgtgctcctcgggggcgtcggggcccggcgggaggcacagaggacgcagcagcctggccagcgcgcagatccccccaacgccaccgccagcgcgtcctcccgcgaggggctgcccgaggcccccaagccatcccaggcctcaggacctgagttctccgacgcccacatgacatggctgaactttgtccggcggccggacgacggcgccttaaggaagcggtgcggaagcagggacaagaagccgcgggatctcttcggtcccccaggacctccaggtgcagaagtgaccgcggagactctgcttcacgagtttcaggagctgctgaaagaggccacggagcgccggttctcagggcttctggacccgctgctgccccagggggcgggcctgcggctggtgggcgaggcctttcactgccggctgcagggtccccgccgggtggacaagcggacgctggtggagctgcatggtttccaggctcctgctgcccaaggtgccttcctgcgaggctccggtctgagcctggcctcgggtcggttcacggcccccgtgtccggcatcttccagttctctgccagtctgcacgtggaccacagtgagctgcagggcaaggcccggctgcgggcccgggacgtggtgtgtgttctcatctgtattgagtccctgtgccagcgccacacgtgcctggaggccgtctcaggcctggagagcaacagcagggtcttcacgctacaggtgcaggggctgctgcagctgcaggctggacagtacgcttctgtgtttgtggacaatggctccggggccgtcctcaccatccaggcgggctccagcttctccgggctgctcctgggcacgtgagggcgcccaggggggctggcgaggagctgccgccggatcccggggaccctcctactgatgcccgtggtcaccacaataaagagccctccaccctc

SEQ ID NO: 131998 - DNA, 612 bp, Homo sapiens
  Payload ID: 5769
  Gene Symbol: FAM132B
  Gene Name: family with sequence similarity 132, member B
  ENST ID: ENST00000344233
  CDS Start-End: 1-224
gcatccagtcccggtgccagcgcaacgcctccctggaggccatcatgggcctggagagcagcagtgagctcttcaccatctctgtgaatggcgtcctgtacctgcaggctacgaagaacctggtgcctcaggacctcctgggagccaagctggtctggcaagggcgctcaggcctgggagagaagggagcaatggccagtcaccttcaccttctaactaactagcctccggatgaggtggctgccaccaggcccgaatgatccccaggagcccagcttccaaaccccaacatcgaatcaaacatctccatccccaagtgcagtaacacacaaaaaccaaacactctgccctgggaaaggcctggtgcgattctcagtaggactcacacccaccctacctagaagtactgggctggcctgggtactgcatccgtgtgttttgataagggggtgatgtggccacgcccttatctagatttcactttgtatccactgggcacagatattctagagaacttatctttcactcttgtaaaagccacatatccacatctctttcatttttctcagtgtgttatgcagcaatttattaaagtatttattgtctaataaa

SEQ ID NO: 131999 - DNA, 2012 bp, Homo sapiens
  Payload ID: 5769
  Gene Symbol: FAM132B
  Gene Name: family with sequence similarity 132, member B
  ENST ID: ENST00000357303
  CDS Start-End: 1-191
gttttgggtacagctccctggaggccatcatgggcctggagagcagcagtgagctcttcaccatctctgtgaatggcgtcctgtacctgcagatggggcagtggacctccgtgttcttggacaacgccagcggctgctccctcacagtgcgcagtggctcccacttcagtgctgtcctcctgggcgtgtgagcggccaccacaggcccttcctctcaggggcaaatggagcacagatctagacaatgtgtggacagtgtcagagtagcagtggccacatggaggaggaggcccacccggaactctgcccacactggccactgcagttcagcccacagagccactgcaggcaggcctacggacgtgacacgcacgctggtggtcccggagccagggttgattcaggacaccatcttgggctcttatccaggaaagaaagagtcggcgtgcctgggggcacctgctagtctccagctgcaggccgactctttcctggcctgctcagcacctgcccagatggcctctgcgtctttcctgtgcccagccccaccttttccacctctcttcatgttctcatggagtgcaaagtgcaccagccagggcccctacctgggagagggtcagctgacgcagggctgagggggctgccacagggacgtacgctgtgtgttcttactgcttagaagggacggggtcactcaccactcccctggtctccatctgggctccttggtcttccctgcccctcccctaaccgtgttctacctgccagtggagctgagcactgcctagcctgggccagaggggcactggacaagggcctttgggggacagtaagtctgggcccagcttctagttctaatgtgtgcaagattaactcacaaattcacctcagaaggcctttccaaatgggagctccactcttcccctcctctgcaaatcttcacagccaaggccccttccaccctctccagaggtggatgagatcccttttcccctcccctctgaggtgctgactcactggtaggagccacccaccagaggaaagatctagaacgtctttacagattggagacagccgggcctgctgacccatcatccgaatagctgaagcagagtcttccaccaggggtgccagggcctggctgggtccagcggctctgggatgagcctcccaagcatctttcccacttgggtggccatgcggcgctgacattggacaggtggtggacgagagatggtcccgagaaagggtggtcttgggagggctggtcccaagcctgctgtgctcctgtggcagtgatggggcctggggatggggacggcagctctcatgaggacacacaggctgtgagcccgcagcctcctcaaatgtagcctcccacattttccccaaagtacaggactgtcccagagtaggtagtgaagaggacaaggccctcggcagcgacctccagggcctcctacctgctgaggaagagttaacccactgcctccccacacaacaggctacgaagaacctggtgcctcaggacctcctgggagccaagctggtctggcaagggcgctcaggcctgggagagaagggagcaatggccagtcaccttcaccttctaactaactagcctccggatgaggtggctgccaccaggcccgaatgatccccaggagcccagcttccaaaccccaacatcgaatcaaacatctccatccccaagtgcagtaacacacaaaaaccaaacactctgccctgggaaaggcctggtgcgattctcagtaggactcacacccaccctacctagaagtactgggctggcctgggtactgcatccgtgtgttttgataagggggtgatgtggccacgcccttatctagatttcactttgtatccactgggcacagatattctagagaacttatctttcactcttgtaaaagccacatatccacatctctttcatttttctcagtgtgttatgcagcaatttattaaagtatttattgtctaataaa

SEQ ID NO: 132000 - DNA, 1065 bp, Homo sapiens
  Payload ID: 5769
  Gene Symbol: FAM132B
  Gene Name: family with sequence similarity 132, member B
  Uniprot ID: Q4G0M1
  ENST ID: ENST00000546354
  CDS Start-End: 1-1065
atggccccggcccgccgccccgccggagcccgcctgctgctcgtctacgcgggcctgctggccgccgccgccgcgggcctggggtccccggagcctggggcgccctcgaggagccgcgcccgcagggagccgccgcccgggaacgagctgccccggggccccggggagagccgcgcggggccggccgctcgtccgccggagcccaccgctgagcgtgcacacagcgtcgacccccgggacgcctggatgctcttcgtcaggcagagtgacaagggtgtcaatggcaagaagaggagcaggggcaaggccaagaagctgaagttcggcttgccagggccccctgggcctcccggtccccagggccccccaggccccatcatcccacccgaggcgctgctgaaggagttccagctgctgctgaaaggtgcggtgcggcagcgggagcgcgcggagcccgaaccctgtacgtgtggccccgccgggccggtcgctgcgagcctcgccccggtctcggccaccgccggggaggacgacgacgacgtggtgggggacgtgctggcactgctggccgcgcccctggccccggggccgcgggcgccgcgcgtggaggccgctttcctctgccgcctgcgccgggacgcgttggtggagcggcgcgcgctgcacgagcttggcgtctactacctgcccgacgccgagggtgccttccgccgcggcccgggcctgaacttgaccagcggccagtacagggcgcccgtggctggcttctacgctctcgccgccacgctgcacgtggcgctcggggagccgccgaggagggggccgccgcgcccccgggaccacctgcgcctgctcatctgcatccagtcccggtgccagcgcaacgcctccctggaggccatcatgggcctggagagcagcagtgagctcttcaccatctctgtgaatggcgtcctgtacctgcagatggggcagtggacctccgtgttcttggacaacgccagcggctgctccctcacagtgcgcagtggctcccacttcagtgctgtcctcctgggcgtgtga

SEQ ID NO: 132001 - DNA, 3292 bp, Homo sapiens
  Payload ID: 5770
  Gene Symbol: FAM133A
  Gene Name: family with sequence similarity 133, member A
  Uniprot ID: Q8N9E0
  ENST ID: ENST00000322139
  CDS Start-End: 438-1184
aaattgaatgaaaatggtccaaatggcgtcattgggtagtgtgactatggacgatttaaaaacaaaacgattttctctaaatattctatgagcatgcatttttacactggataaaaaaggggagagtcggttattggcagaggagggagggactagacagcaggcgtattgcattccacgaagctgatttaataagtgctgtctgtgatgtttggcaagcctggtttatatccatctacaaggtttgcgaacccatgttgccgatttttttttctgctacagaacaactcccttggtacaataaaaaagacgagtatttacttttcattgaaagaatggagcttgcttgatatttcactagataaagaatttaaggcgagtatctatctttgttctccttggcaactgagagtctgcccttggaaacatcaggcaccatggggaagcgggataatcgggtagcctatatgaatcctatagcaatggccagatggagaggcccaactcaatctgtgggcccaacaatccaagattatctaaatcgaccaagacccacctgggaagaagtaaagaaacaattagaaaataaaaaaacaggttcaaaagcattagctgaatttgaagaaaaaatgaatgaaaattggaagaaagaacttgaaaaaagcagagagaaattattaagtggaaatgagagctcatctaaaaaaagagaaagaaagaaaaagagaaagaagaaatcttgtcggtcttcatcttcttcatcaagctctgattcttcaagcagttcttcagattctgaggatgaggaaaagaaacaaggaaaaaggagaaagaaaaagaagaaccgttcatacaaatcatcccaaagctctacgcatgaatcagaatcagagagcaaggagtctgtaaaaaagaaaaagaagtcaaaggatgaaacagagaaagaaaaggatgtaagaagcctcagcaaaaaaagaaagaaaagttaccctgatgataaacctttatcatctgagtcctcatctgaatcagattatgaagaggatgtgcaagcaaaaaagaagagaaggtgtgaagagcgagaacaagcaaaggaaaaagtaaagaagaagaagaagaaacagcacaagaaacatagtaagaagaagaaaaagaagtctggatcaagtcacaagtcaaggtaacatcaagaaaaaaagcaagaatgagtttgccgagttcccctgtgttagtagaattatttctggactttgagttgcctatcaaatcccactgtgccagtaaggggcatagtggctgctggcaacttcaatatacatttttgtttgtttgcttgtccttccttctaatggttaattcctctgagagctaaaattctgttgtcataccagtgaataaaatgtttgaaattaaagtaaaatgtgttagataatgaataactttgacaaaaaaaagtgtatctaaggttaaatgtatctaattcgaatacatctttgaaatatcaccatcaatgaaacataaatgtaatttccagacaattgtagttggtatttttgatgcaaggacttaatattgatgtctcaaattccttgcttttgtaaataagtttagttcattttccttttttctttaatgaatctttgtttacatggggaaagagcatgtggggtgggaagggcaagtgtttgctaatcactgtggctagctgaatagtgtgcctttgactcttacacatcctatttttgccagagcagcagccgtccttttcttactttatgaaattctggggtgttgtatgctgcttcaagtgaacaagaaggacaggagtttacagcataagtaagcccccatatctatgaaatttacctcttcttcagcactgtttactatacagtactgaataatatttagtattacaatattacatgatttgaaataactttatacccattttgtatgggaaccattctaaacagaccctgatgttgtttgattaagaaatattctgaaattttttttgcatgttttatactgttaagttttaattatctgaccatattctatataactgatgatccttttttaagatatgatttatgcttaggatataagtttcaagtttttagtttcttagccttgctatattaatttcattactgtgtttaattgcacccttgccaaaatatttagcatgtgaaaaggttttttttaaaaaatatgtaatgccttcatattgaagctggttactgtacgcaagttgagtgccagacctctagtacgccgtatgttacatgaaactactgccaaaatcttagtaagattgttgttgaaaagattgttgtcttaagcattaatattgaatttatatagaagttaaatgtagatgataatgacatcattgatcttcctgtgtccgtattttcctacaatttggtgccttgtatctgttgctgattcacttttaccactagtgtaaaaataagtgaaaaaatatttttactttacatttttatatatcagagtaacataaattataaatttgtgtctcaaaaccacctgtgatggaggatgtgctaattgtaatgtcataggtacaaagtattttggcatgatgaaaagctcaatagctattgtttttcaatagcagattttatctcggctaccttcaatcacaagtaaaattataaagataaaaaacatctacataaacatgttggctgccaaattttttgcattggaaatactggaatctctcattaaagttcttggaacattatagtgatgccatgttagattaccttggagcttcataactttagctttttcctaaaaatatatgtttatgctgataaaaactattacatttatgggatattttgtatccatatagagtttttcagaattgttcattaaaatgctttttataagcttatattatttgtagaatatggcaaaagcatttacagctcatcatgtatctatctgctcctgttcacttccaaacctcttgtagttaggcaatgccatttgactacttcaagcagagggattgtaaacagaagtgattttctatttccatgttggactgtaaaaagttctgcatgaccctccagttttcttttgcctgtcatggtgacctgaaagcaagatgttccaaatggcatacttacaagacggatgcaacctgggtccttaggtcgctgtttagaagggacctgactggagtgctgatggacttgcagtaaactttttaagtgtaagaaataaactgttatgtgttaaaccactgtga

SEQ ID NO: 132002 - DNA, 3159 bp, Homo sapiens
  Payload ID: 5770
  Gene Symbol: FAM133A
  Gene Name: family with sequence similarity 133, member A
  Uniprot ID: Q8N9E0
  ENST ID: ENST00000332647
  CDS Start-End: 314-1060
aagtgctgtctgtgatgtttggcaagcctggtttatatccatctacaaggtttgcgaacccatgttgccaacaactcccttggtacaataaaaaagacgagtatttacttttcattgaaagtggagaacctgaaaaggaacctggaaagaagcagctggaaaaggtgagaggaaaacctagagtgtgtgttatcctgcaagccaattgagaatggagcttgcttgatatttcactagataaagaatttaaggcgagtatctatctttgttctccttggcaactgagagtctgcccttggaaacatcaggcaccatggggaagcgggataatcgggtagcctatatgaatcctatagcaatggccagatggagaggcccaactcaatctgtgggcccaacaatccaagattatctaaatcgaccaagacccacctgggaagaagtaaagaaacaattagaaaataaaaaaacaggttcaaaagcattagctgaatttgaagaaaaaatgaatgaaaattggaagaaagaacttgaaaaaagcagagagaaattattaagtggaaatgagagctcatctaaaaaaagagaaagaaagaaaaagagaaagaagaaatcttgtcggtcttcatcttcttcatcaagctctgattcttcaagcagttcttcagattctgaggatgaggaaaagaaacaaggaaaaaggagaaagaaaaagaagaaccgttcatacaaatcatcccaaagctctacgcatgaatcagaatcagagagcaaggagtctgtaaaaaagaaaaagaagtcaaaggatgaaacagagaaagaaaaggatgtaagaagcctcagcaaaaaaagaaagaaaagttaccctgatgataaacctttatcatctgagtcctcatctgaatcagattatgaagaggatgtgcaagcaaaaaagaagagaaggtgtgaagagcgagaacaagcaaaggaaaaagtaaagaagaagaagaagaaacagcacaagaaacatagtaagaagaagaaaaagaagtctggatcaagtcacaagtcaaggtaacatcaagaaaaaaagcaagaatgagtttgccgagttcccctgtgttagtagaattatttctggactttgagttgcctatcaaatcccactgtgccagtaaggggcatagtggctgctggcaacttcaatatacatttttgtttgtttgcttgtccttccttctaatggttaattcctctgagagctaaaattctgttgtcataccagtgaataaaatgtttgaaattaaagtaaaatgtgttagataatgaataactttgacaaaaaaaagtgtatctaaggttaaatgtatctaattcgaatacatctttgaaatatcaccatcaatgaaacataaatgtaatttccagacaattgtagttggtatttttgatgcaaggacttaatattgatgtctcaaattccttgcttttgtaaataagtttagttcattttccttttttctttaatgaatctttgtttacatggggaaagagcatgtggggtgggaagggcaagtgtttgctaatcactgtggctagctgaatagtgtgcctttgactcttacacatcctatttttgccagagcagcagccgtccttttcttactttatgaaattctggggtgttgtatgctgcttcaagtgaacaagaaggacaggagtttacagcataagtaagcccccatatctatgaaatttacctcttcttcagcactgtttactatacagtactgaataatatttagtattacaatattacatgatttgaaataactttatacccattttgtatgggaaccattctaaacagaccctgatgttgtttgattaagaaatattctgaaattttttttgcatgttttatactgttaagttttaattatctgaccatattctatataactgatgatccttttttaagatatgatttatgcttaggatataagtttcaagtttttagtttcttagccttgctatattaatttcattactgtgtttaattgcacccttgccaaaatatttagcatgtgaaaaggttttttttaaaaaatatgtaatgccttcatattgaagctggttactgtacgcaagttgagtgccagacctctagtacgccgtatgttacatgaaactactgccaaaatcttagtaagattgttgttgaaaagattgttgtcttaagcattaatattgaatttatatagaagttaaatgtagatgataatgacatcattgatcttcctgtgtccgtattttcctacaatttggtgccttgtatctgttgctgattcacttttaccactagtgtaaaaataagtgaaaaaatatttttactttacatttttatatatcagagtaacataaattataaatttgtgtctcaaaaccacctgtgatggaggatgtgctaattgtaatgtcataggtacaaagtattttggcatgatgaaaagctcaatagctattgtttttcaatagcagattttatctcggctaccttcaatcacaagtaaaattataaagataaaaaacatctacataaacatgttggctgccaaattttttgcattggaaatactggaatctctcattaaagttcttggaacattatagtgatgccatgttagattaccttggagcttcataactttagctttttcctaaaaatatatgtttatgctgataaaaactattacatttatgggatattttgtatccatatagagtttttcagaattgttcattaaaatgctttttataagcttatattatttgtagaatatggcaaaagcatttacagctcatcatgtatctatctgctcctgttcacttccaaacctcttgtagttaggcaatgccatttgactacttcaagcagagggattgtaaacagaagtgattttctatttccatgttggactgtaaaaagttctgcatgaccctccagttttcttttgcctgtcatggtgacctgaaagcaagatgttccaaatggcatacttacaagacggatgcaacctgggtccttaggtcgctgtttagaagggacctgactggagtgctgatggacttgcagtaaactttttaagtgtaagaaataaactgttatgtgttaaa

SEQ ID NO: 132003 - DNA, 1890 bp, Homo sapiens
  Payload ID: 5771
  Gene Symbol: FAM133B
  Gene Name: family with sequence similarity 133, member B
  ENST ID: ENST00000415397
  CDS Start-End: 39-356
tttccctcggcgtgctactgtgcgctcgatccagcaccatggggaagcgggacaatcgggtggcctatatgaacccaatagcaatggcgagatcaaggggtccaatccagtcttcagggccaacaatacaggattatctgaatcgaccaaggcctacctgggaagaagtaaaagagcaactagaaaagaaaaagaaaggctccaaggctttggctgaatttgaagaaaaaatgaatgagaactggaagaaagaactggaaaaacacagggagaaattgttaagtggaagtgagagctcatccaaaaaaagacagagaaagaaaaaagaaaagaagaaatctggtaggttcttctgattctgaagatgaggataagaaacaaggaaaacggagaaagaaaaagaagaaccgttcacataaatcttctgaaagctccatgtcagaaactgaatcagacagtaaggatagtttaaaaaagaaaaagaagtcaaaagatggaactgagaaagaaaaggatattaaaggactcagcaaaaagagaaagatgtattctgaagataaacctttatcatctgagtccttgtcagaatcagagtatattgaggaggtgcgagcaaaaaagaagaaaagcagtgaagaacgagaaaaagcaacagcaagaaaaaacaaaaaagaaaaagaagcataagaaacacagtaagaagaagaaaaagaaggctgctagttcaagtcctgactcaccataacattaagaaaaatcaggattcccttataaagaaagtgcaatgtctgaggaaatttcaactgtgaaaactacaacatatttactaaaatgcatgaattttcttgtttttggaattattcctggactattcagtagccactcagatgccactgtgtgaaagggccataaatgttgcctgctgcttgaacatctatttttttctcttccagtgcttgataactctgggagataatacactgcagtcgtactagtggttaagatatttgggaataaaattaatacttttgactagaagcgtctaaggataaaccaacagaaattgaatctggatacatctttaagatgtaatcagaaatgaccagatgactctagttagaatttttgaaggagggattacattaatatttcaaaacccttactctgtagataagtgtattttaattttttcccctcgtatacttttatttacctggggaaggagcttttagggttggggggtggtttgctatctctttagctagcagaatagtgtgcctttgatcctcacacatcctgtattatggacacagtagccatgcttcacggggaggtcagagctggctaccagcagtcttgccctttactgagcttagtgtcatctttggatgctgtcatatgctgctttgagtgaaccagagaaacagccatttgcagcatgagaaagccccaaaagctctgggatttacctccactttagtaataatgaatattttttagcattagaatgtgttatgtcatttgaattaattttgactacactttggcttgggagaggaattattttaaatagacattggtactttttgaacttgatagctaaagattctaaaatgcatgttttatactaagttttaaccagtcaggaaaattttatgtaactagtgatagtttatttttttgtatgaattttgtttaggctgcaatgtttagcttttgttaactcctcactcttgctgtcttaagttcattactatgtttaatggcctacttgccaagatatttagcatgtaaaaagcagggttttgattaaaaaaaaaaaacggcttcatattgaagctgagacttacaataacaagttgagtggcaagcctggtatgctgtgtctta

SEQ ID NO: 132004 - DNA, 2434 bp, Homo sapiens
  Payload ID: 5771
  Gene Symbol: FAM133B
  Gene Name: family with sequence similarity 133, member B
  Uniprot ID: Q5BKY9
  ENST ID: ENST00000438306
  CDS Start-End: 232-945
ggcggagtggggaggcggcaagaggacctgcggcaggccctcttcggcagtctctccggcccggtttccctcggcgtgctactgtgcgctcgatccagcaccatggggaagcgggacaatcgggtggtactgccaaaattatgacatgataccaaggaaattagaatgtgatcaatattgttgaaaacaaaaacaaaaacctgagaccagttaaatttaacaaaggcctatatgaacccaatagcaatggcgagatcaaggggtccaatccagtcttcagggccaacaatacaggattatctgaatcgaccaaggcctacctgggaagaagtaaaagagcaactagaaaagaaaaagaaaggctccaaggctttggctgaatttgaagaaaaaatgaatgagaactggaagaaagaactggaaaaacacagggagaaattgttaagtggaagtgagagctcatccaaaaaaagacagagaaagaaaaaagaaaagaagaaatctggtaggtattcatcttcttcttcatcaagctctgattcttccagcagttcttctgattctgaagatgaggataagaaacaaggaaaacggagaaagaaaaagaagaaccgttcacataaatcttctgaaagctccatgtcagaaactgaatcagacagtaaggatagtttaaaaaagaaaaagaagtcaaaagatggaactgagaaagaaaaggatattaaaggactcagcaaaaagagaaagatgtattctgaagataaacctttatcatctgagtccttgtcagaatcagagtatattgaggaggtgcgagcaaaaaagaagaaaagcagtgaagaacgagaaaaagcaacagaaaaaacaaaaaagaaaaagaagcataagaaacacagtaagaagaagaaaaagaaggctgctagttcaagtcctgactcaccataacattaagaaaaatcaggattcccttataaagaaagtgcaatgtctgaggaaatttcaactgtgaaaactacaacatatttactaaaatgcatgaattttcttgtttttggaattattcctggactattcagtagccactcagatgccactgtgtgaaagggccataaatgttgcctgctgcttgaacatctatttttttctcttccagtgcttgataactctgggagataatacactgcagtcgtactagtggttaagatatttgggaataaaattaatacttttgactagaagcgtctaaggataaaccaacagaaattgaatctggatacatctttaagatgtaatcagaaatgaccagatgactctagttagaatttttgaaggagggattacattaatatttcaaaacccttactctgtagataagtgtattttaattttttcccctcgtatacttttatttacctggggaaggagcttttagggttggggggtggtttgctatctctttagctagcagaatagtgtgcctttgatcctcacacatcctgtattatggacacagtagccatgcttcacggggaggtcagagctggctaccagcagtcttgccctttactgagcttagtgtcatctttggatgctgtcatatgctgctttgagtgaaccagagaaacagccatttgcagcatgagaaagccccaaaagctctgggatttacctccactttagtaataatgaatattttttagcattagaatgtgttatgtcatttgaattaattttgactacactttggcttgggagaggaattattttaaatagacattggtactttttgaacttgatagctaaagattctaaaatgcatgttttatactaagttttaaccagtcaggaaaattttatgtaactagtgatagtttatttttttgtatgaattttgtttaggctgcaatgtttagcttttgttaactcctcactcttgctgtcttaagttcattactatgtttaatggcctacttgccaagatatttagcatgtaaaaagcagggttttgattaaaaaaaaaaaacggcttcatattgaagctgagacttacaataacaagttgagtggcaagcctggtatgctgtgtcttattgccagaatcttagtaaatgtaatgttttaaaagtttgttgtctttgtatattaataacaaattatgacaagttaagtttaaataagagttacattattgctctccctgtgtcatattttactaagattttgtgcctcatgtctactgctgaattgtttactaggaatgttaaaaggaattgataattcattttcattttacatttttatataatcaggtaacatgacatacaacttgatgtacaattttgcctgttacaaagggtgtgctaattatagtggtatatgcacagaacatgttggcatgacaacaggctgaataaatagctattttacttaaaaa

SEQ ID NO: 132005 - DNA, 2026 bp, Homo sapiens
  Payload ID: 5771
  Gene Symbol: FAM133B
  Gene Name: family with sequence similarity 133, member B
  Uniprot ID: Q5BKY9
  ENST ID: ENST00000445716
  CDS Start-End: 104-847
aggcggagtggggaggcggcaagaggacctgcggcaggccctcttcggcagtctctccggcccggtttccctcggcgtgctactgtgcgctcgatccagcaccatggggaagcgggacaatcgggtggcctatatgaacccaatagcaatggcgagatcaaggggtccaatccagtcttcagggccaacaatacaggattatctgaatcgaccaaggcctacctgggaagaagtaaaagagcaactagaaaagaaaaagaaaggctccaaggctttggctgaatttgaagaaaaaatgaatgagaactggaagaaagaactggaaaaacacagggagaaattgttaagtggaagtgagagctcatccaaaaaaagacagagaaagaaaaaagaaaagaagaaatctggtaggtattcatcttcttcttcatcaagctctgattcttccagcagttcttctgattctgaagatgaggataagaaacaaggaaaacggagaaagaaaaagaagaaccgttcacataaatcttctgaaagctccatgtcagaaactgaatcagacagtaaggatagtttaaaaaagaaaaagaagtcaaaagatggaactgagaaagaaaaggatattaaaggactcagcaaaaagagaaagatgtattctgaagataaacctttatcatctgagtccttgtcagaatcagagtatattgaggaggtgcgagcaaaaaagaagaaaagcagtgaagaacgagaaaaagcaacagaaaaaacaaaaaagaaaaagaagcataagaaacacagtaagaagaagaaaaagaaggctgctagttcaagtcctgactcaccataacattaagaaaaatcaggattcccttataaagaaagtgcaatgtctgaggaaatttcaactgtgaaaactacaacatatttactaaaatgcatgaattttcttgtttttggaattattcctggactattcagtagccactcagatgccactgtgtgaaagggccataaatgttgcctgctgcttgaacatctatttttttctcttccagtgcttgataactctgggagataatacactgcagtcgtactagtggttaagatatttgggaataaaattaatacttttgactagaagcgtctaaggataaaccaacagaaattgaatctggatacatctttaagatgtaatcagaaatgaccagatgactctagttagaatttttgaaggagggattacattaatatttcaaaacccttactctgtagataagtgtattttaattttttcccctcgtatacttttatttacctggggaaggagcttttagggttggggggtggtttgctatctctttagctagcagaatagtgtgcctttgatcctcacacatcctgtattatggacacagtagccatgcttcacggggaggtcagagctggctaccagcagtcttgccctttactgagcttagtgtcatctttggatgctgtcatatgctgctttgagtgaaccagagaaacagccatttgcagcatgagaaagccccaaaagctctgggatttacctccactttagtaataatgaatattttttagcattagaatgtgttatgtcatttgaattaattttgactacactttggcttgggagaggaattattttaaatagacattggtactttttgaacttgatagctaaagattctaaaatgcatgttttatactaagttttaaccagtcaggaaaattttatgtaactagtgatagtttatttttttgtatgaattttgtttaggctgcaatgtttagcttttgttaactcctcactcttgctgtcttaagttcattactatgtttaatggcctacttgccaagatatttagcatgtaaaaagcagggttttgattaaaaaaaaaaaacggcttcatattgaagctgagacttacaataacaagttgagtggcaagcctggtatgctgtgtcttattgccagaatcttagtaaatgtaatgttttaaaa

SEQ ID NO: 132006 - DNA, 931 bp, Homo sapiens
  Payload ID: 5771
  Gene Symbol: FAM133B
  Gene Name: family with sequence similarity 133, member B
  Uniprot ID: Q5BKY9
  ENST ID: ENST00000427372
  CDS Start-End: 218-931
cttgcccgccccttttttcttccctcacctcgtcgctctttctggcgctgctggtttgcactcttgcctgctgtacgcgggcccccagtgcccacttagaaccgcgagggctcggggaaccccccccacacctggccccgccatgtaactccgaagacttaggcccttggacgcatccgactcacccgccccttggtatcggccgccccaggcctatatgaacccaatagcaatggcgagatcaaggggtccaatccagtcttcagggccaacaatacaggattatctgaatcgaccaaggcctacctgggaagaagtaaaagagcaactagaaaagaaaaagaaaggctccaaggctttggctgaatttgaagaaaaaatgaatgagaactggaagaaagaactggaaaaacacagggagaaattgttaagtggaagtgagagctcatccaaaaaaagacagagaaagaaaaaagaaaagaagaaatctggtaggtattcatcttcttcttcatcaagctctgattcttccagcagttcttctgattctgaagatgaggataagaaacaaggaaaacggagaaagaaaaagaagaaccgttcacataaatcttctgaaagctccatgtcagaaactgaatcagacagtaaggatagtttaaaaaagaaaaagaagtcaaaagatggaactgagaaagaaaaggatattaaaggactcagcaaaaagagaaagatgtattctgaagataaacctttatcatctgagtccttgtcagaatcagagtatattgaggaggtgcgagcaaaaaagaagaaaagcagtgaagaacgagaaaaagcaacagaaaaaacaaaaaagaaaaagaagcataagaaacacagtaagaagaagaaaaagaaggctgctagttcaagtcctgactcaccataa

SEQ ID NO: 132007 - DNA, 253 bp, Homo sapiens
  Payload ID: 5771
  Gene Symbol: FAM133B
  Gene Name: family with sequence similarity 133, member B
  ENST ID: ENST00000456502
  CDS Start-End: 162-253
tctggcgctgctggtttgcactcttgcctgctgtacgcgggcccccagtgcccacttagaaccgcgagggctcggggaaccccccccacacctggccccgccatgtaactccgaagacttaggcccttggacgcatccgactcacccgccccttggcctatatgaacccaatagcaatggcgagatcaaggggtccaatccagtcttcagggccaacaatacaggattatctgaatcgaccaaggcctacctg

SEQ ID NO: 132008 - DNA, 854 bp, Homo sapiens
  Payload ID: 5771
  Gene Symbol: FAM133B
  Gene Name: family with sequence similarity 133, member B
  ENST ID: ENST00000494079
  CDS Start-End: 1-363
tattcatcttcttcttcatcaagctctgattcttccagcagttcttctgattctgaagatgaggataagaaacaaggaaaacggagaaagaaaaagaagaaccgttcacataaatcttctgaaagctccatgtcagaaactgaatcagacagtaaggatagtttaaaaaagaaaaagaagtcaaaagatggaactgagaaagaaaaggatattaaaggactcagcaaaaagagaaagatgtattctgaagataaacctttatcatctgagtccttgtcagaatcagagtatattgaggaggtgcgagcaaaaaagaagaaaagcagtgaagaacgagaaaaagcaacagcaagtatctcttaacgtttttacagacaatagaataggtgttttggtttaatataaaatgagtcatggtaaagcttgattggatttactgggaccaaataagtatttgttgggaaaggtgtggtgtgttcagcagcttcacttaatgggtaggagaaagtcaaaatggttcaggaaaaataaaaaataccctggtagcaagcatgtcctgtttccatttcagtattttactgttagaaatataagctcagggctgggcgctgtgtctcacgcctgtaatcccagcactttgagaggctgaggcaggtggatcatgaggtcaggagctcgagaccatcctggctaacacggtgaaaccccgtctctactaaaaatacaaaaaattagccgggcatggtggcgggcacctatagtcccagctactcgggaggctgaggcaggagaatggcgtgaacccgggaggcagagcttgcagtgagctgagatcacgccactgcactccagcc

SEQ ID NO: 132009 - DNA, 2533 bp, Homo sapiens
  Payload ID: 5772
  Gene Symbol: FAM134A
  Gene Name: family with sequence similarity 134, member A
  ENST ID: ENST00000273048
  CDS Start-End: 127-663
agtcacgtgacgctcgtccgcaacctctgctgtcctccgcggcgcccccttccgcctgacgcgcccccggcggcggccgcgcagccctggctcctcgcgggctcgggcggcggctgcggcggggctatggcgagcggcggtggcgggggtaacactggcgcgggtggggggccggggatgggcctgagcctgggcctgggtctgggtctgagcctaggcatgagtgaggccaccagtgaggcagaggaggaggcggccacggccgaggcggtgggacgcctggccacgacgctgtggctgcggctccgcggctgggaggcggtgctggcggcggcgcagcggttgctggtgtgggagaagccgctgcacagcctggtcacggcggccgcgctcaacggcctcttctggttgctgtcttcctcgtccctccggcccttcttcctactcagcgtctcacttttggcctattttctgctggatctctggcagcctcgctttctccctgacgtttcagcatcatccccagaggagccacactctgacagattcacctgcaggagctgctgcagtacaagaggcagaatccagctcagttctgcgttcgagtctgctctggctgtgctgtgttggctgtgttgggacactatgttccagggattatgatttcctacattgtcttgttgagtatcctgctgtggcccctggtggtttatcatgagctgatccagaggatgtacactcgcctggagcccctgctcatgcagctggactacagcatgaaggcagaagccaatgccctgcatcacaaacacgacaagaggaagcgtcaggggaagaatgcacccccaggaggtgatgagccactggcagagacagagagtgaaagcgaggcagagctggctggcttctccccagtggtggatgtgaagaaaacagcattggccttggccattacagactcagagctgtcagatgaggaggcttctatcttggagagtggtggcttctccgtatcccgggccacaactccgcagctgactgatgtctccgaggatttggaccagcagagcctgccaagtgaaccagaggagaccctaagccgggacctaggggagggagaggagggagagctggcccctcccgaagacctactaggccgtcctcaagctctgtcaaggcaagccctggactcggaggaagaggaagaggatgtggcagctaaggaaaccttgttgcggctctcatcccccctccactttgtgaacacgcacttcaatggggcagggtcccccccagatggagtgaaatgctcccctggaggaccagtggagacactgagccccgagacagtgagtggtggcctcactgctctgcccggcaccctgtcacctccactttgccttgttggaagtgacccagccccctccccttccattctcccacctgttccccaggactcaccccagcccctgcctgcccctgaggaagaagaggcactcaccactgaggactttgagttgctggatcagggggagctggagcagctgaatgcagagctgggcttggagccagagacaccgccaaaaccccctgatgctccacccctggggcccgacatccattctctggtacagtcagaccaagaagctcaggccgtggcagagccatgagccagccgttgaggaaggagctgcaggcacagtagggcttcctggctaggagtgttgctgtttcctcctttgcctaccactctggggtggggcagtgtgtggggaagctggctgtcggatggtagctattccaccctctgcctgcctgcctgcctgctgtcctgggcatggtgcagtacctgtgcctaggattggttttaaatttgtaaataattttccatttgggttagtggatgtgaacagggctagggaagtccttcccacagcctgcgcttgcctccctgcctcatctctattctcattccactatgccccaagccctggtggtctggccctttctttttcctcctatcctcagggacctgtgctgctctgccctcatgtcccacttggttgtttagttgaggcactttataatttttctcttgtcttgtgttcctttctgctttatttccctgctgtgtcctgtccttagcagctcaaccccatcctttgccagctcctcctatcccgtgggcactggccaagctttagggaggctcctggtctgggaagtaaagagtaaacctggggcagtgggtcaggccagtagttacactcttaggtcactgtagtctgtgtaaccttcactgcatccttgccccattcagcccggcctttcatgatgcaggagagcagggatcccgcagtacatggcgccagcactggagttggtgagcatgtgctctctcttgagattaggagcttccttactgctcctctgggtgatccaagtgtagtgggaccccctactagggtcaggaagtggacactaacatctgtgcaggtgttgacttgaaaaataaagtgttgattggctagaa

SEQ ID NO: 132010 - DNA, 729 bp, Homo sapiens
  Payload ID: 5772
  Gene Symbol: FAM134A
  Gene Name: family with sequence similarity 134, member A
  ENST ID: ENST00000452022
  CDS Start-End: 448-729
ggggcatgacccatccccagtttttgcaggctgacatccgcttgaattgcccatttttttctatctctgagtcgtgagtcgcgagttaggcctggaggtgccattaccccatcagtaggcgcctttccaccttctgagatggatgcatgagcctgtctcacccactcactgctgaggtgcctgtctctccctaaggttgctgtcttcctcgtccctccggcccttcttcctactcagcgtctcacttttggcctattttctgctggatctctggcagcctcgctttctccctgacgtttcagcatcatccccagaggagccacactctgacagattcacctgcaggagctgctgcagtacaagaggcagaatccagctcagttctgcgttcgagtctgctctggctgtgctgtgttggctgtgttgggacactatgttccagggattatgatttcctacattgtcttgttgagtatcctgctgtggcccctggtggtttatcatgagctgatccagaggatgtacactcgcctggagcccctgctcatgcagctggactacagcatgaaggcagaagccaatgccctgcatcacaaacacgacaagaggaagcgtcaggggaagaatgcacccccaggaggtgatgagccactggcagagacagagagtgaaagcgaggcagagctggctggcttctccccagtggtggatgtgaagaaaacagcattg

SEQ ID NO: 132011 - DNA, 609 bp, Homo sapiens
  Payload ID: 5772
  Gene Symbol: FAM134A
  Gene Name: family with sequence similarity 134, member A
  ENST ID: ENST00000452293
  CDS Start-End: 77-385
tccgcctgacgcgcccccggcggcggccgcgcagccctggctcctcgcgggctcgggcggcggctgcggcggggctatggcgagcggcggtggcgggggtaacactggcgcgggtggggggccggggatgggcctgagcctgggcctgggtctgggtctgagcctaggcatgagtgaggccaccagtgaggcagaggaggaggcggccacggccgaggcggtgggacgcctggccacgacgctgtggctgcggctccgcggctgggaggcggtgctggcggcggcgcagcggttgctggtgtgggagaagccgctgcacagcctggtcacggcggccgcgctcaacggcctcttctgcatcatccccagaggagccacactctgacagtgagggtgcggggtcaggcgcccggccgcacctgctgagtgtgcccgagttgtgcagatacctggctgagagctggctcaccttccagattcacctgcaggagctgctgcagtacaagaggcagaatccagctcagttctgcgttcgagtctgctctggctgtgctgtgttggctgtgttgggacactatgttccagggattatgatttcctacattgtct

SEQ ID NO: 132012 - DNA, 4618 bp, Homo sapiens
  Payload ID: 5772
  Gene Symbol: FAM134A
  Gene Name: family with sequence similarity 134, member A
  Uniprot ID: Q8NC44
  ENST ID: ENST00000430297
  CDS Start-End: 137-1768
agcgctccgcagtcacgtgacgctcgtccgcaacctctgctgtcctccgcggcgcccccttccgcctgacgcgcccccggcggcggccgcgcagccctggctcctcgcgggctcgggcggcggctgcggcggggctatggcgagcggcggtggcgggggtaacactggcgcgggtggggggccggggatgggcctgagcctgggcctgggtctgggtctgagcctaggcatgagtgaggccaccagtgaggcagaggaggaggcggccacggccgaggcggtgggacgcctggccacgacgctgtggctgcggctccgcggctgggaggcggtgctggcggcggcgcagcggttgctggtgtgggagaagccgctgcacagcctggtcacggcggccgcgctcaacggcctcttctggttgctgtcttcctcgtccctccggcccttcttcctactcagcgtctcacttttggcctattttctgctggatctctggcagcctcgctttctccctgacgtttcagcatcatccccagaggagccacactctgacagtgagggtgcggggtcaggcgcccggccgcacctgctgagtgtgcccgagttgtgcagatacctggctgagagctggctcaccttccagattcacctgcaggagctgctgcagtacaagaggcagaatccagctcagttctgcgttcgagtctgctctggctgtgctgtgttggctgtgttgggacactatgttccagggattatgatttcctacattgtcttgttgagtatcctgctgtggcccctggtggtttatcatgagctgatccagaggatgtacactcgcctggagcccctgctcatgcagctggactacagcatgaaggcagaagccaatgccctgcatcacaaacacgacaagaggaagcgtcaggggaagaatgcacccccaggaggtgatgagccactggcagagacagagagtgaaagcgaggcagagctggctggcttctccccagtggtggatgtgaagaaaacagcattggccttggccattacagactcagagctgtcagatgaggaggcttctatcttggagagtggtggcttctccgtatcccgggccacaactccgcagctgactgatgtctccgaggatttggaccagcagagcctgccaagtgaaccagaggagaccctaagccgggacctaggggagggagaggagggagagctggcccctcccgaagacctactaggccgtcctcaagctctgtcaaggcaagccctggactcggaggaagaggaagaggatgtggcagctaaggaaaccttgttgcggctctcatcccccctccactttgtgaacacgcacttcaatggggcagggtcccccccagatggagtgaaatgctcccctggaggaccagtggagacactgagccccgagacagtgagtggtggcctcactgctctgcccggcaccctgtcacctccactttgccttgttggaagtgacccagccccctccccttccattctcccacctgttccccaggactcaccccagcccctgcctgcccctgaggaagaagaggcactcaccactgaggactttgagttgctggatcagggggagctggagcagctgaatgcagagctgggcttggagccagagacaccgccaaaaccccctgatgctccacccctggggcccgacatccattctctggtacagtcagaccaagaagctcaggccgtggcagagccatgagccagccgttgaggaaggagctgcaggcacagtagggcttcctggctaggagtgttgctgtttcctcctttgcctaccactctggggtggggcagtgtgtggggaagctggctgtcggatggtagctattccaccctctgcctgcctgcctgcctgctgtcctgggcatggtgcagtacctgtgcctaggattggttttaaatttgtaaataattttccatttgggttagtggatgtgaacagggctagggaagtccttcccacagcctgcgcttgcctccctgcctcatctctattctcattccactatgccccaagccctggtggtctggccctttctttttcctcctatcctcagggacctgtgctgctctgccctcatgtcccacttggttgtttagttgaggcactttataatttttctcttgtcttgtgttcctttctgctttatttccctgctgtgtcctgtccttagcagctcaaccccatcctttgccagctcctcctatcccgtgggcactggccaagctttagggaggctcctggtctgggaagtaaagagtaaacctggggcagtgggtcaggccagtagttacactcttaggtcactgtagtctgtgtaaccttcactgcatccttgccccattcagcccggcctttcatgatgcaggagagcagggatcccgcagtacatggcgccagcactggagttggtgagcatgtgctctctcttgagattaggagcttccttactgctcctctgggtgatccaagtgtagtgggaccccctactagggtcaggaagtggacactaacatctgtgcaggtgttgacttgaaaaataaagtgttgattggctagaactgctgcctccctgactgtgagctgccttccacaccctgcactgcactgtgttctctcctcacccttaacctgcttcactccagtctgttctggctgtttattaccttgttgcaaaacagggccgaagcaaggattaccttgacaaccctagcttctccttagccatcttccttgacagtgtgatctgtttagtgagatttagcatgtgtgaataaagtatatgcaggaggaaattgctttgtcttcccaatcggtagaaattcgggaccataaaaattgtgttttaccatgtggcctacaaccttaacactgctttcttaagaagtcttcacccatctacatgctaacaactcactcagcctggatttatctttactggggaagccaaacaagcaatagaggacctttacctgtgttagaaatgagttggagccaaggaacactgaagaaatagtatcttaacagttactgagtccattgtatgtgcttggctctgctctgagtgatttatatgtattaagatttttcctcacaggtcagatatatactgttactaacttcattttatagacaggttaagcttcctgaaggccacaggtcccagtaaattgtggagccagaacccaaacccaagaagttttggcttcagcaaatgcatcagacagcccctgtccattaatagggcacaggtaggaagatgcacaaggatgtgggaactatagagaaccaatctgatgccttggcttaacaaagagtggacatggcaagccttcctctttggggaagaaaagcccagaactgagcagatggcctcctttatgagttcatgtcctccgccttcagctggaggtaccatatggcgatgctacctgtctttctgctggaggtaccatatggtaatgctgcctggctgtctgctggaggtaccatatggtaatgctgcctgtctttctgaggttgacttttatgccatgtctttcctaagtgtgtaagaatttttctgtttgcttcacatttgactgagaatcattctagggtttgattgagcccctgtcctgtgccactaaaggaactcgaacttttcatcacttagagatttcagaggggaatggaaaaacagttctaatcaataagcaagcaattcaagaaaaatagaattaatcaggcaatgactgcaacatgtcctatctttaatctattttcttattaagcttggacattgacaatagaaccagaagcttgtagctggatcaaaatattctccataggcctggagtttcatgagggtctattcttttgttgttgttgttttggttttttgttttttgtgggtttttttttttttttttttgagacggagtcttgttctgttgcccaggctggagtgcaatggtgcagtcttggttcactgcaacctctgcctcccaggttcaaacaattctcctgcctcagccgtccaagtagctgggattacaggtgcatgccacgatgcctggctattttttgtatttttagtagaggtggggtttcaccatgttggccaggctggtctcgaactcctgacctcaggtgattcacccacctcggcctcccaaagtgctgggattacaggtgtgagccacggcgcccagcctcatgagggtctattctttacattcaccatggtctgatggttgctacatgtttgtctatgattttttttttctattatcaggtgtcttggccggttcatgccccacgatgaaagggccagaggttttcatatgagtaaaagaaaaaagcagaaatgtgaaacctacaattaggctaaacaaaaatcaactggaaaagtacaggctgaggggagaagagttggctacatgtttatgttaggggaggagggagtacattttagctatgtattcaaacagctaatagtttaatgttgctgcttataaacttaattttaggctgcattaataaaagtgtagtctccaaaacaagaaa

SEQ ID NO: 132013 - DNA, 563 bp, Homo sapiens
  Payload ID: 5772
  Gene Symbol: FAM134A
  Gene Name: family with sequence similarity 134, member A
  ENST ID: ENST00000430747
  CDS Start-End: 549-563
atcacttggcctgggggcatgacccatccccagtttttgcaggctgacatccgcttgaattgcccatttttttctatctctgagtcgtgagtcgcgagttaggcctggaggtgccattaccccatcagtaggcgcctttccaccttctgagatggatgcatgagcctgtctcacccactcactgctgaggtgcctgtctctccctaaggttgctgtcttcctcgtccctccggcccttcttcctactcagcgtctcacttttggcctattttctgctggatctctggcagcctcgctttctccctgacgtttcagcatcatccccagaggagccacactctgacagtgagggtgcggggtcaggcgcccggccgcacctgctgagtgtgcccgagttgtgcagatacctggctgagagctggctcaccttccagattcacctgcaggagctgctgcagtacaagaggcagaatccagctcagttctgcgttcgagtctgctctggctgtgctgtgttggctgtgttgggacactatgttccagggattatgatttcctacatt

SEQ ID NO: 132014 - DNA, 992 bp, Homo sapiens
  Payload ID: 5772
  Gene Symbol: FAM134A
  Gene Name: family with sequence similarity 134, member A
  ENST ID: ENST00000458520
  CDS Start-End: 491-992
gccaccgggctggagagctcctccaggctacagtcggcttcccagtcccagccatagtagagcctccttcggatccgggcactcagcttctggtgtcctgggaggaactgaaacagggcaggggcagcggagggtgaagggcacggaaaggttgctgtcttcctcgtccctccggcccttcttcctactcagcgtctcacttttggcctattttctgctggatctctggcagcctcgctttctccctgacgtttcagcatcatccccagaggagccacactctgacagtgagggtgcggggtcaggcgcccggccgcacctgctgagtgtgcccgagttgtgcagatacctggctgagagctggctcaccttccagattcacctgcaggagctgctgcagtacaagaggcagaatccagctcagttctgcgttcgagtctgctctggctgtgctgtgttggctgtgttgggacactatgttccagggattatgatttcctacattgtcttgttgagtatcctgctgtggcccctggtggtttatcatgagctgatccagaggatgtacactcgcctggagcccctgctcatgcagctggactacagcatgaaggcagaagccaatgccctgcatcacaaacacgacaagaggaagcgtcaggggaagaatgcacccccaggaggtgatgagccactggcagagacagagagtgaaagcgaggcagagctggctggcttctccccagtggtggatgtgaagaaaacagcattggccttggccattacagactcagagctgtcagatgaggaggcttctatcttggagagtggtggcttctccgtatcccgggccacaactccgcagctgactgatgtctccgaggatttggaccagcagagcctgccaagtgaaccagaggagaccctaagccgggacctaggggagggagaggagggagagctggcccctcccgaagacctactaggccgtc

SEQ ID NO: 132015 - DNA, 1781 bp, Homo sapiens
  Payload ID: 5772
  Gene Symbol: FAM134A
  Gene Name: family with sequence similarity 134, member A
  ENST ID: ENST00000420189
  CDS Start-End: 1-610
agactcagagctgtcagatgaggaggcttctatcttggagagtggtggcttctccgtatcccgggccacaactccgcagctgactgatgtctccgaggatttggaccagcagagcctgccaagtgaaccagaggagaccctaagccgggacctaggggagggagaggagggagagctggcccctcccgaagacctactaggccgtcctcaagctctgtcaaggcaagccctggactcggaggaagaggaagaggatgtggcagctaaggaaaccttgttgcggctctcatcccccctccactttgtgaacacgcacttcaatggggcagggtcccccccagatggagtgaaatgctcccctggaggaccagtggagacactgagccccgagacagactcaccccagcccctgcctgcccctgaggaagaagaggcactcaccactgaggactttgagttgctggatcagggggagctggagcagctgaatgcagagctgggcttggagccagagacaccgccaaaaccccctgatgctccacccctggggcccgacatccattctctggtacagtcagaccaagaagctcaggccgtggcagagccatgagccagccgttgaggaaggagctgcaggcacagtagggcttcctggctaggagtgttgctgtttcctcctttgcctaccactctggggtggggcagtgtgtggggaagctggctgtcggatggtagctattccaccctctgcctgcctgcctgcctgctgtcctgggcatggtgcagtacctgtgcctaggattggttttaaatttgtaaataattttccatttgggttagtggatgtgaacagggctagggaagtccttcccacagcctgcgcttgcctccctgcctcatctctattctcattccactatgccccaagccctggtggtctggccctttctttttcctcctatcctcagggacctgtgctgctctgccctcatgtcccacttggttgtttagttgaggcactttataatttttctcttgtcttgtgttcctttctgctttatttccctgctgtgtcctgtccttagcagctcaaccccatcctttgccagctcctcctatcccgtgggcactggccaagctttagggaggctcctggtctgggaagtaaagagtaaacctggggcagtgggtcaggccagtagttacactcttaggtcactgtagtctgtgtaaccttcactgcatccttgccccattcagcccggcctttcatgatgcaggagagcagggatcccgcagtacatggcgccagcactggagttggtgagcatgtgctctctcttgagattaggagcttccttactgctcctctgggtgatccaagtgtagtgggaccccctactagggtcaggaagtggacactaacatctgtgcaggtgttgacttgaaaaataaagtgttgattggctagaactgctgcctccctgactgtgagctgccttccacaccctgcactgcactgtgttctctcctcacccttaacctgcttcactccagtctgttctggctgtttattaccttgttgcaaaacagggccgaagcaaggattaccttgacaaccctagcttctccttagccatcttccttgacagtgtgatctgtttagtgagatttagcatgtgtgaataaagtatatgcaggaggaaattgctttgtcttcccaatcggtagaaattcgggaccataaaaattgtgttttaccatgtggcctacaaccttaa

SEQ ID NO: 132016 - DNA, 558 bp, Homo sapiens
  Payload ID: 5772
  Gene Symbol: FAM134A
  Gene Name: family with sequence similarity 134, member A
  ENST ID: ENST00000443757
  CDS Start-End: 543-558
cttcccgagcgagcagaagcagaccctaccggggatactgggaatctggaagcccacttcctgccccacacggggataccggggcagcaccacactccctagccgccctgcctactgtgggataagaaaacgggctcgactgcctggacctagacccggactcggaacccggggtacttcgtcaaccagaaaacgaacctgtgttgctgtcttcctcgtccctccggcccttcttcctactcagcgtctcacttttggcctattttctgctggatctctggcagcctcgctttctccctgacgtttcagcatcatccccagaggagccacactctgacagtgagggtgcggggtcaggcgcccggccgcacctgctgagtgtgcccgagttgtgcagatacctggctgagagctggctcaccttccagattcacctgcaggagctgctgcagtacaagaggcagaatccagctcagttctgcgttcgagtctgctctggctgtgctgtgttggctgtgttgggacactatgttccagggattatgatttcctacattg

SEQ ID NO: 132017 - DNA, 3268 bp, Homo sapiens
  Payload ID: 5773
  Gene Symbol: FAM134B
  Gene Name: family with sequence similarity 134, member B
  Uniprot ID: Q9H6L5
  ENST ID: ENST00000306320
  CDS Start-End: 88-1581
accgccgccccgccctcggcggcacccacacccaggcgcgcccgcgcgcgcgcccggccccgtccctgtctggaagcacagctgaagatggcgagcccggcgcctccggagcacgccgaggagggatgcccggctcctgccgccgaggagcaggcgccgccgtcgccgccaccgccccaggcatcccccgcagagcggcagcagcaggaggaggaagcgcaggaagctggggcggcggagggcgcggggttgcaggtggaggaggccgcgggccgggcggcggccgcggtaacctggctgctcggggagccggtgctgtggctgggctgccgcgccgacgagctgctgagctggaagaggccgctgcggagcctgctcggcttcgtcgctgccaacctgctgttctggttccttgcattgactccatggagagtatatcacctgatttccgtcatgatacttgggcgtgttattatgcaaataataaaggatatggttttgtctagaacaagaggtgcacagttgtggagaagcctcagtgaaagctgggaagttatcaattccaaaccagatgaaagacccaggctcagccactgtattgcagaatcatggatgaatttcagcatatttcttcaagaaatgtctctttttaaacagcagagccctggcaagttttgtctcctggtctgtagtgtgtgcacattttttacgatcttgggaagttacattcctggggttatactcagctatctactgttactgtgtgcatttttgtgtccattgtttaaatgtaatgatattggacaaaaaatttacagcaaaattaagtcagttctgctgaaactggattttggaattggagaatatattaatcagaagaaacgtgagagatctgaagcagacaaagaaaaaagtcacaaagatgacagtgaattagacttttcagctctttgtcctaagattagcctcacggttgctgccaaagagttatctgtgtctgacacagacgtctcagaggtatcctggactgataatgggaccttcaacctttcagaaggatacactccacagacagacacttctgatgatcttgaccgacccagtgaggaagttttctctagagatctttcagattttccatctctagaaaatggcatgggaacaaatgatgaagatgaattaagccttggtttgcccactgagctcaagagaaagaaggaacagttggacagtggtcacagaccaagcaaagagacgcaatcagcagctggtctcacccttcctctgaacagtgaccaaacctttcacctgatgagcaacctggctggggatgttatcacagctgcagtgactgcagctatcaaagaccagttagagggtgtgcagcaagcactttctcaggctgcccccatcccagaagaggacacagacactgaagaaggtgatgactttgaactacttgaccagtcagagctggatcaaattgagagtgaattgggacttacacaagaccaggaagcagaagcacagcaaaataagaagtcttcaggtttcctttcaaatctgctgggaggccattaatctaggaatcagcttgcaacagagcacaaaaaacaccaaaaaaatttcaaacaagaaaaaaaaaaaaaaaaggaaaagaaaaaaattgaactgtaagctttaatgattactttagatttgttttattttccctcctgcagtgaattaattggatatatatcagctgacactgatagattgatatttctgatcgttatttttgtgtaataagcatggaaatgaactttatacacaccactgtgttgtcagagataaatattaggggttgtttttaaagcaaaaagaaaaaaacaaaaaccaaactattaaaatcctcctataaatattctttttctttacagtttttcaagcatgcaaaacagtttattgtaacttactgaaaaatattaacaattaattgtgaatacatgctgttaccagcttccttattcctaatacctggaaaatttttttttcaacggatagattttgatgtaaaaaagaccgaaattatcaaggtatcttagttgaaggacttgggaaatactatcaaaattaatttcttaggaaaaaatttaaaagtatatttaagtactctggatagactgaaacgtttccatgttatttctgcagttgtagacttaggcttatttgtaaagaagcatgctccattgactgccatctctagtcttgcagtgggtggtattaacccatagaaagcaagcagttgtgtatcacatagacaatggttatgatgtaaacagattcagttgttttgttgttcattcgtcatatgtttgtgatagggatgttgggagcacagctctattctgcctgctcagacttaagttagacccttatcttttatattatgtcatgaaaaaagtctcctaaaattgtgaaactagttcttgatgagtgatgtgatcatcagcaataaagatataataactctgttttcttagcctgtatagaggagaggaacttgcttggctttaaaatatatttatttgccatttaagtataaatatggaatctgtttcttattgggaagatagaatatatatattttcctttaaactttttaaggtcacttttaaataaccaaatttgatttatggtttttaacaaaggactaaagagctgaaaccaacctagttttgtttttgtgatataaactttaagtgtcgagggaccatgccagcaactaccaaaaatctcttaaatcttcaggtacagctggcattttggcagatgcatagagacatctgagaccctcagaaaggaaggataatccaagaatataggaaatctgtgttctcttcctttcattttatcccttatatttctaaagactaattataagtaatctgacattttaatgtagctactcttatttattttttctttctgaggtattaaaatatctggactgagttttgccaaatgttaaagggagaagagttactgaagactttgaacacttgctttttgtgattgcttatgtcattagtgcctcatgactgtgtttgatgtcctttattgatacaaagtgagcctgtgccttcattatcttgcccattttaatacaaatggaaacctggtgtttgaaaatctctgaactgtgtgggttttggaggaatatacctgaattttattcaataacagtttctggacaggaagaaaaatacagttacatatttataaa

SEQ ID NO: 132018 - DNA, 3145 bp, Homo sapiens
  Payload ID: 5773
  Gene Symbol: FAM134B
  Gene Name: family with sequence similarity 134, member B
  Uniprot ID: Q9H6L5
  ENST ID: ENST00000399793
  CDS Start-End: 387-1457
atccaatgaaggttactggctgagcggggacaccttctcacaggactggagagagaatgcggggcagctgggcagggctcacttccagccgcctgtcacagtactgggagtaagaggtgacctatttatttttagaagggggcagtgataataacccagctcctagcttcattcaagggaggcaggcgctttggaagtttgtaaacaccaactttctgagtaagggaggagcactttttttccaaaaaggaaagaacgtctctactgggtttttttcctcctgatattcagcattagagtagaaaagaaactattgtttggccacattagccgtggttagcaggtgctgcagcctttgccactgttattatttttaaagggcagaaatgcctgaaggtgaagactttggaccaggcaaaagctgggaagttatcaattccaaaccagatgaaagacccaggctcagccactgtattgcagaatcatggatgaatttcagcatatttcttcaagaaatgtctctttttaaacagcagagccctggcaagttttgtctcctggtctgtagtgtgtgcacattttttacgatcttgggaagttacattcctggggttatactcagctatctactgttactgtgtgcatttttgtgtccattgtttaaatgtaatgatattggacaaaaaatttacagcaaaattaagtcagttctgctgaaactggattttggaattggagaatatattaatcagaagaaacgtgagagatctgaagcagacaaagaaaaaagtcacaaagatgacagtgaattagacttttcagctctttgtcctaagattagcctcacggttgctgccaaagagttatctgtgtctgacacagacgtctcagaggtatcctggactgataatgggaccttcaacctttcagaaggatacactccacagacagacacttctgatgatcttgaccgacccagtgaggaagttttctctagagatctttcagattttccatctctagaaaatggcatgggaacaaatgatgaagatgaattaagccttggtttgcccactgagctcaagagaaagaaggaacagttggacagtggtcacagaccaagcaaagagacgcaatcagcagctggtctcacccttcctctgaacagtgaccaaacctttcacctgatgagcaacctggctggggatgttatcacagctgcagtgactgcagctatcaaagaccagttagagggtgtgcagcaagcactttctcaggctgcccccatcccagaagaggacacagacactgaagaaggtgatgactttgaactacttgaccagtcagagctggatcaaattgagagtgaattgggacttacacaagaccaggaagcagaagcacagcaaaataagaagtcttcaggtttcctttcaaatctgctgggaggccattaatctaggaatcagcttgcaacagagcacaaaaaacaccaaaaaaatttcaaacaagaaaaaaaaaaaaaaaaggaaaagaaaaaaattgaactgtaagctttaatgattactttagatttgttttattttccctcctgcagtgaattaattggatatatatcagctgacactgatagattgatatttctgatcgttatttttgtgtaataagcatggaaatgaactttatacacaccactgtgttgtcagagataaatattaggggttgtttttaaagcaaaaagaaaaaaacaaaaaccaaactattaaaatcctcctataaatattctttttctttacagtttttcaagcatgcaaaacagtttattgtaacttactgaaaaatattaacaattaattgtgaatacatgctgttaccagcttccttattcctaatacctggaaaatttttttttcaacggatagattttgatgtaaaaaagaccgaaattatcaaggtatcttagttgaaggacttgggaaatactatcaaaattaatttcttaggaaaaaatttaaaagtatatttaagtactctggatagactgaaacgtttccatgttatttctgcagttgtagacttaggcttatttgtaaagaagcatgctccattgactgccatctctagtcttgcagtgggtggtattaacccatagaaagcaagcagttgtgtatcacatagacaatggttatgatgtaaacagattcagttgttttgttgttcattcgtcatatgtttgtgatagggatgttgggagcacagctctattctgcctgctcagacttaagttagacccttatcttttatattatgtcatgaaaaaagtctcctaaaattgtgaaactagttcttgatgagtgatgtgatcatcagcaataaagatataataactctgttttcttagcctgtatagaggagaggaacttgcttggctttaaaatatatttatttgccatttaagtataaatatggaatctgtttcttattgggaagatagaatatatatattttcctttaaactttttaaggtcacttttaaataaccaaatttgatttatggtttttaacaaaggactaaagagctgaaaccaacctagttttgtttttgtgatataaactttaagtgtcgagggaccatgccagcaactaccaaaaatctcttaaatcttcaggtacagctggcattttggcagatgcatagagacatctgagaccctcagaaaggaaggataatccaagaatataggaaatctgtgttctcttcctttcattttatcccttatatttctaaagactaattataagtaatctgacattttaatgtagctactcttatttattttttctttctgaggtattaaaatatctggactgagttttgccaaatgttaaagggagaagagttactgaagactttgaacacttgctttttgtgattgcttatgtcattagtgcctcatgactgtgtttgatgtcctttattgatacaaagtgagcctgtgccttcattatcttgcccattttaatacaaatggaaacctggtgtttgaaaatctctgaactgtgtgggttttggaggaatatacctgaattttattcaataacagtttctggacaggaagaaaaatacagttacatatttataaaa

SEQ ID NO: 132019 - DNA, 1054 bp, Homo sapiens
  Payload ID: 5773
  Gene Symbol: FAM134B
  Gene Name: family with sequence similarity 134, member B
  ENST ID: ENST00000510362
  CDS Start-End: 1-653
gtgaattagacttttcagctctttgtcctaagattagcctcacggttgctgccaaagagttatctgtgtctgacacagacgtctcagaggtatcctggactgataatgggaccttcaacctttcagaaggatacactccacagacagacacttctgatgatcttgaccgacccagtgaggaagttttctctagagatctttcagattttccatctctagaaaatggcatgggaacaaatgatgaagatgaattaagccttggtttgcccactgagctcaagagaaagaaggaacagttggacagtggtcacagaccaagcaaagagacgcaatcagcagctggtctcacccttcctctgaacagtgaccaaacctttcacctgatgagcaacctggctggggatgttatcacagctgcagtgactgcagctatcaaagaccagttagagggtgtgcagcaagcactttctcaggctgcccccatcccagaagaggacacagacactgaagaaggtgatgactttgaactacttgaccagtcagagctggatcaaattgagagtgaattgggacttacacaagaccaggaagcagaagcacagcaaaataagaagtcttcaggtttcctttcaaatctgctgggaggccattaatctaggaatcagcttgcaacagagcacaaaaaacaccaaaaaaatttcaaacaagaaaaaaaaaaaaaaaaggaaaagaaaaaaattgaactgtattaaaatatctggactgagttttgccaaatgttaaagggagaagagttactgaagactttgaacacttgctttttgtgattgcttatgtcattagtgcctcatgactgtgtttgatgtcctttattgatacaaagtgagcctgtgccttcattatcttgcccattttaatacaaatggaaacctggtgtttgaaaatctctgaactgtgtgggttttggaggaatatacctgaattttattcaataacagtttctggacaggaagaaaaatacagttacatatttataaaatagtcgttatcagta

SEQ ID NO: 132020 - DNA, 3759 bp, Homo sapiens
  Payload ID: 5774
  Gene Symbol: FAM134C
  Gene Name: family with sequence similarity 134, member C
  Uniprot ID: Q86VR2
  ENST ID: ENST00000309428
  CDS Start-End: 61-1461
agttgctgttattgtgacttgtcgggccacggccccggatgttgtggctgccgcggggagatggctgaggccgaaggggttcccacgaccccaggcccggcttcggggtcgactttcaggggccgccgagatgtgtcaggctcctgggagcgggaccagcaggttgaggcggcgcagcgggccctggtggaggtgctggggccttacgagcctctgctgagtcgggtgcaggcagccctggtgtgggagcggccagctaggagcgctctgtggtgcctggggctgaacgcggctttctggttttttgccctgacatctcttcgtcttgtgtttttacttgcatttggcttgatgatcattgtgtgtattgatcaatggaagaacaaaatctggcctgaaataaaagtgccaagacccgacgcattagacaatgagagctggggctttgtgcaccctcggttgctcagcgtgcccgagctctgccaccatgtagctgaagtctgggttagtgggaccattttcataaggaatgttttgcttttcaaaaagcaaaacccaggcaagttctgcttgctgagctgtgggatactgacctttttggctgtcttgggccgctacgtccctgggcttctgctgtcctacttgatgcttgtcactgtcatgatgtggccccttgctgtgtaccaccgactgtgggatcgagcatatgtgcggctgaagccagctctgcagcggctagacttcagtgtccgtggctacatgatgtccaagcagagagagagacaattacgccgcagagctctccacccagaacgagccatggacaaccacagtgacagcgaagaggagcttgctgccttctgtcctcagctggacgattctactgttgccagggaattggccatcacagactctgagcactcagacgctgaagtctcctgtacagacaatggcacattcaatctttcaaggggccaaacacctctaacggaaggctctgaagacctagatggtcacagtgatccagaggaatcctttgccagagaccttccagacttcccttccattaatatggatcctgctggcctggatgatgaggacgacactagcattggcatgcccagcttgatgtaccgttctccgccaggggctgaggagccccaggccccacctgccagccgggacgaggctgcgctgccggagctcctgcttggtgctcttcctgtaggatccaacctcaccagcaaccttgccagcctggtctcccagggtatgattcagctggccttgtcaggggcctcccaaccaggcccttctggagcacctgcccagagagcaacgagaggcttcctccggtcccccagttcagacctggacactgatgctgagggggatgactttgaacttctggaccagtcggagctgagtcagctggaccctgccagttctaggagccactgaggcagagactccttttgggagtcactgtggtttaggtttttttctccccatcccacttaaggtgatggggcaagggaagaactcagctcccctcccctgaattatatttgtatgctgggtggcctggctgatgctcagaggcctccttagagaggacactcactcccctcccaccagctggatgcccatttctgagctcagtcactgaagtgagagtgtgctcccccaagggaggcttctctccatcaggatggtactttgggggaacaaaatagtcagggatattggttcccctttgaggaggtgctgctgtttgcttttaggtatgagtgctcaggggccctcactgaaagagcccatgcctgccttcctcctttcatcgcctctctagagcccccaaagtcaggcagcagctggagtagttacattgtcatcatctttttttttgagacagtttcgctctgttgcccaggctggagtgcagtggtgtgatcttggctttctgcaacgtctgccttccaggttgaagaggttctcctgcctcagcctccttagtagtgggattacaggtgcccgctactatgcccggctaatttttcttttggtatttttagtagaaatggggtttcaccatgttggccaggctggtctcaaactcctgacctcaagtgagctgactgccttggcctcccagagtgctgggattagtcgtcatcttttgttaaaccaggatttgatttttttcttttcttttcttttcttttttttttttttgagacagagtctctctctgttgcccaggctggagtgcagtggcacaatctcggctcactgcagcctccgcctgccgggtcaagcgattctcctacctcagcctcctcagtagctgagattacaggcatgcaccaccatgcccggctaatttttttgtgtttttagtagagatggggtttcaccgtgctggccaggctggtctagaactcctgactgcaaatgatcagcccgcctcagccacccaaagtgttgggattacaggtgtgagccactgtgcccagcgtgatttttttttttttttaaagcaaacttgtcctttggttttgcagaacaggcctgctccctctcatctagcccatcatttcttggggcctgaaccccagtggtccaaagtattgcttgtgaaatttaaaaaatgtgaatatgatgtggggatgggcctcttctacattaccttggcccagggggatcagctggctgggaggattagtgagcacctctgtattttgaggtctgagtcttctggagctgtgtagttaatcttcggtttctgataacccctgggtccatctggccatcagcctcagcagtgagcaaagcaataccatactcatttctatgttcctgttccttcctctgctcctcctttggagaagcaataattcatgggggatgatacagtagcactttacaaatggctccatgtcattcatcccaggggccataatctcttgcaccacctattcttacttcctgttcagctcctttacagcttttattttcaactgcttcccaacttggtggggcctcctttaaggatgagccaatagtaagaatgtggctgtaatcagcagagacccctctgaggggtatctgttctgcagcccctagtgaaatcatgtgatgtgagacagaaacctaaacatggtacttgattctaaacctgtgccagtctatagcctctgcctccccaagcagagctcaagccaaacgcttctgtcctctttccttctgcattaaccctttgctgatcctcaggggccactcccccaacacccctgtacttgggtgagggatgttggacagagcctgttttcatgtactgcaggtgggggtgtgctgacatgtttgctcttggttgatggagaaggtacagaggccagggagtgaaaatggttgacagaagagggaagagttaggtgtctcatagtcactcatagtggggtggtcaggggtaatggcatctccccactttaggcttctcaaacagacttttgacacctctcaagttcagagctctgatgtggaaagacaggaggtgtggggaaggagggggatttcgtgtgtttgcatgagtgtgcgcttcaggccttgggagttggcaagagggagggaaggaaggagagcaaaatcttcggaaggtgtttcttgtacctgagggatcctgccctgaatctccatagtctccactgtgaactgaggaggggaggggtgtgctggggaataaatcttgtatgagaacaa

SEQ ID NO: 132021 - DNA, 565 bp, Homo sapiens
  Payload ID: 5774
  Gene Symbol: FAM134C
  Gene Name: family with sequence similarity 134, member C
  ENST ID: ENST00000593251
  CDS Start-End: 52-441
tattgtgacttgtcgggccacggccccggatgttgtggctgccgcggggagatggctgaggccgaaggggttcccacgaccccaggcccggcttcggggtcgactttcaggggccgccgagatgtgtcaggctcctgggagcgggaccagcaggttgaggcggcgcagcgggccctggtggaggtgctggggccttacgagcctctgctgagtcgggtgcaggcagccctggtgtgggagcggccagctaggagcgctctgtggtgcctggggctgaacgcggctttctggttttttgccctgacatctcttcgtcttgtgtttttacttgcatttggcttgatgatcattgtgtgtattgatcaatggaagaacaaaatctggcctgaaataaaagtgccaagacccgacgcattagacaatgagagttctgcttgctgagctgtgggatactgacctttttggctgtcttgggccgctacgtccctgggcttctgctgtcctacttgatgcttgtcactgtcatgatgtggccccttgctgtgtaccaccgactgtgggatcg

SEQ ID NO: 132022 - DNA, 564 bp, Homo sapiens
  Payload ID: 5774
  Gene Symbol: FAM134C
  Gene Name: family with sequence similarity 134, member C
  ENST ID: ENST00000591547
  CDS Start-End: 205-564
gacctgggagaatccgctggcccagttgttgccagctcctcctccatgttccgacagagatgtaacctagaagtcaagcggtaaaacaagctttgcaactatgtggatggacaagatgtaattgaagatgaagtactttagagatggtatgggttttttgccctgacatctcttcgtcttgtgtttttacttgcatttggcttgatgatcattgtgtgtattgatcaatggaagaacaaaatctggcctgaaataaaagtgccaagacccgacgcattagacaatgagagctggggctttgtgcaccctcggttgctcagcgtgcccgagctctgccaccatgtagctgaagtctgggttagtgggaccattttcataaggaatgttttgcttttcaaaaagcaaaacccaggcaagttctgcttgctgagctgtgggatactgacctttttggctgtcttgggccgctacgtccctgggcttctgctgtcctacttgatgcttgtcactgtcatgatgtggccccttgctgtgtaccaccgactgtgggatcgagcatatgtg

SEQ ID NO: 132023 - DNA, 522 bp, Homo sapiens
  Payload ID: 5774
  Gene Symbol: FAM134C
  Gene Name: family with sequence similarity 134, member C
  ENST ID: ENST00000585726
  CDS Start-End: 61-312
agttgctgttattgtgacttgtcgggccacggccccggatgttgtggctgccgcggggagatggctgaggccgaaggggttcccacgaccccaggcccggcttcggggtcgactttcaggggccgccgagatgtgtcaggctcctgggagcgggaccagcaggttgaggcggcgcagcgggccctggtggaggtgctggggccttacgagcctctgctgagtcgggtgcaggcagccctggtgtgggagcggccagctaggagcgctctgtggtgcctggggctgaacgcggctttctgttctgcttgctgagctgtgggatactgacctttttggctgtcttgggccgctacgtccctgggcttctgctgtcctacttgatgcttgtcactgtcatgatgtggccccttgctgtgtaccaccgactgtgggatcgagcatatgtgcggctgaagccagctctgcagcggctagacttcagtgtccgtggctacatgatgtccaagcagagagagagacaat

SEQ ID NO: 132024 - DNA, 409 bp, Homo sapiens
  Payload ID: 5774
  Gene Symbol: FAM134C
  Gene Name: family with sequence similarity 134, member C
  ENST ID: ENST00000590541
  CDS Start-End: 1-246
atggctgaggccgaaggggttcccacgaccccaggcccggcttcggggtcgactttcaggggccgccgagatgtgtcaggctcctgggagcgggaccagcaggttgaggcggcgcagcgggccctggtggaggtgctggggccttacgagcctctgctgagtcgggtgcaggcagccctggtgtgggagcggccagctaggagcgctctgtggtgcctggggctgaacgcggctttctggtattaggagataggagtacaaaaaaaaacccatcagaattcagagatgtaacctagaagtcaagcggtaaaacaagctttgcaactatgtggatggacaagatgtaattgaagatgaagtactttagagatggtatgggttttttgccctgacatctcttcgtcttgtg

SEQ ID NO: 132025 - DNA, 1632 bp, Homo sapiens
  Payload ID: 5774
  Gene Symbol: FAM134C
  Gene Name: family with sequence similarity 134, member C
  ENST ID: ENST00000586870
  CDS Start-End: 63-464
gcagttgctgttattgtgacttgtcgggccacggccccggatgttgtggctgccgcggggagatggctgaggccgaaggggttcccacgaccccaggcccggcttcggggtcgactttcaggggccgccgagatgtgtcaggctcctgggagcgggaccagcaggttgaggcggcgcagcgggccctggtggaggtgctggggccttacgagcctctgctgagtcgggtgcaggcagccctggtgtgggagcggccagctaggagcgctctgtggtgcctggggctgaacgcggctttctggttttttgccctgacatctcttcgtcttgtgtttttacttgcatttggcttgatgatcattgtgtgtattgatcaatggaagaacaaaatctggcctgaaataaaagctggggctttgtgcaccctcggttgctcagcgtgcccgagctctgccaccatgtagctgaagtctgggttagtgggaccattttcataaggaatgttttgcttttcaaaaagcaaaacccaggcaagttctgcttgctgagctgtgggatactgacctttttggctgtcttgggccgctacgtccctgggcttctgctgtcctacttgatgcttgtcactgtcatgatgtggccccttgctgtgtaccaccgactgtgggatcgagcatatgtgcggctgaagccagctctgcagcggctagacttcagtgtccgtggctacatgatgtccaagcagagagagagacaattacgccgcagagctctccacccagaacgagccatggacaaccacagtgacagcgaagaggagcttgctgccttctgtcctcagctggacgattctactgttgccagggaattggccatcacagactctgagcactcagacgctgaagtctcctgtacagacaatggcacattcaatctttcaaggggccaaacacctctaacggaaggctctgaagacctagatggtcacagtgatccagaggaatcctttgccagagaccttccagacttcccttccattaatatggatcctgctggcctggatgatgaggacgacactagcattggcatgcccagcttgatgtaccgttctccgccaggggctgaggagccccaggccccacctgccagccgggacgaggctgcgctgccggagctcctgcttggtgctcttcctgtaggatccaacctcaccagcaaccttgccagcctggtctcccagggtatgattcagctggccttgtcaggggcctcccaaccaggcccttctggagcacctgcccagagagcaacgagaggcttcctccggtcccccagttcagacctggacactgatgctgagggggatgactttgaacttctggaccagtcggagctgagtcagctggaccctgccagttctaggagccactgaggcagagactccttttgggagtcactgtggtttaggtttttttctccccatcccacttaaggtgatggggcaagggaagaactcagctcccctcccctgaattatatttgtatgctgggtggcctggctgatgctcagaggcctccttagagaggacactcactcccctcccaccagctggatgcccatttctgagctca

SEQ ID NO: 132026 - DNA, 4149 bp, Homo sapiens
  Payload ID: 5774
  Gene Symbol: FAM134C
  Gene Name: family with sequence similarity 134, member C
  ENST ID: ENST00000589797
  CDS Start-End: 54-296
gttattgtgacttgtcgggccacggccccggatgttgtggctgccgcggggagatggctgaggccgaaggggttcccacgaccccaggcccggcttcggggtcgactttcaggggccgccgagatgtgtcaggctcctgggagcgggaccagcaggttgaggcggcgcagcgggccctggtggaggtgctggggccttacgagcctctgctgagtcgggtgcaggcagccctggtgtgggagcggccagctaggagcgctctgtggtgcctggggctgaacgcggctttctggtgagagaactggaccctcggaaaccctccgagtcccgaattcgttggttcctctagggctctacttctcgcctgccctgttttcttcgctgcactggctccttcctgtacttgcctaattttgcctcacctccttccactccatcccgcctgcaggcttcggcaccctagttcttcccagggccgtccacccatcttctctgccttacctgtgcccgcacccccgccccgcacatctggcgggagcttctggtaacatcttgagccgctcaagagtgagcgagggctcctcttttgagcccgacaaagctgcgtccctttaaagccatcacttcctttctcttgtctgctcaagtgcaagttctagattgtttccagaggttttagtagtttattgttggagtagaggcgtgaagtcttgcaaaggttttttgccctgacatctcttcgtcttgtgtttttacttgcatttggcttgatgatcattgtgtgtattgatcaatggaagaacaaaatctggcctgaaataaaagctggggctttgtgcaccctcggttgctcagcgtgcccgagctctgccaccatgtagctgaagtctgggttagtgggaccattttcataaggaatgttttgcttttcaaaaagcaaaacccaggcaagttctgcttgctgagctgtgggatactgacctttttggctgtcttgggccgctacgtccctgggcttctgctgtcctacttgatgcttgtcactgtcatgatgtggccccttgctgtgtaccaccgactgtgggatcgagcatatgtgcggctgaagccagctctgcagcggctagacttcagtgtccgtggctacatgatgtccaagcagagagagagacaattacgccgcagagctctccacccagaacgagccatggacaaccacagtgacagcgaagaggagcttgctgccttctgtcctcagctggacgattctactgttgccagggaattggccatcacagactctgagcactcagacgctgaagtctcctgtacagacaatggcacattcaatctttcaaggggccaaacacctctaacggaaggctctgaagacctagatggtcacagtgatccagaggaatcctttgccagagaccttccagacttcccttccattaatatggatcctgctggcctggatgatgaggacgacactagcattggcatgcccagcttgatgtaccgttctccgccaggggctgaggagccccaggccccacctgccagccgggacgaggctgcgctgccggagctcctgcttggtgctcttcctgtaggatccaacctcaccagcaaccttgccagcctggtctcccagggtatgattcagctggccttgtcaggggcctcccaaccaggcccttctggagcacctgcccagagagcaacgagaggcttcctccggtcccccagttcagacctggacactgatgctgagggggatgactttgaacttctggaccagtcggagctgagtcagctggaccctgccagttctaggagccactgaggcagagactccttttgggagtcactgtggtttaggtttttttctccccatcccacttaaggtgatggggcaagggaagaactcagctcccctcccctgaattatatttgtatgctgggtggcctggctgatgctcagaggcctccttagagaggacactcactcccctcccaccagctggatgcccatttctgagctcagtcactgaagtgagagtgtgctcccccaagggaggcttctctccatcaggatggtactttgggggaacaaaatagtcagggatattggttcccctttgaggaggtgctgctgtttgcttttaggtatgagtgctcaggggccctcactgaaagagcccatgcctgccttcctcctttcatcgcctctctagagcccccaaagtcaggcagcagctggagtagttacattgtcatcatctttttttttgagacagtttcgctctgttgcccaggctggagtgcagtggtgtgatcttggctttctgcaacgtctgccttccaggttgaagaggttctcctgcctcagcctccttagtagtgggattacaggtgcccgctactatgcccggctaatttttcttttggtatttttagtagaaatggggtttcaccatgttggccaggctggtctcaaactcctgacctcaagtgagctgactgccttggcctcccagagtgctgggattagtcgtcatcttttgttaaaccaggatttgatttttttcttttcttttcttttcttttttttttttttgagacagagtctctctctgttgcccaggctggagtgcagtggcacaatctcggctcactgcagcctccgcctgccgggtcaagcgattctcctacctcagcctcctcagtagctgagattacaggcatgcaccaccatgcccggctaatttttttgtgtttttagtagagatggggtttcaccgtgctggccaggctggtctagaactcctgactgcaaatgatcagcccgcctcagccacccaaagtgttgggattacaggtgtgagccactgtgcccagcgtgatttttttttttttttaaagcaaacttgtcctttggttttgcagaacaggcctgctccctctcatctagcccatcatttcttggggcctgaaccccagtggtccaaagtattgcttgtgaaatttaaaaaatgtgaatatgatgtggggatgggcctcttctacattaccttggcccagggggatcagctggctgggaggattagtgagcacctctgtattttgaggtctgagtcttctggagctgtgtagttaatcttcggtttctgataacccctgggtccatctggccatcagcctcagcagtgagcaaagcaataccatactcatttctatgttcctgttccttcctctgctcctcctttggagaagcaataattcatgggggatgatacagtagcactttacaaatggctccatgtcattcatcccaggggccataatctcttgcaccacctattcttacttcctgttcagctcctttacagcttttattttcaactgcttcccaacttggtggggcctcctttaaggatgagccaatagtaagaatgtggctgtaatcagcagagacccctctgaggggtatctgttctgcagcccctagtgaaatcatgtgatgtgagacagaaacctaaacatggtacttgattctaaacctgtgccagtctatagcctctgcctccccaagcagagctcaagccaaacgcttctgtcctctttccttctgcattaaccctttgctgatcctcaggggccactcccccaacacccctgtacttgggtgagggatgttggacagagcctgttttcatgtactgcaggtgggggtgtgctgacatgtttgctcttggttgatggagaaggtacagaggccagggagtgaaaatggttgacagaagagggaagagttaggtgtctcatagtcactcatagtggggtggtcaggggtaatggcatctccccactttaggcttctcaaacagacttttgacacctctcaagttcagagctctgatgtggaaagacaggaggtgtggggaaggagggggatttcgtgtgtttgcatgagtgtgcgcttcaggccttgggagttggcaagagggagggaaggaaggagagcaaaatcttcggaaggtgtttcttgtacctgagggatcctgccctgaatctccatagtctccactgtgaactgaggaggggaggggtgtgctggggaataaatcttgtatgagaacaatc

SEQ ID NO: 132027 - DNA, 559 bp, Homo sapiens
  Payload ID: 5774
  Gene Symbol: FAM134C
  Gene Name: family with sequence similarity 134, member C
  ENST ID: ENST00000588423
  CDS Start-End: 233-559
aataggaaacgacctgggagaatccgctggcccagttgttgccagctcctcctccatgttccgacaggcaccggcgttgcagccgctcccgcccgcaacggcgccgcacgccagcccgctcgccgcaagacgcaggcgccaaacaaccagctccacccacgaacttcctccgctccaatgagaatcgagttctggcaatgaatggcacgtctttaagcactggccttcgttcatgcagattgcgcgtgcgcggctccggatgcggctcggcgcctccggatccggctccgcgcctcagttttttgccctgacatctcttcgtcttgtgtttttacttgcatttggcttgatgatcattgtgtgtattgatcaatggaagaacaaaatctggcctgaaataaaagtgccaagacccgacgcattagacaatgagagctggggctttgtgcaccctcggttgctcagcgtgcccgagctctgccaccatgtagctgaagtctgggttagtgggaccattttcataaggaatgttttgcttttcaaaaagcaaaacccaggc

SEQ ID NO: 132028 - DNA, 1733 bp, Homo sapiens
  Payload ID: 5774
  Gene Symbol: FAM134C
  Gene Name: family with sequence similarity 134, member C
  ENST ID: ENST00000585894
  CDS Start-End: 140-1249
agttgtgggccctgccagggaataggaaacgacctgggagaatccgctggcccagttgttgccagctcctcctccatgttccgacaggttttttgccctgacatctcttcgtcttgtgtttttacttgcatttggcttgatgatcattgtgtgtattgatcaatggaagaacaaaatctggcctgaaataaaagtgccaagacccgacgcattagacaatgagagctggggctttgtgcaccctcggttgctcagcgtgcccgagctctgccaccatgtagctgaagtctgggttagtgggaccattttcataaggaatgttttgcttttcaaaaagcaaaacccaggcaagttctgcttgctgagctgtgggatactgacctttttggctgtcttgggccgctacgtccctgggcttctgctgtcctacttgatgcttgtcactgtcatgatgtggccccttgctgtgtaccaccgactgtgggatcgagcatatgtgcggctgaagccagctctgcagcggctagacttcagtgtccgtggctacatgatgtccaagcagagagagagacaattacgccgcagagctctccacccagaacgagccatggacaaccacagtgacagcgaagaggagcttgctgccttctgtcctcagctggacgattctactgttgccagggaattggccatcacagactctgagcactcagacgctgaagtctcctgtacagacaatggcacattcaatctttcaaggggccaaacacctctaacggaaggctctgaagacctagatggtcacagtgatccagaggaatcctttgccagagaccttccagacttcccttccattaatatggatcctgctggcctggatgatgaggacgacactagcattggcatgcccagcttgatgtaccgttctccgccaggggctgaggagccccaggccccacctgccagccgggacgaggctgcgctgccggagctcctgcttggtgctcttcctgtaggatccaacctcaccagcaaccttgccagcctggtctcccagggtatgattcagctggccttgtcaggggcctcccaaccaggcccttctggagcacctgcccagagagcaacgagaggcttcctccggtcccccagttcagacctggacactgatgctgagggggatgactttgaacttctggaccagtcggagctgagtcagctggaccctgccagttctaggagccactgaggcagagactccttttgggagtcactgtggtttaggtttttttctccccatcccacttaaggtgatggggcaagggaagaactcagctcccctcccctgaattatatttgtatgctgggtggcctggctgatgctcagaggcctccttagagaggacactcactcccctcccaccagctggatgcccatttctgagctcagtcactgaagtgagagtgtgctcccccaagggaggcttctctccatcaggatggtactttgggggaacaaaatagtcagggatattggttcccctttgaggaggtgctgctgtttgcttttaggtatgagtgctcaggggccctcactgaaagagcccatgcctgccttcctcctttcatcgcctctctagagcccccaaagtcaggcagcagctggagtagttacattgtcatcatctttttttttgagacagtttcgctctgttgcccaggctggagtgcag

SEQ ID NO: 132029 - DNA, 5198 bp, Homo sapiens
  Payload ID: 5775
  Gene Symbol: FAM135A
  Gene Name: family with sequence similarity 135, member A
  ENST ID: ENST00000194672
  CDS Start-End: 45-488
cagaggtgctgttatcagaatagtcttctgggtataaattaaaaatgactgaagttcaagcaatggtagaattctctgtggagctaaacaagttctacaatgtggatttgtttcagagaggtttttaccagattcgtgcttctatgaaaattccatcaagaattccccacagagtagaagctagtttgttgcatgcaacaggtatgactttagcctttccagcctcagttcatgattctctaatttgcagtaaaacatttcaaattttgtacaaaaatgaagaggttgttttaaatgatgttatgatcttcaaagtaaaaatgctattggatgaaagaaagattgaagaaacccttgaggaaatgaattttctattatccttggatctacacttcacagatggagattattcttcatgcatcattggttgcactacaccagccactaataagctttcctcgccctgtgaagacaacttggttaaatagaaatgcaccagcacaaaacaaagattccgtgattcctactcttgaaagtgtggtctttggtattaactacacaaaacagttatcaccagatggttgtagcttcatcattgcagactccttcctacatcatgcgtatcgttttcattatacactttgtgccactttgctgctagccttcaagggattgcacagctacttcattacagtaacagaagagattccttcttgtcagaaactagaactggccaaggccaacatgcagctcctatatgagcgtcttctcagaagaaaacagctacgaacacagaaagacaaccatctagaggaaatggatgtagaagctcgacttactgaactatgtgaagaagttaagaaaatagagaatcctgatgaactggcagaacttataaatatgaatcttgcgcaactttgctcacttttgatggctttatggggacagtttctggaagttataacgctacacgaagaactaagaatattattagcacaagagcaccatactttgagggtacgcagattttctgaggcattcttttgttttgagcatccaagagaagctgccattgcataccaggaacttcatgctcagagtcatctacagatgtgcaccgctatcaaaaatacttccttctgcagttctcttccacccttacctattgaatgtagtgaattagatggagatctcaattcattacctataatctttgaagataggtatttagattcagttactgaaggtaaacttgatatctcccaggacgatagtgaaattacacaaatggaacacaatctggcatccagaaggtcatcagacgattgccatgatcatcaaacaaccccatctttgggagttagaacaattgaaataaagcccagtaataaagatcctttcagtggagagaatataactgtcaaactaggaccttggacagagcttcgacaagaggaaatacttgtggataatttactacccaactttgagtccttagaatctaatggtaaatctaaatctatagaaataacatttgaaaaggaagctttgcaagaagcaaagtgtctttctattggagaatcattaactaaattacgaagtaatctacctgccccttctacaaaagaatatcatgttgtagtaagtggagatacaattaagttaccagatattagtgccacatatgcctcatctagattttcagattcaggtgttgaaagtgaaccgagttcttttgcgacacatccaaacactgatttagtctttgaaactgtgcaagggcaaggtccttgcaatagtgaaagattatttcctcagcttttgatgaaacctgattataatgtaaaattttcattaggaaatcattgtactgagagtacaagtgctataagtgaaatacagtcatctttgacatccataaactctctaccctccgatgatgaactgtcacctgatgaaaattctaagaaatctgttgtacctgaatgccatctaaatgatagcaaaactgtattaaatctaggaacgactgatttgccaaaatgtgatgatactaaaaagtcaagtatcactttgcaacagcagagtgttgtattttcagggaacttggacaatgaaactgtagcaatacattccttaaattcaagcattaaagaccctttacaatttgttttttcagatgaagagacttccagtgatgtgaaaagtagttgcagctccaaacctaacttggatactatgtgtaaaggcttccagagtcctgataaatctaataactctacagggacagcaattacattaaattcaaaactgatttgtttaggcactccttgtgtcatttcaggttccatttctagtaatacagatgttagtgaagatagaactatgaaaaaaaatagtgatgtattaaatctcacacagatgtattcagaaatccctacagttgaaagtgaaactcatctgggtacaagtgatcctttttcagccagtactgatatagtaaagcaagggcttgtggaaaattattttggttctcaaagcagtacggatatttctgacacatgtgctgttagctacagcaatgcacttagccctcagaaggaaacttctgaaaaagaaattagtaatcttcagcaggaacaggataaagaggatgaggaggaagagcaggatcaacaaatggttcaaaatgggtactatgaagaaacagattattcagctttggatggaacaataaatgctcactatacaagcagagatgaactaatggaagaaagacttacaaaatctgaaaaaataaacagtgactatctgagagatggtataaacatgcctactgtctgtacttctggttgtttgtccttcccgtctgcaccacgagagtctccttgtaatgttaaatattcttccaaaagtaaatttgatgccattacaaagcagccaagcagtacttcttacaacttcacttcttcgatttcctggtatgaaagttcaccaaaacctcaaatacaagccttccttcaggcaaaagaagaactgaagctactaaaacttcctgggttcatgtacagtgaagttcctctgctggcatcctcagtaccttattttagtgtagaagaagaggatggttctgaagatggagtacatctgattgtctgtgtgcacggtttagatggaaacagtgcagatctccgattagtaaaaacttacattgaacttggattgcctgggggaagaattgattttcttatgtctgagagaaatcagaatgatacttttgctgattttgatagcatgactgatcgtcttttggatgagataatacagtatattcagatatatagtctaacagtctcaaaaataagctttattggacattcgttgggcaatttaataattcgttcagtgcttacaaggccaaggtttaaatattacctcaacaaacttcatacctttctgtctctttctggacctcaccttggtacactctacaacagcagtgctcttgttaatacaggtctctggtttatgcagaaatggaaaaaatcaggttcgcttttgcagctgacatgtcgagatcactcagaccctcgccaaacttttttatataagcttagtaacaaagcagggcttcattatttcaaaaatgttgtgctagtgggatccctacaggatcgctatgttccttatcactctgcccgcattgaaatgtgtaaaacagctttaaaggacaaacagtcaggacagatctattcagaaatgatccacaacttgcttcgacccgttctgcaaagcaaggactgtaatttggttcgctataatgtcatcaatgcattgcccaatacagctgattcactcattgggagagctgcacatatagctgttcttgattcggaaatatttttagagaaattctttctggttgctgccctcaaatatttccaatagtataaaagcattgttagcgactggacaattacctcattcaacaatgtttcaaataatgtattatattaaaatgtagatgctgataagttctaagaaatatttatacctttttatatggaagataatttatatcatccatgtttagtgctttttaaacatcaactttactttctaggtaatgtggctgtgcaatatttttttaattttatctttttacttttctattactttttcatatattttgctacctaagtatttcagtgaaactttaagcccatacctgtgtctgattgtttattattggctttccacaattcttacatcagactacattatattagagaccattattgctagaatagcatgggatttaaaattttctaatactgggggtattatttagttaattataaatttttcttttcacattttactgtgttttaactggaaataaaattatggctgctacaatatattttttgaaatcaacttctgtagttctaaaatacaactttatcatacaatcaaaccaggtagttcatataaaacagtgtaatacaagttttctataaagtcattactgttgcttaaacatatttcatgcctattaaaatatattttctactggtgatttcaacattatttctcatactgacttttattactggaaatgttcctgtacatgttggcagcagataaagatttttgaatgtttgaatgccctctgccttgatttggttggaatttttgctaaattggtaatgttgcttgaactttatgactacattttcttttaacttttttcatggacttccttatatgtacataataattaaatgttgaaatttatgaaatacttttatgaatttagataatttttaaatattgttaaaatttattgaactaaaaagtaatgtaaataaaataattcatgttaaagatggaacaaaataattaactttacatgtttggtgatacagatgcaaatgtttttgatatatggagatgttgagtcttttgactttactaaaggtgctgaatagcattaaattcactattttccttttctgttttacttgtgaaaataaaaatgcactaaggttgggtagaagttctgtttgcactcactaattgtgacagacagaggtttttgtaagtatttattgtacaattgatgcatgtttatttttagcgttgttattgcctctggtgttaataaatgaacaaatggctatctggaggaacagcta

SEQ ID NO: 132030 - DNA, 5042 bp, Homo sapiens
  Payload ID: 5775
  Gene Symbol: FAM135A
  Gene Name: family with sequence similarity 135, member A
  Uniprot ID: Q9P2D6
  ENST ID: ENST00000361499
  CDS Start-End: 345-4304
ctgtgatggcgatgtgagggggcccggggcgggatggtgctgacccgggtcgggccgtcttcttgcagctggacaacgagctcctccgttcgacaggcgggggaagaggccgagccgggcgagagggttgaagatcaactggattatgtatttggttctggaatctcaaagcagtccacaaacaaattcttccttatgttgtctgtgtcagggggaacggtgtatttttaacaacgggaatcagtaactggaagtacaagattggttatttaataatgttaaaaatgaggctttgaaaagcagaggtgctgttatcagaatagtcttctgggtataaattaaaaatgactgaagttcaagcaatggtagaattctctgtggagctaaacaagttctacaatgtggatttgtttcagagaggtttttaccagattcgtgcttctatgaaaattccatcaagaattccccacagagtagaagctagtttgttgcatgcaacaggtatgactttagcctttccagcctcagttcatgattctctaatttgcagtaaaacatttcaaattttgtacaaaaatgaagaggttgttttaaatgatgttatgatcttcaaagtaaaaatgctattggatgaaagaaagattgaagaaacccttgaggaaatgaattttctattatccttggatctacacttcacagatggagattattcggcagatgatctgaatgccttgcaactaataagtagccgaacattgaagctgcactttagcccccatagaggccttcatcatcatgttaatgttatgtttgattacttccacctttctgttgtgtctgttacagttcatgcatcattggttgcactacaccagccactaataagctttcctcgccctgtgaagacaacttggttaaatagaaatgcaccagcacaaaacaaagattccgtgattcctactcttgaaagtgtggtctttggtattaactacacaaaacagttatcaccagatggttgtagcttcatcattgcagactccttcctacatcatgcgtatcgttttcattatacactttgtgccactttgctgctagccttcaagggattgcacagctacttcattacagtaacagaagagattccttcttgtcagaaactagaactggaggaaatggatgtagaagctcgacttactgaactatgtgaagaagttaagaaaatagagaatcctgatgaactggcagaacttataaatatgaatcttgcgcaactttgctcacttttgatggctttatggggacagtttctggaagttataacgctacacgaagaactaagaatattattagcacaagagcaccatactttgagggtacgcagattttctgaggcattcttttgttttgagcatccaagagaagctgccattgcataccaggaacttcatgctcagagtcatctacagatgtgcaccgctatcaaaaatacttccttctgcagttctcttccacccttacctattgaatgtagtgaattagatggagatctcaattcattacctataatctttgaagataggtatttagattcagttactgaaggtaaacttgatatctcccaggacgatagtgaaattacacaaatggaacacaatctggcatccagaaggtcatcagacgattgccatgatcatcaaacaaccccatctttgggagttagaacaattgaaataaagcccagtaataaagatcctttcagtggagagaatataactgtcaaactaggaccttggacagagcttcgacaagaggaaatacttgtggataatttactacccaactttgagtccttagaatctaatggtaaatctaaatctatagaaataacatttgaaaaggaagctttgcaagaagcaaagtgtctttctattggagaatcattaactaaattacgaagtaatctacctgccccttctacaaaagaatatcatgttgtagtaagtggagatacaattaagttaccagatattagtgccacatatgcctcatctagattttcagattcaggtgttgaaagtgaaccgagttcttttgcgacacatccaaacactgatttagtctttgaaactgtgcaagggcaaggtccttgcaatagtgaaagattatttcctcagcttttgatgaaacctgattataatgtaaaattttcattaggaaatcattgtactgagagtacaagtgctataagtgaaatacagtcatctttgacatccataaactctctaccctccgatgatgaactgtcacctgatgaaaattctaagaaatctgttgtacctgaatgccatctaaatgatagcaaaactgtattaaatctaggaacgactgatttgccaaaatgtgatgatactaaaaagtcaagtatcactttgcaacagcagagtgttgtattttcagggaacttggacaatgaaactgtagcaatacattccttaaattcaagcattaaagaccctttacaatttgttttttcagatgaagagacttccagtgatgtgaaaagtagttgcagctccaaacctaacttggatactatgtgtaaaggcttccagagtcctgataaatctaataactctacagggacagcaattacattaaattcaaaactgatttgtttaggcactccttgtgtcatttcaggttccatttctagtaatacagatgttagtgaagatagaactatgaaaaaaaatagtgatgtattaaatctcacacagatgtattcagaaatccctacagttgaaagtgaaactcatctgggtacaagtgatcctttttcagccagtactgatatagtaaagcaagggcttgtggaaaattattttggttctcaaagcagtacggatatttctgacacatgtgctgttagctacagcaatgcacttagccctcagaaggaaacttctgaaaaagaaattagtaatcttcagcaggaacaggataaagaggatgaggaggaagagcaggatcaacaaatggttcaaaatgggtactatgaagaaacagattattcagctttggatggaacaataaatgctcactatacaagcagagatgaactaatggaagaaagacttacaaaatctgaaaaaataaacagtgactatctgagagatggtataaacatgcctactgtctgtacttctggttgtttgtccttcccgtctgcaccacgagagtctccttgtaatgttaaatattcttccaaaagtaaatttgatgccattacaaagcagccaagcagtacttcttacaacttcacttcttcgatttcctggtatgaaagttcaccaaaacctcaaatacaagccttccttcaggcaaaagaagaactgaagctactaaaacttcctgggttcatgtacagtgaagttcctctgctggcatcctcagtaccttattttagtgtagaagaagaggatggttctgaagatggagtacatctgattgtctgtgtgcacggtttagatggaaacagtgcagatctccgattagtaaaaacttacattgaacttggattgcctgggggaagaattgattttcttatgtctgagagaaatcagaatgatacttttgctgattttgatagcatgactgatcgtcttttggatgagataatacagtatattcagatatatagtctaacagtctcaaaaataagctttattggacattcgttgggcaatttaataattcgttcagtgcttacaaggccaaggtttaaatattacctcaacaaacttcatacctttctgtctctttctggacctcaccttggtacactctacaacagcagtgctcttgttaatacaggtctctggtttatgcagaaatggaaaaaatcaggttcgcttttgcagctgacatgtcgagatcactcagaccctcgccaaacttttttatataagcttagtaacaaagcagggcttcattatttcaaaaatgttgtgctagtgggatccctacaggatcgctatgttccttatcactctgcccgcattgaaatgtgtaaaacagctttaaaggacaaacagtcaggacagatctattcagaaatgatccacaacttgcttcgacccgttctgcaaagcaaggactgtaatttggttcgctataatgtcatcaatgcattgcccaatacagctgattcactcattgggagagctgcacatatagctgttcttgattcggaaatatttttagagaaattctttctggttgctgccctcaaatatttccaatagtataaaagcattgttagcgactggacaattacctcattcaacaatgtttcaaataatgtattatattaaaatgtagatgctgataagttctaagaaatatttatacctttttatatggaagataatttatatcatccatgtttagtgctttttaaacatcaactttactttctaggtaatgtggctgtgcaatatttttttaattttatctttttacttttctattactttttcatatattttgctacctaagtatttcagtgaaactttaagcccatacctgtgtctgattgtttattattggctttccacaattcttacatcagactacattatattagagaccattattgctagaatagcatgggatttaaaattttctaatactgggggtattatttagttaattataaatttttcttttcacattttactgtgttttaactggaaataaaattatggctgctacaatatattttttgaaatcaacttctgtagttctaaaatacaactttatcatacaatcaaaccaggtagttcatataaaacagtgtaatacaagttttctataaagtcattactgttgcttaaacatatttcatgcctattaaaatatattttctactggtgatttcaacattatttctcatactgacttttattactggaaatgttcctgtacatgttggcagcagataaagatttttgaatgtttgaatgccctctgccttgatttgg

SEQ ID NO: 132031 - DNA, 5930 bp, Homo sapiens
  Payload ID: 5775
  Gene Symbol: FAM135A
  Gene Name: family with sequence similarity 135, member A
  Uniprot ID: Q9P2D6
  ENST ID: ENST00000370479
  CDS Start-End: 134-4681
ggggaacggtgtatttttaacaacgggaatcagtaactggaagtacaagattggttatttaataatgttaaaaatgaggctttgaaaagcagaggtgctgttatcagaatagtcttctgggtataaattaaaaatgactgaagttcaagcaatggtagaattctctgtggagctaaacaagttctacaatgtggatttgtttcagagaggtttttaccagattcgtgcttctatgaaaattccatcaagaattccccacagagtagaagctagtttgttgcatgcaacaggtatgactttagcctttccagcctcagttcatgattctctaatttgcagtaaaacatttcaaattttgtacaaaaatgaagaggttgttttaaatgatgttatgatcttcaaagtaaaaatgctattggatgaaagaaagattgaagaaacccttgaggaaatgaattttctattatccttggatctacacttcacagatggagattattcggcagatgatctgaatgccttgcaactaataagtagccgaacattgaagctgcactttagcccccatagaggccttcatcatcatgttaatgttatgtttgattacttccacctttctgttgtgtctgttacagttcatgcatcattggttgcactacaccagccactaataagctttcctcgccctgtgaagacaacttggttaaatagaaatgcaccagcacaaaacaaagattccgtgattcctactcttgaaagtgtggtctttggtattaactacacaaaacagttatcaccagatggttgtagcttcatcattgcagactccttcctacatcatgcgtatcgttttcattatacactttgtgccactttgctgctagccttcaagggattgcacagctacttcattacagtaacagaagagattccttcttgtcagaaactagaactggaggaaatggatgtagaagctcgacttactgaactatgtgaagaagttaagaaaatagagaatcctgatgaactggcagaacttataaatatgaatcttgcgcaactttgctcacttttgatggctttatggggacagtttctggaagttataacgctacacgaagaactaagaatattattagcacaagagcaccatactttgagggtacgcagattttctgaggcattcttttgttttgagcatccaagagaagctgccattgcataccaggaacttcatgctcagagtcatctacagatgtgcaccgctatcaaaaatacttccttctgcagttctcttccacccttacctattgaatgtagtgaattagatggagatctcaattcattacctataatctttgaagataggtatttagattcagttactgaagacttagatgcaccctggatgggaattcagaatcttcagagatcagagtccagtaaaatggataaatatgagactgaagaaagctctgtagcaggactttctagcccagagttgaaagtcagacctgctggtgcctccagtatttggtatacagaaggtgaaaagcagctaacaaaatctctaaaaggaaagaatgaagaatcaaataaatccaaagttaaggttactaagcttatgaaaacaatgaaatctgaaaacacaaaaaaattaataaaacagaactctaaggattctgtggttttggtaggctacaaatgtttgaaaagtacagcatcaaatgatctcattaaatgctttgaaggcaatccttcacatagtcagaaggaaggtctggatcccacaatatgtggatataattttgacccaaagacctacatgagacagacaagtcaaaaggaagctagctgtttgccaactaatacagagagaactgaacaaaagtctccagatattgaaaatgttcaaccagaccagtttgatcctttgaactctggcaacctaaatctttgtgcaaatttgtccatttcaggtaaacttgatatctcccaggacgatagtgaaattacacaaatggaacacaatctggcatccagaaggtcatcagacgattgccatgatcatcaaacaaccccatctttgggagttagaacaattgaaataaagcccagtaataaagatcctttcagtggagagaatataactgtcaaactaggaccttggacagagcttcgacaagaggaaatacttgtggataatttactacccaactttgagtccttagaatctaatggtaaatctaaatctatagaaataacatttgaaaaggaagctttgcaagaagcaaagtgtctttctattggagaatcattaactaaattacgaagtaatctacctgccccttctacaaaagaatatcatgttgtagtaagtggagatacaattaagttaccagatattagtgccacatatgcctcatctagattttcagattcaggtgttgaaagtgaaccgagttcttttgcgacacatccaaacactgatttagtctttgaaactgtgcaagggcaaggtccttgcaatagtgaaagattatttcctcagcttttgatgaaacctgattataatgtaaaattttcattaggaaatcattgtactgagagtacaagtgctataagtgaaatacagtcatctttgacatccataaactctctaccctccgatgatgaactgtcacctgatgaaaattctaagaaatctgttgtacctgaatgccatctaaatgatagcaaaactgtattaaatctaggaacgactgatttgccaaaatgtgatgatactaaaaagtcaagtatcactttgcaacagcagagtgttgtattttcagggaacttggacaatgaaactgtagcaatacattccttaaattcaagcattaaagaccctttacaatttgttttttcagatgaagagacttccagtgatgtgaaaagtagttgcagctccaaacctaacttggatactatgtgtaaaggcttccagagtcctgataaatctaataactctacagggacagcaattacattaaattcaaaactgatttgtttaggcactccttgtgtcatttcaggttccatttctagtaatacagatgttagtgaagatagaactatgaaaaaaaatagtgatgtattaaatctcacacagatgtattcagaaatccctacagttgaaagtgaaactcatctgggtacaagtgatcctttttcagccagtactgatatagtaaagcaagggcttgtggaaaattattttggttctcaaagcagtacggatatttctgacacatgtgctgttagctacagcaatgcacttagccctcagaaggaaacttctgaaaaagaaattagtaatcttcagcaggaacaggataaagaggatgaggaggaagagcaggatcaacaaatggttcaaaatgggtactatgaagaaacagattattcagctttggatggaacaataaatgctcactatacaagcagagatgaactaatggaagaaagacttacaaaatctgaaaaaataaacagtgactatctgagagatggtataaacatgcctactgtctgtacttctggttgtttgtccttcccgtctgcaccacgagagtctccttgtaatgttaaatattcttccaaaagtaaatttgatgccattacaaagcagccaagcagtacttcttacaacttcacttcttcgatttcctggtatgaaagttcaccaaaacctcaaatacaagccttccttcaggcaaaagaagaactgaagctactaaaacttcctgggttcatgtacagtgaagttcctctgctggcatcctcagtaccttattttagtgtagaagaagaggatggttctgaagatggagtacatctgattgtctgtgtgcacggtttagatggaaacagtgcagatctccgattagtaaaaacttacattgaacttggattgcctgggggaagaattgattttcttatgtctgagagaaatcagaatgatacttttgctgattttgatagcatgactgatcgtcttttggatgagataatacagtatattcagatatatagtctaacagtctcaaaaataagctttattggacattcgttgggcaatttaataattcgttcagtgcttacaaggccaaggtttaaatattacctcaacaaacttcatacctttctgtctctttctggacctcaccttggtacactctacaacagcagtgctcttgttaatacaggtctctggtttatgcagaaatggaaaaaatcaggttcgcttttgcagctgacatgtcgagatcactcagaccctcgccaaacttttttatataagcttagtaacaaagcagggcttcattatttcaaaaatgttgtgctagtgggatccctacaggatcgctatgttccttatcactctgcccgcattgaaatgtgtaaaacagctttaaaggacaaacagtcaggacagatctattcagaaatgatccacaacttgcttcgacccgttctgcaaagcaaggactgtaatttggttcgctataatgtcatcaatgcattgcccaatacagctgattcactcattgggagagctgcacatatagctgttcttgattcggaaatatttttagagaaattctttctggttgctgccctcaaatatttccaatagtataaaagcattgttagcgactggacaattacctcattcaacaatgtttcaaataatgtattatattaaaatgtagatgctgataagttctaagaaatatttatacctttttatatggaagataatttatatcatccatgtttagtgctttttaaacatcaactttactttctaggtaatgtggctgtgcaatatttttttaattttatctttttacttttctattactttttcatatattttgctacctaagtatttcagtgaaactttaagcccatacctgtgtctgattgtttattattggctttccacaattcttacatcagactacattatattagagaccattattgctagaatagcatgggatttaaaattttctaatactgggggtattatttagttaattataaatttttcttttcacattttactgtgttttaactggaaataaaattatggctgctacaatatattttttgaaatcaacttctgtagttctaaaatacaactttatcatacaatcaaaccaggtagttcatataaaacagtgtaatacaagttttctataaagtcattactgttgcttaaacatatttcatgcctattaaaatatattttctactggtgatttcaacattatttctcatactgacttttattactggaaatgttcctgtacatgttggcagcagataaagatttttgaatgtttgaatgccctctgccttgatttggttggaatttttgctaaattggtaatgttgcttgaactttatgactacattttcttttaacttttttcatggacttccttatatgtacataataattaaatgttgaaatttatgaaatacttttatgaatttagataatttttaaatattgttaaaatttattgaactaaaaagtaatgtaaataaaataattcatgttaaagatggaacaaaataattaactttacatgtttggtgatacagatgcaaatgtttttgatatatggagatgttgagtcttttgactttactaaaggtgctgaatagcattaaattcactattttccttttctgttttacttgtgaaaataaaaatgcactaaggttgggtagaagttctgtttgcactcactaattgtgacagacagaggtttttgtaagtatttattgtacaattgatgcatgtttatttttagcgttgttattgcctctggtgttaataaatgaacaaatggctatctggaggaacagct

SEQ ID NO: 132032 - DNA, 5282 bp, Homo sapiens
  Payload ID: 5775
  Gene Symbol: FAM135A
  Gene Name: family with sequence similarity 135, member A
  Uniprot ID: Q9P2D6
  ENST ID: ENST00000457062
  CDS Start-End: 271-4179
tgtttgcggttgctgtgatggcgatgtgagggggcccggggcgggatggtgctgacccgggtcgggccgtcttcttgcagctggacaacgagctcctccgttcgacaggcgggggaagaggccgagccgggcgagagggggaacggtgtatttttaacaacgggaatcagtaactggaagtacaagattggttatttaataatgttaaaaatgaggctttgaaaagcagaggtgctgttatcagaatagtcttctgggtataaattaaaaatgactgaagttcaagcaatggtagaattctctgtggagctaaacaagttctacaatgtggatttgtttcagagaggtaaaacatttcaaattttgtacaaaaatgaagaggttgttttaaatgatgttatgatcttcaaagtaaaaatgctattggatgaaagaaagattgaagaaacccttgaggaaatgaattttctattatccttggatctacacttcacagatggagattattcggcagatgatctgaatgccttgcaactaataagtagccgaacattgaagctgcactttagcccccatagaggccttcatcatcatgttaatgttatgtttgattacttccacctttctgttgtgtctgttacagttcatgcatcattggttgcactacaccagccactaataagctttcctcgccctgtgaagacaacttggttaaatagaaatgcaccagcacaaaacaaagattccgtgattcctactcttgaaagtgtggtctttggtattaactacacaaaacagttatcaccagatggttgtagcttcatcattgcagactccttcctacatcatgcgtatcgttttcattatacactttgtgccactttgctgctagccttcaagggattgcacagctacttcattacagtaacagaagagattccttcttgtcagaaactagaactggccaaggccaacatgcagctcctatatgagcgtcttctcagaagaaaacagctacgaacacagaaagacaaccatctagaggaaatggatgtagaagctcgacttactgaactatgtgaagaagttaagaaaatagagaatcctgatgaactggcagaacttataaatatgaatcttgcgcaactttgctcacttttgatggctttatggggacagtttctggaagttataacgctacacgaagaactaagaatattattagcacaagagcaccatactttgagggtacgcagattttctgaggcattcttttgttttgagcatccaagagaagctgccattgcataccaggaacttcatgctcagagtcatctacagatgtgcaccgctatcaaaaatacttccttctgcagttctcttccacccttacctattgaatgtagtgaattagatggagatctcaattcattacctataatctttgaagataggtatttagattcagttactgaaggtaaacttgatatctcccaggacgatagtgaaattacacaaatggaacacaatctggcatccagaaggtcatcagacgattgccatgatcatcaaacaaccccatctttgggagttagaacaattgaaataaagcccagtaataaagatcctttcagtggagagaatataactgtcaaactaggaccttggacagagcttcgacaagaggaaatacttgtggataatttactacccaactttgagtccttagaatctaatggtaaatctaaatctatagaaataacatttgaaaaggaagctttgcaagaagcaaagtgtctttctattggagaatcattaactaaattacgaagtaatctacctgccccttctacaaaagaatatcatgttgtagtaagtggagatacaattaagttaccagatattagtgccacatatgcctcatctagattttcagattcaggtgttgaaagtgaaccgagttcttttgcgacacatccaaacactgatttagtctttgaaactgtgcaagggcaaggtccttgcaatagtgaaagattatttcctcagcttttgatgaaacctgattataatgtaaaattttcattaggaaatcattgtactgagagtacaagtgctataagtgaaatacagtcatctttgacatccataaactctctaccctccgatgatgaactgtcacctgatgaaaattctaagaaatctgttgtacctgaatgccatctaaatgatagcaaaactgtattaaatctaggaacgactgatttgccaaaatgtgatgatactaaaaagtcaagtatcactttgcaacagcagagtgttgtattttcagggaacttggacaatgaaactgtagcaatacattccttaaattcaagcattaaagaccctttacaatttgttttttcagatgaagagacttccagtgatgtgaaaagtagttgcagctccaaacctaacttggatactatgtgtaaaggcttccagagtcctgataaatctaataactctacagggacagcaattacattaaattcaaaactgatttgtttaggcactccttgtgtcatttcaggttccatttctagtaatacagatgttagtgaagatagaactatgaaaaaaaatagtgatgtattaaatctcacacagatgtattcagaaatccctacagttgaaagtgaaactcatctgggtacaagtgatcctttttcagccagtactgatatagtaaagcaagggcttgtggaaaattattttggttctcaaagcagtacggatatttctgacacatgtgctgttagctacagcaatgcacttagccctcagaaggaaacttctgaaaaagaaattagtaatcttcagcaggaacaggataaagaggatgaggaggaagagcaggatcaacaaatggttcaaaatgggtactatgaagaaacagattattcagctttggatggaacaataaatgctcactatacaagcagagatgaactaatggaagaaagacttacaaaatctgaaaaaataaacagtgactatctgagagatggtataaacatgcctactgtctgtacttctggttgtttgtccttcccgtctgcaccacgagagtctccttgtaatgttaaatattcttccaaaagtaaatttgatgccattacaaagcagccaagcagtacttcttacaacttcacttcttcgatttcctggtatgaaagttcaccaaaacctcaaatacaagccttccttcaggcaaaagaagaactgaagctactaaaacttcctgggttcatgtacagtgaagttcctctgctggcatcctcagtaccttattttagtgtagaagaagaggatggttctgaagatggagtacatctgattgtctgtgtgcacggtttagatggaaacagtgcagatctccgattagtaaaaacttacattgaacttggattgcctgggggaagaattgattttcttatgtctgagagaaatcagaatgatacttttgctgattttgatagcatgactgatcgtcttttggatgagataatacagtatattcagatatatagtctaacagtctcaaaaataagctttattggacattcgttgggcaatttaataattcgttcagtgcttacaaggccaaggtttaaatattacctcaacaaacttcatacctttctgtctctttctggacctcaccttggtacactctacaacagcagtgctcttgttaatacaggtctctggtttatgcagaaatggaaaaaatcaggttcgcttttgcagctgacatgtcgagatcactcagaccctcgccaaacttttttatataagcttagtaacaaagcagggcttcattatttcaaaaatgttgtgctagtgggatccctacaggatcgctatgttccttatcactctgcccgcattgaaatgtgtaaaacagctttaaaggacaaacagtcaggacagatctattcagaaatgatccacaacttgcttcgacccgttctgcaaagcaaggactgtaatttggttcgctataatgtcatcaatgcattgcccaatacagctgattcactcattgggagagctgcacatatagctgttcttgattcggaaatatttttagagaaattctttctggttgctgccctcaaatatttccaatagtataaaagcattgttagcgactggacaattacctcattcaacaatgtttcaaataatgtattatattaaaatgtagatgctgataagttctaagaaatatttatacctttttatatggaagataatttatatcatccatgtttagtgctttttaaacatcaactttactttctaggtaatgtggctgtgcaatatttttttaattttatctttttacttttctattactttttcatatattttgctacctaagtatttcagtgaaactttaagcccatacctgtgtctgattgtttattattggctttccacaattcttacatcagactacattatattagagaccattattgctagaatagcatgggatttaaaattttctaatactgggggtattatttagttaattataaatttttcttttcacattttactgtgttttaactggaaataaaattatggctgctacaatatattttttgaaatcaacttctgtagttctaaaatacaactttatcatacaatcaaaccaggtagttcatataaaacagtgtaatacaagttttctataaagtcattactgttgcttaaacatatttcatgcctattaaaatatattttctactggtgatttcaacattatttctcatactgacttttattactggaaatgttcctgtacatgttggcagcagataaagatttttgaatgtttgaatgccctctgccttgatttggttggaatttttgctaaattggtaatgttgcttgaactttatgactacattttcttttaacttttttcatggacttccttatatgtacataataattaaatgttgaaatttatgaaatacttttatgaatttagataatttttaaatattgttaaaatttattgaactaaaaagtaatgtaaataaaataattcatgttaaagatggaacaaaataattaactttacatgtttggtgatacagatgcaaatgtttttgatatatggagatgttgagtcttttgactttactaaaggtgctgaatagcattaaattcactattttccttttctgttttacttgtgaaaataaaaatgcactaaggtt

SEQ ID NO: 132033 - DNA, 6415 bp, Homo sapiens
  Payload ID: 5775
  Gene Symbol: FAM135A
  Gene Name: family with sequence similarity 135, member A
  Uniprot ID: Q9P2D6
  ENST ID: ENST00000418814
  CDS Start-End: 615-5162
gctggaggggcagttgaagctcctgaagggcggggcacggagcttgaaggggcggggcctagcctcagagaggggagggaagaggcgggaggaggaggtgagagaggccgggggcggggccgtgcggccggggacctgttgatcgcaggtatagccggctggcccgggctccctcgggactggggcgactgcgcatgctcgctggccgcgctgggccagtagccgagccgcggtgacgaaccggctccgcggttgcggtgtttgcggttgctgtgatggcgatgtgagggggcccggggcgggatggtgctgacccgggtcgggccgtcttcttgcagctggacaacgagctcctccgttcgacaggcgggggaagaggccgagccgggcgagagggttgaagatcaactggattatgtatttggttctggaatctcaaagcagtccacaaacaaattcttccttatgttgtctgtgtcagggggaacggtgtatttttaacaacgggaatcagtaactggaagtacaagattggttatttaataatgttaaaaatgaggctttgaaaagcagaggtgctgttatcagaatagtcttctgggtataaattaaaaatgactgaagttcaagcaatggtagaattctctgtggagctaaacaagttctacaatgtggatttgtttcagagaggtttttaccagattcgtgcttctatgaaaattccatcaagaattccccacagagtagaagctagtttgttgcatgcaacaggtatgactttagcctttccagcctcagttcatgattctctaatttgcagtaaaacatttcaaattttgtacaaaaatgaagaggttgttttaaatgatgttatgatcttcaaagtaaaaatgctattggatgaaagaaagattgaagaaacccttgaggaaatgaattttctattatccttggatctacacttcacagatggagattattcggcagatgatctgaatgccttgcaactaataagtagccgaacattgaagctgcactttagcccccatagaggccttcatcatcatgttaatgttatgtttgattacttccacctttctgttgtgtctgttacagttcatgcatcattggttgcactacaccagccactaataagctttcctcgccctgtgaagacaacttggttaaatagaaatgcaccagcacaaaacaaagattccgtgattcctactcttgaaagtgtggtctttggtattaactacacaaaacagttatcaccagatggttgtagcttcatcattgcagactccttcctacatcatgcgtatcgttttcattatacactttgtgccactttgctgctagccttcaagggattgcacagctacttcattacagtaacagaagagattccttcttgtcagaaactagaactggaggaaatggatgtagaagctcgacttactgaactatgtgaagaagttaagaaaatagagaatcctgatgaactggcagaacttataaatatgaatcttgcgcaactttgctcacttttgatggctttatggggacagtttctggaagttataacgctacacgaagaactaagaatattattagcacaagagcaccatactttgagggtacgcagattttctgaggcattcttttgttttgagcatccaagagaagctgccattgcataccaggaacttcatgctcagagtcatctacagatgtgcaccgctatcaaaaatacttccttctgcagttctcttccacccttacctattgaatgtagtgaattagatggagatctcaattcattacctataatctttgaagataggtatttagattcagttactgaagacttagatgcaccctggatgggaattcagaatcttcagagatcagagtccagtaaaatggataaatatgagactgaagaaagctctgtagcaggactttctagcccagagttgaaagtcagacctgctggtgcctccagtatttggtatacagaaggtgaaaagcagctaacaaaatctctaaaaggaaagaatgaagaatcaaataaatccaaagttaaggttactaagcttatgaaaacaatgaaatctgaaaacacaaaaaaattaataaaacagaactctaaggattctgtggttttggtaggctacaaatgtttgaaaagtacagcatcaaatgatctcattaaatgctttgaaggcaatccttcacatagtcagaaggaaggtctggatcccacaatatgtggatataattttgacccaaagacctacatgagacagacaagtcaaaaggaagctagctgtttgccaactaatacagagagaactgaacaaaagtctccagatattgaaaatgttcaaccagaccagtttgatcctttgaactctggcaacctaaatctttgtgcaaatttgtccatttcaggtaaacttgatatctcccaggacgatagtgaaattacacaaatggaacacaatctggcatccagaaggtcatcagacgattgccatgatcatcaaacaaccccatctttgggagttagaacaattgaaataaagcccagtaataaagatcctttcagtggagagaatataactgtcaaactaggaccttggacagagcttcgacaagaggaaatacttgtggataatttactacccaactttgagtccttagaatctaatggtaaatctaaatctatagaaataacatttgaaaaggaagctttgcaagaagcaaagtgtctttctattggagaatcattaactaaattacgaagtaatctacctgccccttctacaaaagaatatcatgttgtagtaagtggagatacaattaagttaccagatattagtgccacatatgcctcatctagattttcagattcaggtgttgaaagtgaaccgagttcttttgcgacacatccaaacactgatttagtctttgaaactgtgcaagggcaaggtccttgcaatagtgaaagattatttcctcagcttttgatgaaacctgattataatgtaaaattttcattaggaaatcattgtactgagagtacaagtgctataagtgaaatacagtcatctttgacatccataaactctctaccctccgatgatgaactgtcacctgatgaaaattctaagaaatctgttgtacctgaatgccatctaaatgatagcaaaactgtattaaatctaggaacgactgatttgccaaaatgtgatgatactaaaaagtcaagtatcactttgcaacagcagagtgttgtattttcagggaacttggacaatgaaactgtagcaatacattccttaaattcaagcattaaagaccctttacaatttgttttttcagatgaagagacttccagtgatgtgaaaagtagttgcagctccaaacctaacttggatactatgtgtaaaggcttccagagtcctgataaatctaataactctacagggacagcaattacattaaattcaaaactgatttgtttaggcactccttgtgtcatttcaggttccatttctagtaatacagatgttagtgaagatagaactatgaaaaaaaatagtgatgtattaaatctcacacagatgtattcagaaatccctacagttgaaagtgaaactcatctgggtacaagtgatcctttttcagccagtactgatatagtaaagcaagggcttgtggaaaattattttggttctcaaagcagtacggatatttctgacacatgtgctgttagctacagcaatgcacttagccctcagaaggaaacttctgaaaaagaaattagtaatcttcagcaggaacaggataaagaggatgaggaggaagagcaggatcaacaaatggttcaaaatgggtactatgaagaaacagattattcagctttggatggaacaataaatgctcactatacaagcagagatgaactaatggaagaaagacttacaaaatctgaaaaaataaacagtgactatctgagagatggtataaacatgcctactgtctgtacttctggttgtttgtccttcccgtctgcaccacgagagtctccttgtaatgttaaatattcttccaaaagtaaatttgatgccattacaaagcagccaagcagtacttcttacaacttcacttcttcgatttcctggtatgaaagttcaccaaaacctcaaatacaagccttccttcaggcaaaagaagaactgaagctactaaaacttcctgggttcatgtacagtgaagttcctctgctggcatcctcagtaccttattttagtgtagaagaagaggatggttctgaagatggagtacatctgattgtctgtgtgcacggtttagatggaaacagtgcagatctccgattagtaaaaacttacattgaacttggattgcctgggggaagaattgattttcttatgtctgagagaaatcagaatgatacttttgctgattttgatagcatgactgatcgtcttttggatgagataatacagtatattcagatatatagtctaacagtctcaaaaataagctttattggacattcgttgggcaatttaataattcgttcagtgcttacaaggccaaggtttaaatattacctcaacaaacttcatacctttctgtctctttctggacctcaccttggtacactctacaacagcagtgctcttgttaatacaggtctctggtttatgcagaaatggaaaaaatcaggttcgcttttgcagctgacatgtcgagatcactcagaccctcgccaaacttttttatataagcttagtaacaaagcagggcttcattatttcaaaaatgttgtgctagtgggatccctacaggatcgctatgttccttatcactctgcccgcattgaaatgtgtaaaacagctttaaaggacaaacagtcaggacagatctattcagaaatgatccacaacttgcttcgacccgttctgcaaagcaaggactgtaatttggttcgctataatgtcatcaatgcattgcccaatacagctgattcactcattgggagagctgcacatatagctgttcttgattcggaaatatttttagagaaattctttctggttgctgccctcaaatatttccaatagtataaaagcattgttagcgactggacaattacctcattcaacaatgtttcaaataatgtattatattaaaatgtagatgctgataagttctaagaaatatttatacctttttatatggaagataatttatatcatccatgtttagtgctttttaaacatcaactttactttctaggtaatgtggctgtgcaatatttttttaattttatctttttacttttctattactttttcatatattttgctacctaagtatttcagtgaaactttaagcccatacctgtgtctgattgtttattattggctttccacaattcttacatcagactacattatattagagaccattattgctagaatagcatgggatttaaaattttctaatactgggggtattatttagttaattataaatttttcttttcacattttactgtgttttaactggaaataaaattatggctgctacaatatattttttgaaatcaacttctgtagttctaaaatacaactttatcatacaatcaaaccaggtagttcatataaaacagtgtaatacaagttttctataaagtcattactgttgcttaaacatatttcatgcctattaaaatatattttctactggtgatttcaacattatttctcatactgacttttattactggaaatgttcctgtacatgttggcagcagataaagatttttgaatgtttgaatgccctctgccttgatttggttggaatttttgctaaattggtaatgttgcttgaactttatgactacattttcttttaacttttttcatggacttccttatatgtacataataattaaatgttgaaatttatgaaatacttttatgaatttagataatttttaaatattgttaaaatttattgaactaaaaagtaatgtaaataaaataattcatgttaaagatggaacaaaataattaactttacatgtttggtgatacagatgcaaatgtttttgatatatggagatgttgagtcttttgactttactaaaggtgctgaatagcattaaattcactattttccttttctgttttacttgtgaaaataaaaatgcactaaggttgggtagaagttctgtttgcactcactaattgtgacagacagaggtttttgtaagtatttattgtacaattgatgcatgtttatttttagcgttgttattgcctctggtgttaataaatgaacaaatggctatctggaggaacagctacaa

SEQ ID NO: 132034 - DNA, 546 bp, Homo sapiens
  Payload ID: 5775
  Gene Symbol: FAM135A
  Gene Name: family with sequence similarity 135, member A
  ENST ID: ENST00000515280
  CDS Start-End: 454-546
gcgctgggccagtagccgagccgcggtgacgaaccggctccgcggttgcggtgtttgcggttgctgtgatggcgatgtgagggggcccggggcgggatggtgctgacccgggtcgggccgtcttcttgcagctggacaacgagctcctccgttcgacaggcgggggaagaggccgagccgggcgagagggttgaagatcaactggattatgtatttggttctggaatctcaaagcagtccacaaacaaattcttccttatgttgtctgtgtcagattcgagtatttgccaaatttctatgaagaactgcttcaagaattgggaagggtctgagattttaccccacttgcaagctgacaagttagtctgccacggtgccatggatgttggcaggacatgagagtcatggatcaaggtgctgttatcagaatagtcttctgggtataaattaaaaatgactgaagttcaagcaatggtagaattctctgtggagctaaacaagttctacaatgtggatttgtttcagagaggtttttaccagattcgt

SEQ ID NO: 132035 - DNA, 1926 bp, Homo sapiens
  Payload ID: 5775
  Gene Symbol: FAM135A
  Gene Name: family with sequence similarity 135, member A
  ENST ID: ENST00000515323
  CDS Start-End: 412-1926
ggccgtgcggccggggacctgttgatcgcaggtatagccggctggcccgggctccctcgggactggggcgactgcgcatgctcgctggccgcgctgggccagtagccgagccgcggtgacgaaccggctccgcggttgcggtgtttgcggttgctgtgatggcgatgtgagggggcccggggcgggatggtgctgacccgggtcgggccgtcttcttgcagctggacaacgagctcctccgttcgacaggcgggggaagaggccgagccgggcgagagggggaacggtgtatttttaacaacgggaatcagtaactggaagtacaagattggttatttaataatgttaaaaatgaggctttgaaaagcagaggtgctgttatcagaatagtcttctgggtataaattaaaaatgactgaagttcaagcaatggtagaattctctgtggagctaaacaagttctacaatgtggatttgtttcagagaggtttttaccagattcgtgcttctatgaaaattccatcaagaattccccacagagtagaagctagtttgttgcatgcaacaggtatgactttagcctttccagcctcagttcatgattctctaatttgcagtaaaacatttcaaattttgtacaaaaatgaagaggttgttttaaatgatgttatgatcttcaaagtaaaaatgctattggatgaaagaaagattgaagaaacccttgaggaaatgaattttctattatccttggatctacacttcacagatggagattattcggcagatgatctgaatgccttgcaactaataagtagccgaacattgaagctgcactttagcccccatagaggccttcatcatcatgttaatgttatgtttgattacttccacctttctgttgtgtctgttacagttcatgcatcattggttgcactacaccagccactaataagctttcctcgccctgtgaagacaacttggttaaatagaaatgcaccagcacaaaacaaagattccgtgattcctactcttgaaagtgtggtctttggtattaactacacaaaacagttatcaccagatggttgtagcttcatcattgcagactccttcctacatcatgcgtatcgttttcattatacactttgtgccactttgctgctagccttcaagggattgcacagctacttcattacagtaacagaagagattccttcttgtcagaaactagaactggaggaaatggatgtagaagctcgacttactgaactatgtgaagaagttaagaaaatagagaatcctgatgaactggcagaacttataaatatgaatcttgcgcaactttgctcacttttgatggctttatggggacagtttctggaagttataacgctacacgaagaactaagaatattattagcacaagagcaccatactttgagggtacgcagattttctgaggcattcttttgttttgagcatccaagagaagctgccattgcataccaggaacttcatgctcagagtcatctacagatgtgcaccgctatcaaaaatacttccttctgcagttctcttccacccttacctattgaatgtagtgaattagatggagatctcaattcattacctataatctttgaagataggtatttagattcagttactgaagacttagatgcaccctggatgggaattcagaatcttcagagatcagagtccagtaaaatggataaatatgagactgaagaaagctctgtagcaggactttctagcccagagttgaaagtcagacctgctggtgcctccagtatttggtatacagaaggtgaaaagcagctaacaaaatctctaaaaggaaagaatgaagaatcaaataaatccaaagttaaggttactaagcttatgaaaacaatgaaatctgaaaac

SEQ ID NO: 132036 - DNA, 5173 bp, Homo sapiens
  Payload ID: 5775
  Gene Symbol: FAM135A
  Gene Name: family with sequence similarity 135, member A
  Uniprot ID: Q9P2D6
  ENST ID: ENST00000505868
  CDS Start-End: 1-4410
atgactgaagttcaagcaatggtagaattctctgtggagctaaacaagttctacaatgtggatttgtttcagagaggtttttaccagattcgtgcttctatgaaaattccatcaagaattccccacagagtagaagctagtttgttgcatgcaacaggtatgactttagcctttccagcctcagttcatgattctctaatttgcagtaaaacatttcaaattttgtacaaaaatgaagaggttgttttaaatgatgttatgatcttcaaagtaaaaatgctattggatgaaagaaagattgaagaaacccttgaggaaatgaattttctattatccttggatctacacttcacagatggagattattcggcagatgatctgaatgccttgcaactaataagtagccgaacattgaagctgcactttagcccccatagaggccttcatcatcatgttaatgttatgtttgattacttccacctttctgttgtgtctgttacagttcatgcatcattggttgcactacaccagccactaataagctttcctcgccctgtgaagacaacttggttaaatagaaatgcaccagcacaaaacaaagattccgtgattcctactcttgaaagtgtggtctttggtattaactacacaaaacagttatcaccagatggttgtagcttcatcattgcagactccttcctacatcatgcgtatcgttttcattatacactttgtgccactttgctgctagccttcaagggattgcacagctacttcattacagtaacagaagagattccttcttgtcagaaactagaactggaggaaatggatgtagaagctcgacttactgaactatgtgaagaagttaagaaaatagagaatcctgatgaactggcagaacttataaatatgaatcttgcgcaactttgctcacttttgatggctttatggggacagtttctggaagttataacgctacacgaagaactaagaatattattagcacaagagcaccatactttgagggtacgcagattttctgaggcattcttttgttttgagcatccaagagaagctgccattgcataccaggaacttcatgctcagagtcatctacagatgtgcaccgctatcaaaaatacttccttctgcagttctcttccacccttacctattgaatgtagtgaattagatggagatctcaattcattacctataatctttgaagataggtatttagattcagttactgaagacttagatgcaccctggatgggaattcagaatcttcagagatcagagtccagtaaaatggataaatatgagactgaagaaagctctgtagcaggactttctagcccagagttgaaagtcagacctgctggtgcctccagtatttggtatacagaaggtgaaaagcagctaacaaaatctctaaaaggaaagaatgaagaatcaaataaatccaaagttaaggttactaagcttatgaaaacaatgaaatctgaaaacacaaaaaaattaataaaacagaactctaaggattctgtggttttggtaggctacaaatgtttgaaaagtacagcatcaaatgatctcattaaatgctttgaaggcaatccttcacatagtcagaaggaaggtctggatcccacaatatgtggatataattttgacccaaagacctacatgagacagacaagtcaaaaggaagctagctgtttgccaactaatacagagagaactgaacaaaagtctccagatattgaaaatgttcaaccagaccagtttgatcctttgaactctggcaacctaaatctttgtgcaaatttgtccatttcaggtaaacttgatatctcccaggacgatagtgaaattacacaaatggaacacaatctggcatccagaaggtcatcagacgattgccatgatcatcaaacaaccccatctttgggagttagaacaattgaaataaagcccagtaataaagatcctttcagtggagagaatataactgtcaaactaggaccttggacagagcttcgacaagaggaaatacttgtggataatttactacccaactttgagtccttagaatctaatggtaaatctaaatctatagaaataacatttgaaaaggaagctttgcaagaagcaaagtgtctttctattggagaatcattaactaaattacgaagtaatctacctgccccttctacaaaagaatatcatgttgtagtaagtggagatacaattaagttaccagatattagtgccacatatgcctcatctagattttcagattcaggtgttgaaagtgaaccgagttcttttgcgacacatccaaacactgatttagtctttgaaactgtgcaagggcaaggtccttgcaatagtgaaagattatttcctcagcttttgatgaaacctgattataatgtaaaattttcattaggaaatcattgtactgagagtacaagtgctataagtgaaatacagtcatctttgacatccataaactctctaccctccgatgatgaactgtcacctgatgaaaattctaagaaatctgttgtacctgaatgccatctaaatgatagcaaaactgtattaaatctaggaacgactgatttgccaaaatgtgatgatactaaaaagtcaagtatcactttgcaacagcagagtgttgtattttcagggaacttggacaatgaaactgtagcaatacattccttaaattcaagcattaaagaccctttacaatttgttttttcagatgaagagacttccagtgatgtgaaaagtagttgcagctccaaacctaacttggatactatgtgtaaaggcttccagagtcctgataaatctaataactctacagggacagcaattacattaaattcaaaactgatttgtttaggcactccttgtgtcatttcaggttccatttctagtaatacagatgttagtgaagatagaactatgaaaaaaaatagtgatgtattaaatctcacacagatgtattcagaaatccctacagttgaaagtgaaactcatctgggtacaagtgatcctttttcagccagtactgatatagtaaagcaagggcttgtggaaaattattttggttctcaaagcagtacggatatttctgacacatgtgctgttagctacagcaatgcacttagccctcagaaggaaacttctgaaaaagaaattagtaatcttcagcaggaacaggataaagaggatgaggaggaagagcaggatcaacaaatggttcaaaatgggtactatgaagaaacagattattcagctttggatggaacaataaatgctcactatacaagcagagatgaactaatggaagaaagacttacaaaatctgaaaaaataaacagtgactatctgagagatggtataaacatgcctactgtctgtacttctggttgtttgtccttcccgtctgcaccacgagagtctccttgtaatgttaaatattcttccaaaagtaaatttgatgccattacaaagcagccaagcagtacttcttacaacttcacttcttcgatttcctggtatgaaagttcaccaaaacctcaaatacaagccttccttcaggcaaaagaagaactgaagctactaaaacttcctgggttcatgtacagtgaagttcctctgctggcatcctcagtaccttattttagtgtagaagaagaggatggttctgaagatggagtacatctgattgtctgtgtgcacggtttagatggaaacagtgcagatctccgattagtaaaaacttacattgaacttggattgcctgggggaagaattgattttcttatgtctgagagaaatcagaatgatacttttgctgattttgatagcatgactgatcgtcttttggatgagataatacagtatattcagatatatagtctaacagtctcaaaaataagctttattggacattcgttgggcaatttaataattcgttcagtgcttacaaggccaaggtttaaatattacctcaacaaacttcatacctttctgtctctttctggacctcaccttggtacactctacaacagcagtgctcttgttaatacaggtctctggtttatgcagaaatggaaaaaatcaggttcgcttttgcagctgacatgtcgagatcactcagaccctcgccaaacttttttatataagcttagtaacaaagcagggcttcattatttcaaaaatgttgtgctagtgggatccctacaggatcgctatgttccttatcactctgcccgcattgaaatgtgtaaaacagctttaaaggacaaacagtcaggtaatggaataaaattatttcaaagagttataggtattaatgagctctttccaaaatttttcttgtagtcactttctctcgtatctgtcacccttctctttcctgttacttcctttccacccacttatattaacagctgtcctttttccattcttctcacctgccacgtgaactgcctttaccaatgaagtaatactttcatctaattacaaatgcctctccattttgctgcctcagaagtagttcatactttgatttcctctgaattaatgggattgacaattgtagtcatccttgtcatatgttctgctgtacctcgcttttacgcaaaggtggcagcaaggatttgcccctctttactgatagtaaatgataaagactttatttgttcttttgctatttgtgaataacaaaataaatttaaagtatagccatttggagccagaaggaaacttgagtcctgtttactcattttataactaaagcccagagatactaagtggcttagcccgaatcagttaattacagacttaggtcaagaacctggtctccgggcgtggtggctcctgcctgtaatcccagtactttgggaggccaaggcaggtagatcacctgaggtcaggagttcgagaccagcctggccaacatggtgaaaccccgtctctactaaaaatacaaaaattagccgggcgtgatggcgggtacctgtaatcccagctacttgggaggctgaggcacgagaatagcttgaacccgggagggaaaggttgcagtgagccaagatcatgctgttgcactgcagcctgagagacaagaacgaaactctgtctc

SEQ ID NO: 132037 - DNA, 4806 bp, Homo sapiens
  Payload ID: 5775
  Gene Symbol: FAM135A
  Gene Name: family with sequence similarity 135, member A
  ENST ID: ENST00000505769
  CDS Start-End: 408-3695
gcggggccgtgcggccggggacctgttgatcgcaggtatagccggctggcccgggctccctcgggactggggcgactgcgcatgctcgctggccgcgctgggccagtagccgagccgcggtgacgaaccggctccgcggttgcggtgtttgcggttgctgtgatggcgatgtgagggggcccggggcgggatggtgctgacccgggtcgggccgtcttcttgcagctggacaacgagctcctccgttcgacaggcgggggaagaggccgagccgggcgagagggttgaagatcaactggattatgtatttggttctggaatctcaaagcagtccacaaacaaattcttccttatgttgtctgtgtcaggtgctgttatcagaatagtcttctgggtataaattaaaaatgactgaagttcaagcaatggtagaattctctgtggagctaaacaagttctacaatgtggatttgtttcagagaggtttttaccagattcgtgcttctatgaaaattccatcaagaattccccacagagtagaagctagtttgttgcatgcaacaggtatgactttagcctttccagcctcagttcatgattctctaatttgcagtaaaacatttcaaattttgtacaaaaatgaagaggttgttttaaatgatgttatgatcttcaaagtaaaaatgctattggatgaaagaaagattgaagaaacccttgaggaaatgaattttctattatccttggatctacacttcacagatggagattattcggcagatgatctgaatgccttgcaactaataagtagccgaacattgaagctgcactttagcccccatagaggccttcatcatcatgttaatgttatgtttgattacttccacctttctgttgtgtctgttacagttcatgcatcattggttgcactacaccagccactaataagctttcctcgccctgtgaagacaacttggttaaatagaaatgcaccagcacaaaacaaagattccgtgattcctactcttgaaagtgtggtctttggtattaactacacaaaacagttatcaccagatggttgtagcttcatcattgcagactccttcctacatcatgcgtatcgttttcattatacactttgtgccactttgctgctagccttcaagggattgcacagctacttcattacagtaacagaagagattccttcttgtcagaaactagaactggaggaaatggatgtagaagctcgacttactgaactatgtgaagaagttaagaaaatagagaatcctgatgaactggcagaacttataaatatgaatcttgcgcaactttgctcacttttgatggctttatggggacagtttctggaagttataacgctacacgaagaactaagaatattattagcacaagagcaccatactttgagggtacgcagattttctgaggcattcttttgttttgagcatccaagagaagctgccattgcataccaggaacttcatgctcagagtcatctacagatgtgcaccgctatcaaaaatacttccttctgcagttctcttccacccttacctattgaatgtagtgaattagatggagatctcaattcattacctataatctttgaagataggtatttagattcagttactgaaggtaaacttgatatctcccaggacgatagtgaaattacacaaatggaacacaatctggcatccagaaggtcatcagacgattgccatgatcatcaaacaaccccatctttgggagttagaacaattgaaataaagcccagtaataaagatcctttcagtggagagaatataactgtcaaactaggaccttggacagagcttcgacaagaggaaatacttgtggataatttactacccaactttgagtccttagaatctaatgatgaagagacttccagtgatgtgaaaagtagttgcagctccaaacctaacttggatactatgtgtaaaggcttccagagtcctgataaatctaataactctacagggacagcaattacattaaattcaaaactgatttgtttaggcactccttgtgtcatttcaggttccatttctagtaatacagatgttagtgaagatagaactatgaaaaaaaatagtgatgtattaaatctcacacagatgtattcagaaatccctacagttgaaagtgaaactcatctgggtacaagtgatcctttttcagccagtactgatatagtaaagcaagggcttgtggaaaattattttggttctcaaagcagtacggatatttctgacacatgtgctgttagctacagcaatgcacttagccctcagaaggaaacttctgaaaaagaaattagtaatcttcagcaggaacaggataaagaggatgaggaggaagagcaggatcaacaaatggttcaaaatgggtactatgaagaaacagattattcagctttggatggaacaataaatgctcactatacaagcagagatgaactaatggaagaaagacttacaaaatctgaaaaaataaacagtgactatctgagagatggtataaacatgcctactgtctgtacttctggttgtttgtccttcccgtctgcaccacgagagtctccttgtaatgttaaatattcttccaaaagtaaatttgatgccattacaaagcagccaagcagtacttcttacaacttcacttcttcgatttcctggtatgaaagttcaccaaaacctcaaatacaagccttccttcaggcaaaagaagaactgaagctactaaaacttcctgggttcatgtacagtgaagttcctctgctggcatcctcagtaccttattttagtgtagaagaagaggatggttctgaagatggagtacatctgattgtctgtgtgcacggtttagatggaaacagtgcagatctccgattagtaaaaacttacattgaacttggattgcctgggggaagaattgattttcttatgtctgagagaaatcagaatgatacttttgctgattttgatagcatgactgatcgtcttttggatgagataatacagtatattcagatatatagtctaacagtctcaaaaataagctttattggacattcgttgggcaatttaataattcgttcagtgcttacaaggccaaggtttaaatattacctcaacaaacttcatacctttctgtctctttctggacctcaccttggtacactctacaacagcagtgctcttgttaatacaggtctctggtttatgcagaaatggaaaaaatcaggttcgcttttgcagctgacatgtcgagatcactcagaccctcgccaaacttttttatataagcttagtaacaaagcagggcttcattatttcaaaaatgttgtgctagtgggatccctacaggatcgctatgttccttatcactctgcccgcattgaaatgtgtaaaacagctttaaaggacaaacagtcaggacagatctattcagaaatgatccacaacttgcttcgacccgttctgcaaagcaaggactgtaatttggttcgctataatgtcatcaatgcattgcccaatacagctgattcactcattgggagagctgcacatatagctgttcttgattcggaaatatttttagagaaattctttctggttgctgccctcaaatatttccaatagtataaaagcattgttagcgactggacaattacctcattcaacaatgtttcaaataatgtattatattaaaatgtagatgctgataagttctaagaaatatttatacctttttatatggaagataatttatatcatccatgtttagtgctttttaaacatcaactttactttctaggtaatgtggctgtgcaatatttttttaattttatctttttacttttctattactttttcatatattttgctacctaagtatttcagtgaaactttaagcccatacctgtgtctgattgtttattattggctttccacaattcttacatcagactacattatattagagaccattattgctagaatagcatgggatttaaaattttctaatactgggggtattatttagttaattataaatttttcttttcacattttactgtgttttaactggaaataaaattatggctgctacaatatattttttgaaatcaacttctgtagttctaaaatacaactttatcatacaatcaaaccaggtagttcatataaaacagtgtaatacaagttttctataaagtcattactgttgcttaaacatatttcatgcctattaaaatatattttctactggtgatttcaacattatttctcatactgacttttattactggaaatgttcctgtacatgttggcagcagataaagatttttgaatgtttgaatgccctctgccttgatttggttggaatttttgctaaattggtaatgttgcttgaactttatgactacattttcttttaacttttttcatggacttccttatatgtacataataattaaatgttgaaatttatgaaatacttttatgaatttagataatttttaaatattgttaaaatttattgaactaaaaagtaatgtaaataaaataattcatgttaaagatggaacaaaataattaactttacatgtttggtgatacagatgcaaatgtttttgatatatggagatgttgagtcttttgactttactaaaggtgctgaatagcattaaattcactattttccttttctgttttacttgtgaaaataaaaatgcactaaggttgggtagaa

SEQ ID NO: 132038 - DNA, 641 bp, Homo sapiens
  Payload ID: 5775
  Gene Symbol: FAM135A
  Gene Name: family with sequence similarity 135, member A
  ENST ID: ENST00000507085
  CDS Start-End: 491-641
ggctccgcggttgcggtgtttgcggttgctgtgatggcgatgtgagggggcccggggcgggatggtgctgacccgggtcgggccgtcttcttgcagctggacaacgagctcctccgttcgacaggcgggggaagaggccgagccgggcgagagggttgaagatcaactggattatgtatttggttctggaatctcaaagcagtccacaaacaaattcttccttatgttgtctgtgtcaggctggagtgcagtggtgtgatctcagctcactgcaacctcctcctcaagggttcaagcgattctcctgcctcagcttcctgagtagctgggattacaggcccgtgccatcacacccagggggaacggtgtatttttaacaacgggaatcagtaactggaagtacaagattggttatttaataatgttaaaaatgaggctttgaaaagcagaggtgctgttatcagaatagtcttctgggtataaattaaaaatgactgaagttcaagcaatggtagaattctctgtggagctaaacaagttctacaatgtggatttgtttcagagaggtttttaccagattcgtgcttctatgaaaattccatcaagaattccccacagagtagaagctagtttgttgcatg

SEQ ID NO: 132039 - DNA, 558 bp, Homo sapiens
  Payload ID: 5776
  Gene Symbol: FAM135B
  Gene Name: family with sequence similarity 135, member B
  ENST ID: ENST00000160713
  CDS Start-End: 100-558
agaggtgctttctctctggacagttttatgaatacataaggaggttctgtccccactcccttcgcaaccgcatcttattggtaatgagccaaaaagatcatgtctgaaatacaaggaacggttgagttttcggtagagctacataaattttataatgtggatctctttcagagagggtattaccagatccgagtgaccttgaaggtgtcttcaaggatcccccacagactgagtgcctccatcgctgggcagacagagagcagcagcctgcattcagcctgtgtccatgacagcaccgtgcacagccgggtctttcagatcttataccggaatgaagaggtacccataaatgatgctgtggtcttccgagttcatttactcttgggtggtgaaaggatggaagacgcactgagtgaagtagattttcaactcaaggtggatctgcactttacggacagtgaacagcagttgagggatgtggctggggcaccgatggtcagcagccgaacgcttggcctgcacttccacccccggaatggtctgcaccaccaggtcccg

SEQ ID NO: 132040 - DNA, 4288 bp, Homo sapiens
  Payload ID: 5776
  Gene Symbol: FAM135B
  Gene Name: family with sequence similarity 135, member B
  Uniprot ID: Q49AJ0
  ENST ID: ENST00000276737
  CDS Start-End: 172-3597
aacaccagctcgcaggtgctgcggactccccagtccgcccgccgccgccgccgccgcaactgttggcggccagagacggcgaaagaggagagagagggacccaggagcgcggcccccgggggagagagaggggagccctgcagtggagacaggtaatgagccaaaaagatcatgtctgaaatacaaggaacggttgagttttcggtagagctacataaattttataatgtggatctctttcagagagggtattaccagatccgagtgaccttgaaggtgtcttcaaggatcccccacagactgagtgcctccatcgctgggcagacagagagcagcagcctgcattcagcctgtgtccatgacagcaccgtgcacagccgggtctttcagatcttataccggaatgaagaggtacccataaatgatgctgtggtcttccgagttcatttactcttgggtggtgaaaggatggaagacgcactgagtgaagtagattttcaactcaaggtggatctgcactttacggacagtgaacagcagttgagggatgtggctggggcaccgatggtcagcagccgaacgcttggcctgcacttccacccccggaatggtctgcaccaccaggtcccggtcatgttcgactatttccacctgtctgtgatctcggtgaccgtccatgctgccctggtggctctgcagcagccattgatcagttttactcgtccaggaagaggctcctggcttggtaaaggtggcccagacaccggacaagaacagtctatcatttctctggaaaacttggtctttggagctgggtactgcaagccgacttcctcagagggaagcttctacatcacctctgagaactgcatgcagcacgcacacaagtggcaccgagacctgtgcctgttgctcctccacgcttaccggggtctccgtctccacttcctggtgatcatgcgggacatcccagagctgccacacacggagctggaggcccttgctgttgaagaaacactttctcagctgtgctcagagctacagatgttgaacaatccagagaagatcgctgagcagataagcaaggatctggcctggctcacgtcccacatgatgactctgtggacccagttcctggacacagtcactctgcactcccaagtgaccacttatctcacccaggaacaccacaccctgagggtccgaaggttttctgaggccttcttttacatggagcaccaaaaacttgcagtcctgacatttcaggagaatctgatacagacgcacagccagctgtccctggatatccggaactcggagtacctcactagcatgcccccgctgcctgcagagtgcctggacatcgacggcgattggaacaccctgccggtgatctttgaggacagatacgtggactgccctgcgacagggcataacttgagtgtttatcctaattttgatgttccagtgacaagtcctacaataatgaatctgaaagacaaggaagataactgtatggtaaatagcaatttatcttttagggaagaccttgtcttgtctaccataaaaccatcccaaatggattctgatgaagaagttataaggtgtccagagccaggtgagaatgtggccacacaaaatcatatggacatgtgctctgaatctcaggtgtatatatcaattggtgaatttcaaaacaaagcaggtgtgcctgaagatgaatgttggactggccaaacatctgatgctgggacatatccagtggcagatgtggatacttctagaaggagtccaggtccagaggatggacaggccccagtgctgacctacattgacgtaaaatctagcaataagaacccctccagagctgaacccctggtggccttcaatgctcagcatgagagtaggagctctagagataagtatggattagacaggactgggctaagcaaagtggtagtaggtggaagccaccaaaatgccatctcttcagacaaaacaactctccatgaattaagtactctaggaaagggaatagatcaagaggggaagatggtgctgctaagcttgaaactcaccccctctgagccctgtgatccactaagttctaccctgagggagcccttagatattaggtcttccctaaaggactctcacacagaagagcaggaggaactctcagtgctatccggggtcatcaagagatcttcatccatcatatctgattcaggcattgagagtgagccaagctccgtcgcctggtcagaggcccgaagcagggctctggagttgcccagtgatcgggaagtcttgcacccgtttgttcgaagacatgccctccaccggaactccctagagggtggacacacagaaagtaacacaagtttgccaagcggcatccaggcttctctcacctccattagctctttaccttttgaggaggatgagcgggaggtggcactcactaagttaaccaagtctgtatctgctccccacatcagtagcccagaggaggctgctgaagatgcggacaccaagcagcaagatggaggttttgctgaaccttcagatatgcacagcaagagccaaggttccccaggatcttgctctcaactttgtggtgactctggaacagatgctggagcagaccatcccctggtggagatagttttagatgctgacaaccagcagggccccggatacatagacatccccaaagggaaagggaagcagtttgatgctcaaggacactgtcttcctgatggcaggactgagaacactccaggtgttgaaaccaaaggtcttaatttaaaaataccacgcgtcatagcacttgaaaaccccaggaccagatctcttcatagagcacttgaggaaaccccaaagggcatgcctaaagacttgaatgtgggtcagcaagctctttccaacagtggcatctcagaggttgagggtctctctcaacatcaggtgcctgaattgagctgtacgtcagctgctgatgccatcaacaggaactcaacaggccagcaaagccaaagcggttcaccttgcattatggatgacacagcatttaatagaggagtgaatgccttcccggaggctaaacataaagcaggcactgtgtgccccactgtgacccattccgttcattcccaggttttgaaaaaccaagagctgaaggcaggcacttccatcatggggtcccatctgacttctgcagagacctttactctggacagcctgaaggctgtggaggttgtgaacttatctgtgtcttgcactgccacctgtctccctttctcatctgtgcccaaggagacccctgccagggctggattctcttccaaacagaccctgtttcccatcacccatcagcctttgggatcctttggagttgtttctacccattccagcacgttggatgaggaagtcagtgagaggatgtttagaggaagaggaagaaaatttggaagatggaattcacctggttgtctgtgtccatggcctggatgggaacagtgcagacctccggctggtaaagactttcatagaactggggctccctggaggaaaactggacttcctaatgtctgaaaagaatcagatggacacatttgcagattttgatactatgacggatcggttattggatgaaatcattcaacacattcagttgtacaacctctccatatcccgaattagcttcattggccattctcttggcaacatcatcatccgatcggtcctcacacggccccggttccggtattacctcaacaaactccacacgttcctgtcactctctgggcctcacctgggaaccctgtacaacaacagcaccctggttagtacaggcttatggctcatgcagaaactgaagaaatccgggtctctactgcagctgaccttcagggataatgctgatttgcgcaaatgtttcctctaccaactaagccaaaaaacagggctgcagtattttaaaaacgtcgtgctggttgcttctccccaagaccgttatgtgccatttcattcagccaggattgaaatgtgtaaaactgccctcaaagacagacacacagggccagtttatgcagaaatgatcaacaacctcctgggccctctggttgaagccaaggactgcactttaatccgacacaacgtgttccacgccctgcccaacactgccaacaccctgatcggccgagccgctcacatcgctgtgctggattcagaactcttcctggagaagtttttcttggtggcaggactcaactacttcaagtag

SEQ ID NO: 132041 - DNA, 6962 bp, Homo sapiens
  Payload ID: 5776
  Gene Symbol: FAM135B
  Gene Name: family with sequence similarity 135, member B
  Uniprot ID: Q49AJ0
  ENST ID: ENST00000395297
  CDS Start-End: 172-4392
aacaccagctcgcaggtgctgcggactccccagtccgcccgccgccgccgccgccgcaactgttggcggccagagacggcgaaagaggagagagagggacccaggagcgcggcccccgggggagagagaggggagccctgcagtggagacaggtaatgagccaaaaagatcatgtctgaaatacaaggaacggttgagttttcggtagagctacataaattttataatgtggatctctttcagagagggtattaccagatccgagtgaccttgaaggtgtcttcaaggatcccccacagactgagtgcctccatcgctgggcagacagagagcagcagcctgcattcagcctgtgtccatgacagcaccgtgcacagccgggtctttcagatcttataccggaatgaagaggtacccataaatgatgctgtggtcttccgagttcatttactcttgggtggtgaaaggatggaagacgcactgagtgaagtagattttcaactcaaggtggatctgcactttacggacagtgaacagcagttgagggatgtggctggggcaccgatggtcagcagccgaacgcttggcctgcacttccacccccggaatggtctgcaccaccaggtcccggtcatgttcgactatttccacctgtctgtgatctcggtgaccgtccatgctgccctggtggctctgcagcagccattgatcagttttactcgtccaggaagaggctcctggcttggtaaaggtggcccagacaccggacaagaacagtctatcatttctctggaaaacttggtctttggagctgggtactgcaagccgacttcctcagagggaagcttctacatcacctctgagaactgcatgcagcacgcacacaagtggcaccgagacctgtgcctgttgctcctccacgcttaccggggtctccgtctccacttcctggtgatcatgcgggacatcccagagctgccacacacggagctggaggcccttgctgttgaagaaacactttctcagctgtgctcagagctacagatgttgaacaatccagagaagatcgctgagcagataagcaaggatctggcctggctcacgtcccacatgatgactctgtggacccagttcctggacacagtcactctgcactcccaagtgaccacttatctcacccaggaacaccacaccctgagggtccgaaggttttctgaggccttcttttacatggagcaccaaaaacttgcagtcctgacatttcaggagaatctgatacagacgcacagccagctgtccctggatatccggaactcggagtacctcactagcatgcccccgctgcctgcagagtgcctggacatcgacggcgattggaacaccctgccggtgatctttgaggacagatacgtggactgccctgcgacagggcataacttgagtgtttatcctaattttgatgttccagtgacaagtcctacaataatgaatctgaaagacaaggaagataactgtatggtaaatagcaatttatcttttagggaagaccttgtcttgtctaccataaaaccatcccaaatggattctgatgaagaagttataaggtgtccagagccaggtgagaatgtggccacacaaaatcatatggacatgtgctctgaatctcaggtgtatatatcaattggtgaatttcaaaacaaagcaggtgtgcctgaagatgaatgttggactggccaaacatctgatgctgggacatatccagtggcagatgtggatacttctagaaggagtccaggtccagaggatggacaggccccagtgctgacctacattgacgtaaaatctagcaataagaacccctccagagctgaacccctggtggccttcaatgctcagcatgagagtaggagctctagagataagtatggattagacaggactgggctaagcaaagtggtagtaggtggaagccaccaaaatgccatctcttcagacaaaacaactctccatgaattaagtactctaggaaagggaatagatcaagaggggaagatggtgctgctaagcttgaaactcaccccctctgagccctgtgatccactaagttctaccctgagggagcccttagatattaggtcttccctaaaggactctcacacagaagagcaggaggaactctcagtgctatccggggtcatcaagagatcttcatccatcatatctgattcaggcattgagagtgagccaagctccgtcgcctggtcagaggcccgaagcagggctctggagttgcccagtgatcgggaagtcttgcacccgtttgttcgaagacatgccctccaccggaactccctagagggtggacacacagaaagtaacacaagtttgccaagcggcatccaggcttctctcacctccattagctctttaccttttgaggaggatgagcgggaggtggcactcactaagttaaccaagtctgtatctgctccccacatcagtagcccagaggaggctgctgaagatgcggacaccaagcagcaagatggaggttttgctgaaccttcagatatgcacagcaagagccaaggttccccaggatcttgctctcaactttgtggtgactctggaacagatgctggagcagaccatcccctggtggagatagttttagatgctgacaaccagcagggccccggatacatagacatccccaaagggaaagggaagcagtttgatgctcaaggacactgtcttcctgatggcaggactgagaacactccaggtgttgaaaccaaaggtcttaatttaaaaataccacgcgtcatagcacttgaaaaccccaggaccagatctcttcatagagcacttgaggaaaccccaaagggcatgcctaaagacttgaatgtgggtcagcaagctctttccaacagtggcatctcagaggttgagggtctctctcaacatcaggtgcctgaattgagctgtacgtcagctgctgatgccatcaacaggaactcaacaggccagcaaagccaaagcggttcaccttgcattatggatgacacagcatttaatagaggagtgaatgccttcccggaggctaaacataaagcaggcactgtgtgccccactgtgacccattccgttcattcccaggttttgaaaaaccaagagctgaaggcaggcacttccatcatggggtcccatctgacttctgcagagacctttactctggacagcctgaaggctgtggaggttgtgaacttatctgtgtcttgcactgccacctgtctccctttctcatctgtgcccaaggagacccctgccagggctggattctcttccaaacagaccctgtttcccatcacccatcagcctttgggatcctttggagttgtttctacccattccagcacgttggatgaggaagtcagtgagaggatgtttagtttttatcaggccaaagaaaaatttaaaaaagaactgaagattgaaggatttctgtacagtgacttaactgtactagcttctgatataccatatttcccaccagaggaagaggaagaaaatttggaagatggaattcacctggttgtctgtgtccatggcctggatgggaacagtgcagacctccggctggtaaagactttcatagaactggggctccctggaggaaaactggacttcctaatgtctgaaaagaatcagatggacacatttgcagattttgatactatgacggatcggttattggatgaaatcattcaacacattcagttgtacaacctctccatatcccgaattagcttcattggccattctcttggcaacatcatcatccgatcggtcctcacacggccccggttccggtattacctcaacaaactccacacgttcctgtcactctctgggcctcacctgggaaccctgtacaacaacagcaccctggttagtacaggcttatggctcatgcagaaactgaagaaatccgggtctctactgcagctgaccttcagggataatgctgatttgcgcaaatgtttcctctaccaactaagccaaaaaacagggctgcagtattttaaaaacgtcgtgctggttgcttctccccaagaccgttatgtgccatttcattcagccaggattgaaatgtgtaaaactgccctcaaagacagacacacagggccagtttatgcagaaatgatcaacaacctcctgggccctctggttgaagccaaggactgcactttaatccgacacaacgtgttccacgccctgcccaacactgccaacaccctgatcggccgagccgctcacatcgctgtgctggattcagaactcttcctggagaagtttttcttggtggcaggactcaactacttcaagtagtggctttgagggagcaggtctttggtaatgcttacgatcggtggagagctttagctgagacctgcttttacagacctcaccatttcagaatgaagcttcaacagcattgggggacggaggctcgggtggaacctgacatgagaggtgcttttgttttggagattcgagaaagctgagcaaatagactaaatgacaacaaactttgcttgaatttgtatagttacctggagtgtcattcaagatgttttctaggaaaaatatgagagaataaacagaatacttgggagttggtgagctccccttgctagccactactggcttactgagagattactccaatttaactagacttgccgaatatgttactagcttatagctttatcatttctgattaagtgcacacaagcatttcagaactcaggttaatctctgtgcagcagtggaacatatttgtgtaaatagaatcctcaatagattcaaatgtgtcagttgttcaagaaaatgtgatgcccatattcatattctctcctcatgttttctaaacaagggagcaaggaatgtgttacaaatcccagttctatttcataacagcagtgagcagggtgacttaaggtaaagagggataaaggtgacactattggtaaatacaagtttgttacaaagaaacatgactctagggacatactgaactatgaatagttgctccacctacttccccagaattcttctatgcagagccctgatccacaaattattttagtgattgcttacatctttgtctgtagtagggaacactgagtgagactaacctagcagaagggggcactgagatgaatgcacacacgtgtgaagctcctgctgatacacttccaaagacatgctatgttagcatttgatgcaattgcaaaaaattaaatccattaaagtggccagctgcttctcctctccatggaaggaggaaaacatctaaatggaggagtgctggattaaaacctcaggggagctctaagaagggtgctggctatctttcaatagaaatgtcttcttgccttaggaaaataaagggctaggaaaggtcactgcgttgataaaaaccaatagacgacagggacaaaagtgagatcagataggaggagaacaaccagactgaagactcaacataagctgttattggtaagtgactcaaaggggagttttgaaaattaccaggatgtttaatagtcaggtctcaaagactgagtatgttgtatgggctaaagtaagcctaaagaatcatttcgttgtatggaagagatgaatgaacctggacagtagggataagtaagacaggagcctaatcttttggagatgaaagctcctgcttctgcaaaaatcccttctgaagtgtggaaacgcatctaggaccagggttctcaatacctagaccatgactctaggtcactgatgccatggtaacaaaaccaagtaaatctaagctcatttgagaattttagatcctcttatgttaacaatgtgactttgaaaaataaaagcagaccatgggaatgagtccagatgggcagctttgcaggagtgtagacatgtggtattcttttgaagaaagagagggtcgttgagggagagttgaatgtcttgcaaaggcagagttccacacaatggatttagggtttctcagtgagtcctttctaaatgcttgttatatcctggtcataatgcatatgggttcactgagtcctctggtcactttccactggggatttttatctgagctcccgagtcagagctgggcatagactctggttcttcatgaggagtgctgtatttgctctgtaacctgggagacatttgttccctagtcgtgcagcacatggtattgtgtttcctgacctaggcaagtgcccatgctcagtacagaaccataagttggtagcagcttctcctttctggccaaatgatgggccctgtccctctgatgagtgcatttcatgttgtgtttccaattttcatcagcaatgttcgtcattccctggtcctttgaaagactgtgtagcccgcggttatggagccgggatgaatctgatgatcatcatcttctccaataaccagatgccatttttaacttcaatatgctgtctggacatagtgagaactaatggcaataaacgtccagctgcatggtgcacctcttttttataggggtgctctgctgtctttgtaaaccctctctggcctctgagcatctattataattgtgtagaaagtacatctctatattgtaaataagagtgtcgagtgttgcgtgtcatgcctcatttgaaaaggcttttttatgtctctttctattgaaatatagatatcgaatatataaatatatatacataaaatatatataaatatatattatgtaaaacagggacattctattattgattgtaaaaattataaacaaaatgcctgccaagataatggtcttgtatgtcttcattctctgcgtaatttttgtttttgtttttatgatttgttgtttcccaaaatgagttagaaataaaaatgcccaatattgagattaa

SEQ ID NO: 132042 - DNA, 684 bp, Homo sapiens
  Payload ID: 5776
  Gene Symbol: FAM135B
  Gene Name: family with sequence similarity 135, member B
  ENST ID: ENST00000520380
  CDS Start-End: 479-684
attgaatcaatacagcctgtgtttctcatgatcgcctggtccttgagactgttgataaggcattagagagcttcatggttgttgataatctgaggaacgccctctctagtgacagactgtcacggacatggaggattttttgaagtgccttttcaattttatgagttgaggatcctgcagccctggagatttataattgtccctgccactgctgctttgtgccttcttctagtttctgccttgtttatctggttttcttcccccatagtattttggcaattgtgaaaagtggttctggagaagtaccaacaaatgctcttactgcccgagaactgacacttttggaggctactgatgtttacggcaaaatagcctgagtcctttaatgtccttctttgattgttctaccagctacgattcctgcaaatccctgtcattcttcatcacaaagttatagaggtaatgagccaaaaagatcatgtctgaaatacaaggaacggttgagttttcggtagagctacataaattttataatgtggatctctttcagagagggtattaccagatccgagtgaccttgaaggtgtcttcaaggatcccccacagactgagtgcctccatcgctgggcagacagaggttctaaatatacatatgtcagaacaagaaccagcacaaggtaagta

SEQ ID NO: 132043 - DNA, 4734 bp, Homo sapiens
  Payload ID: 5776
  Gene Symbol: FAM135B
  Gene Name: family with sequence similarity 135, member B
  ENST ID: ENST00000482951
  CDS Start-End: 125-256
ggagctcttcacccagtgtagggtatggtttgtgaaggtatccctagagaaggtgactctgcggctgagcttgaaggaagagaattggtaggtgacaaagaagaggtaatgagccaaaaagatcatgtctgaaatacaaggaacggttgagttttcggtagagctacataaattttataatgtggatctctttcagagagggatgcagtctgaatttggcatttcacgtgcaggtgatatcagtaaatcctcatgatagacttacctccaaggctcattgtattaccagatccgagtgaccttgaaggtgtcttcaaggatcccccacagactgagtgcctccatcgctgggcagacagagagcagcagcctgcattcagcctgtgtccatgacagcaccgtgcacagccgggtctttcagatcttataccggaatgaagaggtacccataaatgatgctgtggtcttccgagttcatttactcttgggtggtgaaaggatggaagacgcactgagtgaagtagattttcaactcaaggtggatctgcactttacggacagtgaacagcagttgagggatgtggctggggcaccgatggtcagcagccgaacgcttggcctgcacttccacccccggaatggtctgcaccaccaggtcccggtcatgttcgactatttccacctgtctgtgatctcggtgaccgtccatgctgccctggtggctctgcagcagccattgatcagttttactcgtccaggaagaggctcctggcttggtaaaggtggcccagacaccggacaagaacagtctatcatttctctggaaaacttggtctttggagctgggtactgcaagccgacttcctcagagggaagcttctacatcacctctgagaactgcatgcagcacgcacacaagtggcaccgagacctgtgcctgttgctcctccacgcttaccggggtctccgtctccacttcctggtgatcatgcgggacatcccagagctgccacacacggagctggaggcccttgctgttgaagaaacactttctcagctgtgctcagagctacagatgttgaacaatccagagaagatcgctgagcagataagcaaggatctggcctggctcacgtcccacatgatgactctgtggacccagttcctggacacagtcactctgcactcccaagtgaccacttatctcacccaggaacaccacaccctgagggtccgaaggttttctgaggccttcttttacatggagcaccaaaaacttgcagtcctgacatttcaggagaatctgatacagacgcacagccagctgtccctggatatccggaactcggagtacctcactagcatgcccccgctgcctgcagagtgcctggacatcgacggcgattggaacaccctgccggtgatctttgaggacagatacgtggactgccctgcgacagggcataacttgagtgtttatcctaattttgatgttccagtgacaagtcctacaataatgaatctgaaagacaaggaagataactgtatggtaaatagcaatttatcttttagggaagaccttgtcttgtctaccataaaaccatcccaaatggattctgatgaagaagttataaggtgtccagagccaggtgagaatgtggccacacaaaatcatatggacatgtgctctgaatctcaggtgtatatatcaattggtgaatttcaaaacaaagcaggtgtgcctgaagatgaatgttggactggccaaacatctgatgctgggacatatccagtggcagatgtggatacttctagaaggagtccaggtccagaggatggacaggccccagtgctgacctacattgacgtaaaatctagcaataagaacccctccagagctgaacccctggtggccttcaatgctcagcatgagagtaggagctctagagataagtatggattagacaggactgggctaagcaaagtggtagtaggtggaagccaccaaaatgccatctcttcagacaaaacaactctccatgaattaagtactctaggaaagggaatagatcaagaggggaagatggtgctgctaagcttgaaactcaccccctctgagccctgtgatccactaagttctaccctgagggagcccttagatattaggtcttccctaaaggactctcacacagaagagcaggaggaactctcagtgctatccggggtcatcaagagatcttcatccatcatatctgattcaggcattgagagtgagccaagctccgtcgcctggtcagaggcccgaagcagggctctggagttgcccagtgatcgggaagtcttgcacccgtttgttcgaagacatgccctccaccggaactccctagagggtggacacacagaaagtaacacaagtttgccaagcggcatccaggcttctctcacctccattagctctttaccttttgaggaggatgagcgggaggtggcactcactaagttaaccaagtctgtatctgctccccacatcagtagcccagaggaggctgctgaagatgcggacaccaagcagcaagatggaggttttgctgaaccttcagatatgcacagcaagagccaaggttccccaggatcttgctctcaactttgtggtgactctggaacagatgctggagcagaccatcccctggtggagatagttttagatgctgacaaccagcagggccccggatacatagacatccccaaagggaaagggaagcagtttgatgctcaaggacactgtcttcctgatggcaggactgagaacactccaggtgttgaaaccaaaggtcttaatttaaaaataccacgcgtcatagcacttgaaaaccccaggaccagatctcttcatagagcacttgaggaaaccccaaagggcatgcctaaagacttgaatgtgggtcagcaagctctttccaacagtggcatctcagaggttgagggtctctctcaacatcaggtgcctgaattgagctgtacgtcagctgctgatgccatcaacaggaactcaacaggccagcaaagccaaagcggttcaccttgcattatggatgacacagcatttaatagaggagtgaatgccttcccggaggctaaacataaagcaggcactgtgtgccccactgtgacccattccgttcattcccaggttttgaaaaaccaagagctgaaggcaggcacttccatcatggggtcccatctgacttctgcagagacctttactctggacagcctgaaggctgtggaggttgtgaacttatctgtgtcttgcactgccacctgtctccctttctcatctgtgcccaaggagacccctgccagggctggattctcttccaaacagaccctgtttcccatcacccatcagcctttgggatcctttggagttgtttctacccattccagcacgttggatgaggaagtcagtgagaggatgtttagtttttatcaggccaaagaaaaatttaaaaaagaactgaagattgaaggatttctgtacagtgacttaactgtactagcttctgatataccatatttcccaccagaggaagaggaagaaaatttggaagatggaattcacctggttgtctgtgtccatggcctggatgggaacagtgcagacctccggctggtaaagactttcatagaactggggctccctggaggaaaactggacttcctaatgtctgaaaagaatcagatggacacatttgcagattttgatactatgacggatcggttattggatgaaatcattcaacacattcagttgtacaacctctccatatcccgaattagcttcattggccattctcttggcaacatcatcatccgatcggtcctcacacggccccggttccggtattacctcaacaaactccacacgttcctgtcactctctgggcctcacctgggaaccctgtacaacaacagcaccctggttagtacaggcttatggctcatgcagaaactgaagaaatccgggtctctactgcagctgaccttcagggataatgctgatttgcgcaaatgtttcctctaccaactaagccaaaaaacagggctgcagtattttaaaaacgtcgtgctggttgcttctccccaagaccgttatgtgccatttcattcagccaggattgaaatgtgtaaaactgccctcaaagacagacacacagggccagtttatgcagaaatgatcaacaacctcctgggccctctggttgaagccaaggactgcactttaatccgacacaacgtgttccacgccctgcccaacactgccaacaccctgatcggccgagccgctcacatcgctgtgctggattcagaactcttcctggagaagtttttcttggtggcaggactcaactacttcaagtagtggctttgagggagcaggtctttggtaatgcttacgatcggtggagagctttagctgagacctgcttttacagacctcaccatttcagaatgaagcttcaacagcattgggggacggaggctcgggtggaacctgacatgagaggtgcttttgttttggagattcgagaaagctgagcaaatagactaaatgacaacaaactttgcttgaatttgtatagttacctggagtgtcattcaagatgttttctaggaaaaatatgagagaataaacagaatacttgggagttggtgagctccccttgctagcca

SEQ ID NO: 132044 - DNA, 1616 bp, Homo sapiens
  Payload ID: 5776
  Gene Symbol: FAM135B
  Gene Name: family with sequence similarity 135, member B
  ENST ID: ENST00000467365
  CDS Start-End: 1-1356
gagccaagctccgtcgcctggtcagaggcccgaagcagggctctggagttgcccagtgatcgggaagtcttgcacccgtttgttcgaagacatgccctccaccggaactccctagagggtggacacacagaaagtaacacaagtttgccaagcggcatccaggcttctctcacctccattagctctttaccttttgaggaggatgagcgggaggtggcactcactaagttaaccaagtctgtatctgctccccacatcagtagcccagaggaggctgctgaagatgcggacaccaagcagcaagatggaggttttgctgaaccttcagatatgcacagcaagagccaaggttccccaggatcttgctctcaactttgtggtgactctggaacagatgctggagcagaccatcccctggtggagatagttttagatgctgacaaccagcagggccccggatacatagacatccccaaagggaaagggaagcagtttgatgctcaaggacactgtcttcctgatggcaggactgagaacactccaggtgttgaaaccaaaggtcttaatttaaaaataccacgcgtcatagcacttgaaaaccccaggaccagatctcttcatagagcacttgaggaaaccccaaagggcatgcctaaagacttgaatgtgggtcagcaagctctttccaacagtggcatctcagaggttgagggtctctctcaacatcaggtgcctgaattgagctgtacgtcagctgctgatgccatcaacaggaactcaacaggccagcaaagccaaagcggttcaccttgcattatggatgacacagcatttaatagaggagtgaatgccttcccggaggctaaacataaagcaggcactgtgtgccccactgtgacccattccgttcattcccaggttttgaaaaaccaagagctgaaggcaggcacttccatcatggggtcccatctgacttctgcagagacctttactctggacagcctgaaggctgtggaggttgtgaacttatctgtgtcttgcactgccacctgtctccctttctcatctgtgcccaaggagacccctgccagggctggattctcttccaaacagaccctgtttcccatcacccatcagcctttgggatcctttggagttgtttctacccattccagcacgttggatgaggaagtcagtgagaggatgtttagaggaagaggaagaaaatttggaagatggaattcacctggttgtctgtgtccatggcctggatgggaacagtgcagacctccggctggtaaagactttcatagaactggggctccctggaggaaaactggacttcctaatgtctgaaaagaatcagatggacacatttgcagattttgatactatgacggatcggttattggatgaaatcattcaacacattcagttgtacaacctctccatatcccgaattaggtaaaaggaaaccacaggtagttaatgctgggggaagaggggggacatttttgagtgtttgctgtataaaagcaataatatgatgccttctgtataccactgagctaagctaacttgtgacttttaataaattacttttaaagcagaagtaa

SEQ ID NO: 132045 - DNA, 1810 bp, Homo sapiens
  Payload ID: 5777
  Gene Symbol: FAM136A
  Gene Name: family with sequence similarity 136, member A
  Uniprot ID: Q96C01
  ENST ID: ENST00000037869
  CDS Start-End: 80-496
gggcggtgagggggcgggcccgtacgccgattccatatgggcgccggcgcggagcgccgcggggcagcgcggggtcgccatggctgagctgcagcagctccgggtgcaggaggcggtggagtccatggtgaagagtctggaaagagagaacatccggaagatgcagggtctcatgttccggtgcagcgccagctgttgtgaggacagccaggcctccatgaagcaggtgcaccagtgcatcgagcgctgccatgtgcctctggctcaagcccaggctttggtcaccagtgagctggagaagttccaggaccgcctggcccggtgcaccatgcattgcaacgacaaagccaaagattcaatagatgctgggagtaaggagcttcaggtgaagcagcagctggacagttgtgtgaccaagtgtgtggatgaccacatgcacctcatcccaactatgaccaagaagatgaaggaggctctcttatcaattggaaaataaaagtatttgccagtggccatcagggctgagggcaagaatatattttttataaggaattgggaattttagtcttttaagcaaagtttacgaatgaagaaatgaaggatggccacaagcgtaaggcatatgtcacttgcctctggacactggttattttatgtttcagtccctaaaaaatgaaatggaaaaaagtggtgctaaatcgagtcagagatattacaggagagttttagagcttattatttcctgtggccagtgcttgtcctggcagtaaggctttcccctgtaacaagccagagccctccaaggtaccagactcttcttactacacaggtactaacaggctggcaggttagagttggtggagtctgaggagagatattttctctttgttgccaacatcctgtttaccaaaagtgtcaccccaccatcttccataagctgtgaaacaaaatcaatgaggtcactaacttagaagggaaagaaagttttctgggtctttgttttcttgatttggggtaatttatacaagggcatacaagttgattttaagatgtggaactgggaggtagactagtttggataagaactttgaaatgttccttgtggatccccatttctggtcatcaagatgtggatgtacatttcttaaaattattacatgctgcatctttcagcctggagactgtgcagaaacatgagaggtgatgacacactaattatgggaagcagaattactggctgatggcccctgaggctgtgtgtaacaaaatgacaggacaatcttgcagtaacactttccccttgaagagaagggggttttgattgtgatatatactagtatctaggaatgaacagtaaaagaggagcagttggctacttgattacaacagagtaaatgaagtactggatttgggaaaacctggttttattagaacatatggaatgaaagcctacacctagcattgcctacttagccccctgaattaacagagcccaattgagacaaacccctggcaacaggaaattcaagggagaaaaagtaagcaacttgggctaggatgagctgactcccttagagcaaaggagagacagcccccattaccaaataccatttttgcctggggcttgtgcagctggcagtgttcctgccccagcatggcaccttattgttttgatagcaacttcgttgaattttcaccaacttattacttgaaattataatatagcctgtccgtttgctgtttccaggctgtgatatattttcctagtggtttgactttaaaaataaataaggtttaattttctccccac

SEQ ID NO: 132046 - DNA, 518 bp, Homo sapiens
  Payload ID: 5777
  Gene Symbol: FAM136A
  Gene Name: family with sequence similarity 136, member A
  ENST ID: ENST00000438759
  CDS Start-End: 29-518
gctccgggtgcaggaggcggtggagtccatggtgaagagtctggaaagagagaacatccggaagatgcaggtagcggggctggggccgaaccaggacccccttctcagcgggtgggttccgggcccttccctcagccaccacgcgacgccttgcactgcagccgcgtccccgcagaccgggtgtgggcggccctggggtcgccggggcggcctcggacaggacttcggaagctttggcggatcggatgaaatccgtgtgcccttgccgtgcgcgaggctgttttccgccccttccagcccggggcaggagcgtcctcggcggcagggtctcatgttccggtgcagcgccagctgttgtgaggacagccaggcctccatgaagcaggtgcaccagtgcatcgagcgctgccatgtgcctctggctcaagcccaggctttggtcaccagtgagctggagaagttccaggaccgcctggcccggtgcaccatgcattgcaacgacaaagccaaagattcaa

SEQ ID NO: 132047 - DNA, 936 bp, Homo sapiens
  Payload ID: 5777
  Gene Symbol: FAM136A
  Gene Name: family with sequence similarity 136, member A
  ENST ID: ENST00000450256
  CDS Start-End: 46-363
atatgggcgccggcgcggagcgccgcggggcagcgcggggtcgccatggctgagctgcagcagctccgggtgcaggaggcggtggagtccatggtgaagagtctggaaagagagaacatccggaagatgcaggtgagcggcccgaggcccagcagaggcgctgccaacgtgaaagaccagaaaggcgaggacttccggcctccccgttggccaggtcatgcctgcttctcttgcgcccaacctcgcttcacacagcgcgggtttctacactgttcttctctgagccccgcaatgcctctgtgtgtttcggtcctgcttctctcacggaggtctcatgttccggtgcagcgccagctgttgtgaggacagccaggcctccatgaagcaggtgcaccagtgcatcgagcgctgccatgtgcctctggctcaagcccaggctttggtcaccagtgagctggagaagttccaggaccgcctggcccggtgcaccatgcattgcaacgacaaagccaaagattcaatagatgctgggagtaaggagcttcaggtgaagcagcagctggacagttgtgtgaccaagtgtgtggatgaccacatgcacctcatcccaactatgaccaagaagatgaaggaggctctcttatcaattggaaaataaaagtatttgccagtggccatcagggctgagggcaagaatatattttttataaggaattgggaattttagtcttttaagcaaagtttacgaatgaagaaatgaaggatggccacaagcgtaaggcatatgtcacttgcctctggacactggttattttatgtttcagtccctaaaaaatgaaatggaaaaaagtggtgctaaatcgagtcagagatattacaggagagttttagagcttattatttcctgtggccagtgcttgtcctggcagtaaggct

SEQ ID NO: 132048 - DNA, 885 bp, Homo sapiens
  Payload ID: 5777
  Gene Symbol: FAM136A
  Gene Name: family with sequence similarity 136, member A
  ENST ID: ENST00000430566
  CDS Start-End: 35-772
ggcgcggagcgccgcggggcagcgcggggtcgccatggctgagctgcagcagctccgggtgcaggaggcggtggagtccatggtgaagagtctggaaagagagaacatccggaagatgcaggtagcggggctggggccgaaccaggacccccttctcagcgggtgggttccgggcccttccctcagccaccacgcgacgccttgcactgcagccgcgtccccgcagaccgggtgtgggcggccctggggtcgccggggcggcctcggacaggacttcggaagctttggcggatcggatgaaatccgtgtgcccttgccgtgcgcgaggctgttttccgccccttccagcccggggcaggagcgtcctcggcggcaggtgggaagcccctggtggcaggcgctcgccccaccaccttcccctcttacgcggccccttccgcagggtctcatgttccggtgcagcgccagctgttgtgaggacagccaggcctccatgaagcaggtgcaccagtgcatcgagcgctgccatgtgcctctggctcaagcccaggctttggtcaccagtgagctggagaagttccaggaccgcctggcccggtgcaccatgcattgcaacgacaaagccaaagattcaatagatgctgggagtaaggagcttcaggtgaagcagcagctggacagttgtgtgaccaagtgtgtggatgaccacatgcacctcatcccaactatgaccaagaagatgaaggaggctctcttatcaattggaaaataaaagtatttgccagtggccatcagggctgagggcaagaatatattttttataaggaattgggaattttagtcttttaagcaaagtttacgaatgaagaaatgaaggatggccac

SEQ ID NO: 132049 - DNA, 2708 bp, Homo sapiens
  Payload ID: 5778
  Gene Symbol: FAM149A
  Gene Name: family with sequence similarity 149, member A
  Uniprot ID: A5PLN7
  ENST ID: ENST00000227065
  CDS Start-End: 580-2028
gcggaggatctggagagggaaggggcgtgcgagccccgcggaccccgggcgcgcccgggccgcctgagctgggccagccgcgcggcgggcgcgggcgcgggcgcgggcgcgggcgcgggcgggtggggagccccagccccggggccgcgggggcgcgtgaccggctgtctgcgtggggcccgcgcgcggtgcctctgcctgacggtgcccgagcctagcgcggagcctggcgcgggggctgcgagcacaggcccggggctgatcgtaatcggaagaggactgtcagaaggacgtagaaggcacggttttactgtgaggagcaaagattctttacctacgcattttacaagaaatgtgcagaaagccattgataaatatacctgcaaatccttgtcatccttttcctccagcggaagccatacacccacgggagcccacacctcttggtctgggtcggccacacagagctctaccaccggctcatccacggagaggggctccgtttattcctggagagatgacgaatttgacgaagccagttcacagtcagtgcagcggttactctgggaggtggaggaaatgttatttgaagggaaagtgaaccctcagacccagagtctgctggccgaatgcggggagtggacaagaagatccctccatttgagagtattaggaagacagctgatcctgcccactgacaaaggcgtccagcatttccagggcagcactcctgcctccgcagtccacagacccccgctcagtgcctgcggacacagcagcaacatcagagagttgtgcatttctggctctcaaatagtcccagcagcactctcagcctctgccctgccaggccctgatgacacaggggttgctgacctaacggcacgttcatccctggaagaagaggtttaccatgtggatggaaagattgaggagtatttcgcttttgacagaaaagaggatgatgatgaatgtcttgaacaaaaaccagctcagcccggtaggaaatggcgcaaactcggacttcctcctgtttccccgcgtgactgtgtcaaagatgccgtggcagcagaagtgtttgatcacgtctggacaaatatggtagaacttttggaagagctgattagaaaacactgggaaactacactcacagaagggaaaaaacagagagaaacattgaaagtggctggaaacagatttccgcacgtcctcgttccacacgctcacgccgatggagccagtggccccccgtccggacacgccgaggctcacggcatctccctggcttctcgtctgaacccgccccagattcatcacttctccagcagtttttatagtgacatgaatggtgtcatgacaattcaagcaaaaccgcttcagcggagacctgcctattttgctgacagaacgcagaatgagaaggaggacaaagcatcgggtggaggggcaggtgctctctcctccgcaccgcacagactgggacgggcctcagacactcatggattatcaccttctgcaaagaaaacaccagtgccctggaggctgccttctcttgcttcagattcacagagactaaaaactcccaacatctatagtgacgaagttcttcggggaacaaaactgccgactggcgtggaccacatggcttccccactggttcaaacgtcacggagcaggttccccccgctagtcacggagaccagggggcagaatacagcagttcctggatgccgccttgtttcttacagaggaaggcatctacaaaaccgtgtgttgagtgccatgcctgacggtacagaacgatcgcgtcttcgagaaagaacagccaccctggaacggttgtcaaggcccagcacaacccacacgttccggcagtcggatacgcctcgaaaaagttcattgacacaaatggaatttgctgctcacacatggacaggtcaaagtattttgacaggttcacaatatgtgcctaaatcttttcagaggacaactttgactttcaagaggagattccaagtgacatcttgaaaccacctcaccagaaccattggagcacctgtggcctcggcacactgcttatcacttgaaaaatggaggaacaagtgttatatttatctgtgtgtctgacagtgtgagatgttagaccgagagaaaagcaaacaaataaatcacttaatcttgaacactttgcactgtaaagagagtgaaagtcaaacccaccaagctgccttgctgaaagcatctccaaggttctgtaggctttgttcagaagcccctgatgtgtgtttgcagtccgtcattttatcaatgatacgcaaacataattagcatgtgtatgtactcacacactaattacatgtaagaatatattatctaggaatatgtcatttgtaactttgtactctgacgtattttctagtctcaccctattagtaattctgtcaaaatcctagacgctagtagatattagtatttgagacaatatgtcagagtctgaataagactcagcttgttctagtcatgctgagtttctcatatattttttaaaagtgcttccgccatgaacctctttgagaaatgtcagtggcaaaatctcccaagctaattttctttttctatgttccatcttcaaattcagacagttcacgtgaagtaccccacatttattgatcttagggttgaatataaacgcaattaaaagctatggc

SEQ ID NO: 132050 - DNA, 2997 bp, Homo sapiens
  Payload ID: 5778
  Gene Symbol: FAM149A
  Gene Name: family with sequence similarity 149, member A
  Uniprot ID: A5PLN7
  ENST ID: ENST00000356371
  CDS Start-End: 1-2322
atgaaggctgctgtgctggaccttgggtctctcttggccaaactcttcgagacctcgacggcgccccccgcaggcccctcctccagaccctcgggaggtgctgccgctgcagggtcggggggctccagggcgggcaccccgttgggtaccgccccgaccctcctccgcgccctggctccggactccccctccgcctcgcggcggtcgcccgccccgctgctctcctccccctactcccggggctccgccgccagccgcgccgcgggagcagtggggaccctgctctcttggcccagtagccctagagcgggtaaagccccgccccagccccccactccctccggcgggggctgctcccctgctcgcctggtggtcccagcgcggccgccctcgggccccggcggggtctgggccgcgctccccaggaacccgctccagcctggccccggagagcgagagctcggcgcctgcgtggcccccggggctggccccagaaccctgttccttacgctgcctgacatcggcgaggagggggcctcggacggcgactccggggatggcgaagcaagaggactgtcagaaggacgtagaaggcacggttttactgtgaggagcaaagattctttacctacgcattttacaagaaatgtgcagaaagccattgataaatatacctgcaaatccttgtcatccttttcctccagcggaagccatacacccacgggagcccacacctcttggtctgggtcggccacacagagctctaccaccggctcatccacggagaggggctccgtttattcctggagagatgacgaatttgacgaagccagttcacagtcagtgcagcggttactctgggaggtggaggaaatgttatttgaagggaaagtgaaccctcagacccagagtctgctggccgaatgcggggagtggacaagaagatccctccatttgagagtattaggaagacagctgatcctgcccactgacaaaggcgtccagcatttccagggcagcactcctgcctccgcagtccacagacccccgctcagtgcctgcggacacagcagcaacatcagagagttgtgcatttctggctctcaaatagtcccagcagcactctcagcctctgccctgccaggccctgatgacacaggggttgctgacctaacggcacgttcatccctggaagaagaggtttaccatgtggatggaaagattgaggagtatttcgcttttgacagaaaagaggatgatgatgaatgtcttgaacaaaaaccagctcagcccggtaggaaatggcgcaaactcggacttcctcctgtttccccgcgtgactgtgtcaaagatgccgtggcagcagaagtgtttgatcacgtctggacaaatatggtagaacttttggaagagctgattagaaaacactgggaaactacactcacagaagggaaaaaacagagagaaacattgaaagtggctggaaacagatttccgcacgtcctcgttccacacgctcacgccgatggagccagtggccccccgtccggacacgccgaggctcacggcatctccctggcttctcgtctgaacccgccccagattcatcacttctccagcagtttttatagtgacatgaatggtgtcatgacaattcaagcaaaaccgcttcagcggagacctgcctattttgctgacagaacgcagaatgagaaggaggacaaagcatcgggtggaggggcaggtgctctctcctccgcaccgcacagactgggacgggcctcagacactcatggattatcaccttctgcaaagaaaacaccagtgccctggaggctgccttctcttgcttcagattcacagagactaaaaactcccaacatctatagtgacgaagttcttcggggaacaaaactgccgactggcgtggaccacatggcttccccactggttcaaacgtcacggagcaggttccccccgctagtcacggagaccagggggcagaatacagcagttcctggatgccgccttgtttcttacagaggaaggcatctacaaaaccgtgtgttgagtgccatgcctgacggtacagaacgatcgcgtcttcgagaaagaacagccaccctggaacggttgtcaaggcccagcacaacccacacgttccggcagtcggatacgcctcgaaaaagttcattgacacaaatggaatttgctgctcacacatggacaggtcaaagtattttgacaggttcacaatatgtgcctaaatcttttcagaggacaactttgactttcaagaggagattccaagtgacatcttgaaaccacctcaccagaaccattggagcacctgtggcctcggcacactgcttatcacttgaaaaatggaggaacaagtgttatatttatctgtgtgtctgacagtgtgagatgttagaccgagagaaaagcaaacaaataaatcacttaatcttgaacactttgcactgtaaagagagtgaaagtcaaacccaccaagctgccttgctgaaagcatctccaaggttctgtaggctttgttcagaagcccctgatgtgtgtttgcagtccgtcattttatcaatgatacgcaaacataattagcatgtgtatgtactcacacactaattacatgtaagaatatattatctaggaatatgtcatttgtaactttgtactctgacgtattttctagtctcaccctattagtaattctgtcaaaatcctagacgctagtagatattagtatttgagacaatatgtcagagtctgaataagactcagcttgttctagtcatgctgagtttctcatatattttttaaaagtgcttccgccatgaacctctttgagaaatgtcagtggcaaaatctcccaagctaattttctttttctatgttccatcttcaaattcagacagttcacgtgaagtaccccacatttattgatcttagggttgaatataaacgcaattaaaagct

SEQ ID NO: 132051 - DNA, 1815 bp, Homo sapiens
  Payload ID: 5778
  Gene Symbol: FAM149A
  Gene Name: family with sequence similarity 149, member A
  ENST ID: ENST00000389354
  CDS Start-End: 216-1424
cgcattttacaagaaatgtgcagaaagccattgataaatatacctgcggaagccatacacccacgggagcccacacctcttggtctgggtcggccacacagagctctaccaccggctcatccacggagaggggctccgtttattcctggagagatgacgaatttgacgaagccagttcacagtcagtgcagcggttactctgggaggtggaggaaatgttatttgaagggaaagtgaaccctcagacccagagtctgctggccgaatgcggggagtggacaagaagatccctccatttgagagtattaggaagacagctgatcctgcccactgacaaaggcgtccagcatttccagggcagcactcctgcctccgcagtccacagacccccgctcagtgcctgcggacacagcagcaacatcagagagttgtgcatttctggctctcaaatagtcccagcagcactctcagcctctgccctgccaggccctgatgacacaggggttgctgacctaacggcacgttcatccctggaagaagaggtttaccatgtggatggaaagattgaggagtatttcgcttttgacagaaaagaggatgatgatgaatgtcttgaacaaaaaccagctcagcccggtaggaaatggcgcaaactcggacttcctcctgtttccccgcgtgactgtgtcaaagatgccgtggcagcagaagtgtttgatcacgtctggacaaatatggtagaacttttggaagagctgattagaaaacactgggaaactacactcacagaagggaaaaaacagagagaaacattgaaagtggctggaaacagatttccgcacgtcctcgttccacacgctcacgccgatggagccagtggccccccgtccggacacgccgaggctcacggcatctccctggcttctcgtctgaacccgccccagattcatcacttctccagcagtttttatagtgacatgaatggtgtcatgacaattcaagcaaaaccgcttcagcggagacctgcctattttgctgacagaacgcagaatgagaaggaggacaaagcatcgggtggaggggcaggtgctctctcctccgcaccgcacagactgggacgggcctcagacactcatggattatcaccttctgcaaagaaaacaccagtgccctggaggctgccttctcttgcttcagattcacagagactaaaaactcccaacatctatagtgacgaagttcttcggggaacaactgccgactggcgtggaccacatggcttccccactggttcaaacgtcacggagcaggttccccccgctagtcacggagaccagggggcagaatacagcagttcctggatgccgccttgtttcttacagaggaaggcatctacaaaaccgtgtgttgagtgccatgcctgacggtacagaacgatcgcgtcttcgagaaagaacagccaccctggaacggttgtcaaggcccagcacaacccacacgttccggcagtcggatacgcctcgaaaaagttcattgacacaaatggaatttgctgctcacacatggacaggtcaaagtattttgacaggttcacaatatgtgcctaaatcttttcagaggacaactttgactttcaagaggagattccaagtgacatcttgaaaccacctcaccagaaccattggagcacctgtggcctcggcacactgcttatcacttgaaaaatggaggaacaagtgttatatttatctgtgtgtctgacagtgtgagatgttagaccgagagaaaagcaaacaaataaatcacttaatcttg

SEQ ID NO: 132052 - DNA, 557 bp, Homo sapiens
  Payload ID: 5778
  Gene Symbol: FAM149A
  Gene Name: family with sequence similarity 149, member A
  ENST ID: ENST00000509574
  CDS Start-End: 449-557
gaattaaaatccgatttggaagagagaagggcagccagcaccagtatgcacagcccccggccccagagacccgggaaggagtagggaggccgggccgtgcgcggaggagtggccgctgggttggaaacccggcccggcagggagcggggaaggcgcgctttcccggagaagaggactgtcagaaggacgtagaaggcacggttttactgtgaggagcaaagattctttacctacgcattttacaagaaatgtgcagaaagccattgataaatatacctgcggaagccatacacccacgggagcccacacctcttggtctgggtcggccacacagagctctaccaccggctcatccacggagaggggctccgtttattcctggagagatgacgaatttgacgaagccagttcacagtcagtgcagcggttactctgggaggtggaggaaatgttatttgaagggaaagtgaaccctcagacccagagtctgctggccgaatgcggggagtggacaagaagatccctccatttgagagtattaggaagacagctgatcc

SEQ ID NO: 132053 - DNA, 570 bp, Homo sapiens
  Payload ID: 5778
  Gene Symbol: FAM149A
  Gene Name: family with sequence similarity 149, member A
  ENST ID: ENST00000510790
  CDS Start-End: 388-570
aaaactgaaacgagcacatggtaacgcaagcggcaggcatgctcggggtgtgcaggagatgcaccggcttgtgtgagccgaagaggactgtcagaaggacgtagaaggcacggttttactgtgaggagcaaagattctttacctacgcattttacaagaaatgtgcagaaagccattgataaatatacctgcaaatccttgtcatccttttcctccagcggaagccatacacccacgggagcccacacctcttggtctgggtcggccacacagagctctaccaccggctcatccacggagaggggctccgtttattcctggagagatgacgaatttgacgaagccagttcacagtcagtgcagcggttactctgggaggtggaggaaatgttatttgaagggaaagtgaaccctcagacccagagtctgctggccgaatgcggggagtggacaagaagatccctccatttgagagtattaggaagacagctgatcctgcccactgacaaaggcgtccagcatttccagggcagcactcctgcctccgcagtccacagacccccgctcagt

SEQ ID NO: 132054 - DNA, 716 bp, Homo sapiens
  Payload ID: 5778
  Gene Symbol: FAM149A
  Gene Name: family with sequence similarity 149, member A
  ENST ID: ENST00000504330
  CDS Start-End: 488-716
tactaaaatccctgtcgtgggaaaggcatgcctcgtgcagtgcccaccctctgagactcaaaaatgtagttcacctccgcgacctcaccccttcttcccttagcatgtgaaaatgacggcttggcagtttcaccagctcacaggagagcgtccagctgctctgctcctggtataatcctgggcctccaaaactgaaacgagcacatgaagaggactgtcagaaggacgtagaaggcacggttttactgtgaggagcaaagattctttacctacgcattttacaagaaatgtgcagaaagccattgataaatatacctgcggaagccatacacccacgggagcccacacctcttggtctgggtcggccacacagagctctaccaccggctcatccacggagaggggctccgtttattcctggagagatgacgaatttgacgaagccagttcacagtcagtgcagcggttactctgggaggtggaggaaatgttatttgaagggaaagtgaaccctcagacccagagtctgctggccgaatgcggggagtggacaagaagatccctccatttgagagtattaggaagacagctgatcctgcccactgacaaaggcgtccagcatttccagggcagcactcctgcctccgcagtccacagacccccgctcagtgcctgcggacacagcagcaacatcagagagttgtgcatttctggct

SEQ ID NO: 132055 - DNA, 775 bp, Homo sapiens
  Payload ID: 5778
  Gene Symbol: FAM149A
  Gene Name: family with sequence similarity 149, member A
  ENST ID: ENST00000502894
  CDS Start-End: 1-161
cattgacacaaatggaatttgctgctcacacatggacaggtcaaagtattttgacagaggacaactttgactttcaagaggagattccaagtgacatcttgaaaccacctcaccagaaccattggagcacctgtggcctcggcacactgcttatcacttgaaaaatggaggaacaagtgttatatttatctgtgtgtctgacagtgtgagatgttagaccgagagaaaagcaaacaaataaatcacttaatcttgaacactttgcactgtaaagagagtgaaagtcaaacccaccaagctgccttgctgaaagcatctccaaggttctgtaggctttgttcagaagcccctgatgtgtgtttgcagtccgtcattttatcaatgatacgcaaacataattagcatgtgtatgtactcacacactaattacatgtaagaatatattatctaggaatatgtcatttgtaactttgtactctgacgtattttctagtctcaccctattagtaattctgtcaaaatcctagacgctagtagatattagtatttgagacaatatgtcagagtctgaataagactcagcttgttctagtcatgctgagtttctcatatattttttaaaagtgcttccgccatgaacctctttgagaaatgtcagtggcaaaatctcccaagctaattttctttttctatgttccatcttcaaattcagacagttcacgtgaagtaccccacatttattgatcttagggttgaatataaacgcaattaaaag

SEQ ID NO: 132056 - DNA, 633 bp, Homo sapiens
  Payload ID: 5778
  Gene Symbol: FAM149A
  Gene Name: family with sequence similarity 149, member A
  ENST ID: ENST00000512271
  CDS Start-End: 1-478
ttctcttgcttcagattcacagagactaaaaactcccaacatctatagtgacgaagttcttcggggaacaaaactgccgactggcgtggaccacatggcttccccactggttcaaacgtcacggagcaggttccccccgctagtcacggagaccagggggcagaatacagcagttcctggatgccgccttgtttcttacagaggaaggcatctacaaaaccgtgtgttgagtgccatgcctgacggtacagaacgatcgcgtcttcgagaaagaacagccaccctggaacggttgtcaaggcccagcacaacccacacgttccggtcggatacgcctcgaaaaagttcattgacacaaatggaatttgctgctcacacatggacaggtcaaagtattttgacaggttcacaatatgtgcctaaatcttttcagaggacaactttgactttcaagaggagattccaagtgacatcttgaaaccacctcaccagaaccattggagcacctgtggcctcggcacactgcttatcacttgaaaaatggaggaacaagtgttatatttatctgtgtgtctgacagtgtgagatgttagaccgagagaaaagcaaacaaataaatcacttaatcttgaa

SEQ ID NO: 132057 - DNA, 695 bp, Homo sapiens
  Payload ID: 5778
  Gene Symbol: FAM149A
  Gene Name:: family with sequence similarity 149, member A
  ENST ID: ENST00000510843
  CDS Start-End: 1-443
cttctcttgcttcagattcacagagactaaaaactcccaacatctatagtgacgaagttcttcggggaacaaaactgccgactggcgtggaccacatggcttccccactggttcaaacgtcacggagcaggttccccccgctagtcacggagaccagggggcagaatacagcagttcctggatgccgccttgtttcttacagaggaaggcatctacaaaaccgtgtgttgagtgccatgcctgacggtacagaacgatcgcgtcttcgagaaagaacagccaccctggaacggttgtcaaggcccagcacaacccacacgttccggcagtcggatacgcctcgaaaaagttcattgacacaaatggaatttgctgctcacacatggacaggtcaaagtattttgacaggagggaatagcaaatgtttggggcctgtggcctgacctcagaaacctcgatcacagagcacacctgcagagacttacttacctgctgtgaggtcaagaagaggggaatgtccaaaagctctcaatgaactgggggcctcactcaaaaaaaaaaaaaaaaaaaaatgctgtcttaggagcagtgagtacctctgtctgctatagcgttttcatgctctatttctaagtgaaactctactctcagattctctttgaaaatctgatgataaaaatgcttgagaaaattaa

SEQ ID NO: 132058 - DNA, 2070 bp, Homo sapiens
  Payload ID: 5778
  Gene Symbol: FAM149A
  Gene Name: family with sequence similarity 149, member A
  Uniprot ID: A5PLN7
  ENST ID: ENST00000514153
  CDS Start-End: 467-1915
gggcgcgggcgcgggcgcgggcgcgggcgcgggcgggtggggagccccagccccggggccgcgggggcgcgtgaccggctgtctgcgtggggcccgcgcgcggtgcctctgcctgacggtgcccgagcctagcgcggagcctggcgcgggggctgcgagcacaggcccggggctgatcgtaatcggaagaggactgtcagaaggacgtagaaggcacggttttactgtgaggagcaaagattctttacctacgcattttacaagaaatgtgcagaaagccattgataaatatacctgcggaagccatacacccacgggagcccacacctcttggtctgggtcggccacacagagctctaccaccggctcatccacggagaggggctccgtttattcctggagagatgacgaatttgacgaagccagttcacagtcagtgcagcggttactctgggaggtggaggaaatgttatttgaagggaaagtgaaccctcagacccagagtctgctggccgaatgcggggagtggacaagaagatccctccatttgagagtattaggaagacagctgatcctgcccactgacaaaggcgtccagcatttccagggcagcactcctgcctccgcagtccacagacccccgctcagtgcctgcggacacagcagcaacatcagagagttgtgcatttctggctctcaaatagtcccagcagcactctcagcctctgccctgccaggccctgatgacacaggggttgctgacctaacggcacgttcatccctggaagaagaggtttaccatgtggatggaaagattgaggagtatttcgcttttgacagaaaagaggatgatgatgaatgtcttgaacaaaaaccagctcagcccggtaggaaatggcgcaaactcggacttcctcctgtttccccgcgtgactgtgtcaaagatgccgtggcagcagaagtgtttgatcacgtctggacaaatatggtagaacttttggaagagctgattagaaaacactgggaaactacactcacagaagggaaaaaacagagagaaacattgaaagtggctggaaacagatttccgcacgtcctcgttccacacgctcacgccgatggagccagtggccccccgtccggacacgccgaggctcacggcatctccctggcttctcgtctgaacccgccccagattcatcacttctccagcagtttttatagtgacatgaatggtgtcatgacaattcaagcaaaaccgcttcagcggagacctgcctattttgctgacagaacgcagaatgagaaggaggacaaagcatcgggtggaggggcaggtgctctctcctccgcaccgcacagactgggacgggcctcagacactcatggattatcaccttctgcaaagaaaacaccagtgccctggaggctgccttctcttgcttcagattcacagagactaaaaactcccaacatctatagtgacgaagttcttcggggaacaaaactgccgactggcgtggaccacatggcttccccactggttcaaacgtcacggagcaggttccccccgctagtcacggagaccagggggcagaatacagcagttcctggatgccgccttgtttcttacagaggaaggcatctacaaaaccgtgtgttgagtgccatgcctgacggtacagaacgatcgcgtcttcgagaaagaacagccaccctggaacggttgtcaaggcccagcacaacccacacgttccggcagtcggatacgcctcgaaaaagttcattgacacaaatggaatttgctgctcacacatggacaggtcaaagtattttgacaggttcacaatatgtgcctaaatcttttcagaggacaactttgactttcaagaggagattccaagtgacatcttgaaaccacctcaccagaaccattggagcacctgtggcctcggcacactgcttatcacttgaaaaatggaggaacaagtgttatatttatctgtgtgtctgacagtgtgagatgttagaccgagagaaaagcaaacaaataaatcacttaatcttgaa

SEQ ID NO: 132059 - DNA, 2011 bp, Homo sapiens
  Payload ID: 5778
  Gene Symbol: FAM149A
  Gene Name: family with sequence similarity 149, member A
  Uniprot ID: A5PLN7
  ENST ID: ENST00000503432
  CDS Start-End: 410-1858
gctgctgtttcaagctcgttcgcccaaatacatctttctacccaccttccctatcgtcagagaggtggcctgaccccagcacgtgcaagcttgtcaggctggaagaggactgtcagaaggacgtagaaggcacggttttactgtgaggagcaaagattctttacctacgcattttacaagaaatgtgcagaaagccattgataaatatacctgcaaatccttgtcatccttttcctccagcggaagccatacacccacgggagcccacacctcttggtctgggtcggccacacagagctctaccaccggctcatccacggagaggggctccgtttattcctggagagatgacgaatttgacgaagccagttcacagtcagtgcagcggttactctgggaggtggaggaaatgttatttgaagggaaagtgaaccctcagacccagagtctgctggccgaatgcggggagtggacaagaagatccctccatttgagagtattaggaagacagctgatcctgcccactgacaaaggcgtccagcatttccagggcagcactcctgcctccgcagtccacagacccccgctcagtgcctgcggacacagcagcaacatcagagagttgtgcatttctggctctcaaatagtcccagcagcactctcagcctctgccctgccaggccctgatgacacaggggttgctgacctaacggcacgttcatccctggaagaagaggtttaccatgtggatggaaagattgaggagtatttcgcttttgacagaaaagaggatgatgatgaatgtcttgaacaaaaaccagctcagcccggtaggaaatggcgcaaactcggacttcctcctgtttccccgcgtgactgtgtcaaagatgccgtggcagcagaagtgtttgatcacgtctggacaaatatggtagaacttttggaagagctgattagaaaacactgggaaactacactcacagaagggaaaaaacagagagaaacattgaaagtggctggaaacagatttccgcacgtcctcgttccacacgctcacgccgatggagccagtggccccccgtccggacacgccgaggctcacggcatctccctggcttctcgtctgaacccgccccagattcatcacttctccagcagtttttatagtgacatgaatggtgtcatgacaattcaagcaaaaccgcttcagcggagacctgcctattttgctgacagaacgcagaatgagaaggaggacaaagcatcgggtggaggggcaggtgctctctcctccgcaccgcacagactgggacgggcctcagacactcatggattatcaccttctgcaaagaaaacaccagtgccctggaggctgccttctcttgcttcagattcacagagactaaaaactcccaacatctatagtgacgaagttcttcggggaacaaaactgccgactggcgtggaccacatggcttccccactggttcaaacgtcacggagcaggttccccccgctagtcacggagaccagggggcagaatacagcagttcctggatgccgccttgtttcttacagaggaaggcatctacaaaaccgtgtgttgagtgccatgcctgacggtacagaacgatcgcgtcttcgagaaagaacagccaccctggaacggttgtcaaggcccagcacaacccacacgttccggcagtcggatacgcctcgaaaaagttcattgacacaaatggaatttgctgctcacacatggacaggtcaaagtattttgacaggttcacaatatgtgcctaaatcttttcagaggacaactttgactttcaagaggagattccaagtgacatcttgaaaccacctcaccagaaccattggagcacctgtggcctcggcacactgcttatcacttgaaaaatggaggaacaagtgttatatttatctgtgtgtctgacagtgtgagatgttagaccgagagaaaagcaaacaaataaatcacttaatcttg

SEQ ID NO: 132060 - DNA, 1990 bp, Homo sapiens
  Payload ID: 5778
  Gene Symbol: FAM149A
  Gene Name: family with sequence similarity 149, member A
  Uniprot ID: A5PLN7
  ENST ID: ENST00000502970
  CDS Start-End: 419-1867
gggcgtgcgagccccgcggaccccgggcgcgcccgggccgcctgagctgggccagccgcgcggcgggcgcgggcgcgggcgcgggcgcgggcgcgggcgggtggggagccccagccccggggccgcgggggcgcgtgaccggctgtctgcgtggggcccgcgcgcggtgcctctgcctgacggtgcccgagcctagcgcggagcctggcgcgggggctgcgagcacaggcccggggctgatcgtaatcggaagaggactgtcagaaggacgtagaaggcacggttttactgtgaggagcaaagattctttacctacgcattttacaagaaatgtgcagaaagccattgataaatatacctggaatttgacgaagccagttcacagtcagtgcagcggttactctgggaggtggaggaaatgttatttgaagggaaagtgaaccctcagacccagagtctgctggccgaatgcggggagtggacaagaagatccctccatttgagagtattaggaagacagctgatcctgcccactgacaaaggcgtccagcatttccagggcagcactcctgcctccgcagtccacagacccccgctcagtgcctgcggacacagcagcaacatcagagagttgtgcatttctggctctcaaatagtcccagcagcactctcagcctctgccctgccaggccctgatgacacaggggttgctgacctaacggcacgttcatccctggaagaagaggtttaccatgtggatggaaagattgaggagtatttcgcttttgacagaaaagaggatgatgatgaatgtcttgaacaaaaaccagctcagcccggtaggaaatggcgcaaactcggacttcctcctgtttccccgcgtgactgtgtcaaagatgccgtggcagcagaagtgtttgatcacgtctggacaaatatggtagaacttttggaagagctgattagaaaacactgggaaactacactcacagaagggaaaaaacagagagaaacattgaaagtggctggaaacagatttccgcacgtcctcgttccacacgctcacgccgatggagccagtggccccccgtccggacacgccgaggctcacggcatctccctggcttctcgtctgaacccgccccagattcatcacttctccagcagtttttatagtgacatgaatggtgtcatgacaattcaagcaaaaccgcttcagcggagacctgcctattttgctgacagaacgcagaatgagaaggaggacaaagcatcgggtggaggggcaggtgctctctcctccgcaccgcacagactgggacgggcctcagacactcatggattatcaccttctgcaaagaaaacaccagtgccctggaggctgccttctcttgcttcagattcacagagactaaaaactcccaacatctatagtgacgaagttcttcggggaacaaaactgccgactggcgtggaccacatggcttccccactggttcaaacgtcacggagcaggttccccccgctagtcacggagaccagggggcagaatacagcagttcctggatgccgccttgtttcttacagaggaaggcatctacaaaaccgtgtgttgagtgccatgcctgacggtacagaacgatcgcgtcttcgagaaagaacagccaccctggaacggttgtcaaggcccagcacaacccacacgttccggcagtcggatacgcctcgaaaaagttcattgacacaaatggaatttgctgctcacacatggacaggtcaaagtattttgacaggttcacaatatgtgcctaaatcttttcagaggacaactttgactttcaagaggagattccaagtgacatcttgaaaccacctcaccagaaccattggagcacctgtggcctcggcacactgcttatcacttgaaaaatggaggaacaagtgttatatttatctgtgtgtctgacagtgtgagatgttagaccgagag

SEQ ID NO: 132061 - DNA, 5408 bp, Homo sapiens
  Payload ID: 5779
  Gene Symbol: FAM149B1
  Gene Name: family with sequence similarity 149, member B1
  Uniprot ID: Q96BN6
  ENST ID: ENST00000242505
  CDS Start-End: 175-1923
ggggaccctggggaggtggctgctcggagtctaggtgacggggcgagacggggccggtaggtggcgggaggggccgggccggagccggcgggagggccaggcccggaggcccccaccctggcgtgcctgccccggccgcggctgaggaggaggaggaggaggaggaggaggaggatgatctccagatacactcggaaggcggtgccacagagcttggagctgaaaggaataacaaaacatgctcttaaccatcatccccctccagagaagctggaggaaatttcccccaccagtgacagtcatgagaaagacacaagttcccaaagcaagtctgacatcacaagagaatcatcttttacatcagccgacactgggaattcactgtctgcttttccaagttatacaggcgcagggatatctactgaaggaagctcggacttctcctggggatatggtgaactcgatcaaaatgccactgaaaaagtccagacaatgttcacagccattgatgaactcttgtatgagcagaagttgagtgtgcataccaagagtctacaagaagagtgccaacagtggacagctagctttcctcacctcaggattctaggtaggcagataatcactccaagtgaaggttatagattgtatcctagatccccttctgctgtttccgcttcatatgaaacaaccttgtctcaagaaagagattctactatatttggtataaggggaaagaagttacatttttcatcttcttatgctcataaagcatcttccattgccaaatcctccagcttttgttctatggaaagagatgaggaagactctataatcgtctcagaaggaataattgaggaatacctagcattcgatcacatagatatagaagagggatttcatgggaagaaatcagaagcagctacagagaaacagaaattagggtatcctcccattgctccattttactgcatgaaagaagatgtccttgcttatgtgtttgacagtgtatggtgcaaggttgtgagctgtatggagcagttgacacgtagtcactgggaaggatttgcctctgatgatgagagtaatgttgcagttaccagacccgattcagaaagttcctgtgtgctgagtgaactacatcctttggtgttaccgcgagtgccacagtctaaggtgctgtacattacctcaaatccgatgagtctctgtcaagcaagcagacatcagccaaatgtgaatgatctcttggttcatggaatgcctctacagccaagaaatctctccctaatggacaagctcctagatcttgatgacaagctacttatgaggcctgggtccagtaccatcctttcaactcgaaattggccaaatcgagctgtggagtttagtacatcatctctgtcatacacagtgcagtccaccaggagacgcaatccaccaccacgaactcttcatccgatcagcacgagccattcatgtgctgaaacaccaagatctgtggaagaaatcctcagaggagcccgagtcccagtggcacccgactcgctctcctctccctcaccgacgcccctgagtcgaaataatctgctaccacctattggcacagctgaagtggaacatgtgagcactgtggggccacaaagacagatgaaaccccatggcgactctagtcgagctcaaagtgcggtggtggatgaacctaactatcagcagccacaagaaaggctccttttgcccgactttttccccaggcccaacacaactcaatcatttttgctggatacacagtatcgtcgctcatgtgcagttgagtatcctcatcaggcccgacctggcaggggatctgcaggtcctcagttacatgggtctacaaaatctcaaagcggaggcagaccagtctctcgaaccaggcagggaccataaggcaaatgagaagaatctatcaggctgcaggaaacacgagatttcatgaagcagtattcagtcatcaagtgatgcagagcttgtatagaagatcgactagaaatcatcttcatgaagagtgattttggcacaagtgaccgaagaacaaaacaccatagcagccaaaaatgacatgagtgttgtttctatctccagttactgtctctttcagcagaaattaacctatcccattggaaaggcaagtttgtacccaaagatgcaacagtgaataatacccaaatcactgctcatgttatctcttaacaatgatcagttcaatcatataggatttgatgagctcacacatacacaaaaagcagcaaatcatcagtgacaatatcactggcttcagaatacttcagcctgtgttcatttctggagagttgtactcagttttaagtcattttgctgttgaaaatctgacctcatcaaatagatgtcattcctaaaactctctttagatgtcctaccctatcagcagattaaaatggaaggggtgtgtaactaaaaacataaatgttaagcattagtataaagtaacttctgtaataaattatatcgcatattttttcagataggacagctcaaccttacgatgcctacctgatgccaggtgatgcttattttcttcctaaagtaggttactggtcatatcttttttccaaatattaaatgcaccttgccagatattctcctgcagctctaaggaaaggaaatcaatttaaaaataatttgtagaatctactattgagccaccaaagtataattccctaaaagtttaagaaaccctggcaattaattcagcataaacatatcctataaacagcaggagaggttcagctttctgattttactgtggaccttttcctaagggcattcatgaatgcagcaacagttttaactatggcttacatttattttaaatttcactaaatacaaatcttgattgtcatgccagttttagatcttattaattttcagaatggataaattcaaataatcataaattacggtaactttttattataccaaggtgttctaatgccatcatatgaagacagatgcttcaaacaacctgcattaaattatatttttaataaaattaaaatctatttttaacctatttgtagtcacaaaccgaaaacgtgtcgtctttaccttagagctaaaggcttactttatgcatacggtatatttaatagtctacaaatcaaagatttaaacagtcccttaaaaattccatatattctcataccaactcatctacatagaaatgaaaatctctattgttctcacaaaccattaccatgagttcactataacaactggatcaatatggcttgcctttcaaagttaaagaatcagaaaggggcctgtaagaagtcatttagcccaattccctcaccctgtgtgttttccctcaaagccagtgcaatttttttttaaccaaaaaactggacatgtttaatacatacagtttgacaaatttggatttcactctttgttttgatgtagtaactcttttataaaagggaacagattcagacaagctcagtggcccaactgaagacattcagcaattaatggcaggacttcagtaatcagtggcaggactacaacatacatctcttcatgctagggaaaccaggctctctattataaagctgaccagggctattgttttccccttttctctcatcctaaacaccattcatatttttcctaggtcacattttagtgggatcatttacaaagcccccagaacttaatcatcatgttttaccttttttattgaattatatacacctcttacaaaaatgcttgaagtaatttaacacctgtacatcagtacaaaacctggctgagtaaaatgaagagaggatctattcaagatcattaagaccaaatgtaaactgggaagtatgtggaagatagctgtccagcaagtgtctggaaggtgttctagctgggtagagagcctattctaacagacacgcacatcgcagaaagcagcatgaacagaaccacatcctagataagagttctgtgtacagaagatccatggaggcaagtgctgtcaggaaggacactgcctccctccaccctcccaaatgtcaccaccaagttccttcaggtgagacctcacacaatgtcaagtgctttctaggaaatactaagatcaggttgagagattctgcttggtctagtcaatctgaaaaattcaggctggaaagacaccttttctcaagagctgaattgacttttgccttcaaatcctgcctgcaccttgcctacgatggcatcaatttacacctaaggacctttgaagagaaaaattccattatttcttttctttcttgagagcagattttttccctcctcctttggaagatttgcagtactttgcttccatctgagccagaaaattgtccatttccttttgccgatccttttgtctgctctgtttgagaagttaaaacacaagctttcacaacattatccatagacagaaagtacctagtggttgccaggggctggaaaagtggaataactactaatgggtatggagtttttttggaatggtgaaaatgtcctacaattggtgttaataattgtaaaactttgtaaatacacttaaaaccaccaaattgtacactttaaaaggacaaatagaaggtatgcggttatgtcttaaaagaagaaaacaaaatacaacattccaaagaaaatattagcagtaggaatcagatcattaaagatgtggcaacaaactgccaagtttacctgaatggctgccttcaggctatccacgccttcatcaagccccaactcctttctgctcatttctgcttctttggcctcttcctgagcctgaaacaggaactcacatgagactcagggccaccaggaaatgcttaaaatacatactctttcccaaaagcaaatctataattctgtttcaattttatgaatatatgaatagacaaaatgaatcgaattacataactatgtcattcattaaatggcaacaatgctgacagcaagcagtagatcctctgattccaattaccatttgttttttacccaattctatttgctagaggtagtaagtactctggcactcataaatcacatgatgataaaaaggaacatgaggccgggtatggtggctcacaactgtaatccccataccttgggaggccaaggtgggaggatcacttgaactcaggagttcaagacctgcctgggtaacatagtgagacctcagttctataaaaaagaaaagaaatgagcctggtgtggtggcatgtgcttgtagtcccagctactagggaggctgaggtgggaagatggcttcagtctgagagttcaggctgcaataagctgtgatcatgcctctgcactccagcctgggtgatggagatgccatctcttagaaaaaagag

SEQ ID NO: 132062 - DNA, 1534 bp, Homo sapiens
  Payload ID: 5779
  Gene Symbol: FAM149B1
  Gene Name: family with sequence similarity 149, member B1
  ENST ID: ENST00000372955
  CDS Start-End: 1-1409
cttttacatcagccgacactgggaattcactgtctgcttttccaagttatacaggcgcagggatatctactgaaggaagctcggacttctcctggggatatggtgaactcgatcaaaatgccactgaaaaagtccagacaatgttcacagccattgatgaactcttgtatgagcagaagttgagtgtgcataccaagagtctacaagaagagtgccaacagtggacagctagctttcctcacctcaggattctaggtaggcagataatcactccaagtgaaggttatagattgtatcctagatccccttctgctgtttccgcttcatatgaaacaaccttgtctcaagaaagagattctactatatttggtataaggggaaagaagttacatttttcatcttcttatgctcataaagcatcttccattgccaaatcctccagcttttgttctatggaaagagatgaggaagactctataatcgtctcagaaggaataattgaggaatacctagcattcgatcacatagatatagaagagggatttcatgggaagaaatcagaagcagctacagagaaacagaaattagggtatcctcccattgctccattttactgcatgaaagaagatgtccttgcttatgtgtttgacagtgtatggtgcaaggttgtgagctgtatggagcagttgacacgtagtcactgggaaggatttgcctctgatgatgagagtaatgttgcagttaccagacccgattcagaaagttcctgtgtgctgagtgaactacatcctttggtgttaccgcgagtgccacagtctaagatgagtctctgtcaagcaagcagacatcagccaaatgtgaatgatctcttggttcatggaatgcctctacagccaagaaatctctccctaatggacaagctcctagatcttgatgacaagctacttatgaggcctgggtccagtaccatcctttcaactcgaaattggccaaatcgagctgtggagtttagtacatcatctctgtcatacacagtgcagtccaccaggagacgcaatccaccaccacgaactcttcatccgatcagcacgagccattcatgtgctgaaacaccaagatctgtggaagaaatcctcagaggagcccgagtcccagtggcacccgactcgctctcctctccctcaccgacgcccctgagtcgaaataatctgctaccacctattggcacagctgaagtggaacatgtgagcactgtggggccacaaagacagatgaaaccccatggcgactctagtcgagctcaaagtgcggtggtggatgaacctaactatcagcagccacaagaaaggctccttttgcccgactttttccccaggcccaacacaactcaatcatttttggtagagtgacgtacttcctagaatggtcttgatagttggggaaagaaaaggtggggggaataatagtttggcagacttaagattttatctagaggcttaacccagaataaaagttgagtttccaacaataaaaa

SEQ ID NO: 132063 - DNA, 2169 bp, Homo sapiens
  Payload ID: 5779
  Gene Symbol: FAM149B1
  Gene Name: family with sequence similarity 149, member B1
  ENST ID: ENST00000445951
  CDS Start-End: 1-1008
tccagcttttgttctatggaaagagatgaggaagactctataatcgtctcagaaggaataattgaggaatacctagcattcgatcacatagatatagaagagggatttcatgggaagaaatcagaagcagctacagagaaacagaaattagggtatcctcccattgctccattttactgcatgaaagaagatgtccttgcttatgtgtttgacagtgtatggtgcaaggttgtgagctgtatggagcagttgacacgtagtcactgggaaggatttgcctctgatgatgagagtaatgttgcagttaccagacccgattcagaaagttcctgtgtgctgagtgaactacatcctttggtgttaccgcgagtgccacagtctaaggtgctgtacattacctcaaatccgatgagtctctgtcaagcaagcagacatcagccaaatgtgaatgatctcttggttcatggaatgcctctacagccaagaaatctctccctaatggacaagctcctagatcttgatgacaagctacttatgaggcctgggtccagtaccatcctttcaactcgaaattggccaaatcgagctgtggagtttagtacatcatctctgtcatacacagtgcagtccaccaggagacgcaatccaccaccacgaactcttcatccgatcagcacgagccattcatgtgctgaaacaccaagatctgtggaagaaatcctcagaggagcccgagtcccagtggcacccgactcgctctcctctccctcaccgacgcccctgagtcgaaataatctgctaccacctattggcacagctgaagtggaacatgtgagcactgtggggccacaaagacagatgctggatacacagtatcgtcgctcatgtgcagttgagtatcctcatcaggcccgacctggcaggggatctgcaggtcctcagttacatgggtctacaaaatctcaaagcggaggcagaccagtctctcgaaccaggcagggaccataaggcaaatgagaagaatctatcaggctgcaggaaacacgagatttcatgaagcagtattcagtcatcaagtgatgcagagcttgtatagaagatcgactagaaatcatcttcatgaagagtgattttggcacaagtgaccgaagaacaaaacaccatagcagccaaaaatgacatgagtgttgtttctatctccagttactgtctctttcagcagaaattaacctatcccattggaaaggcaagtttgtacccaaagatgcaacagtgaataatacccaaatcactgctcatgttatctcttaacaatgatcagttcaatcatataggatttgatgagctcacacatacacaaaaagcagcaaatcatcagtgacaatatcactggcttcagaatacttcagcctgtgttcatttctggagagttgtactcagttttaagtcattttgctgttgaaaatctgacctcatcaaatagatgtcattcctaaaactctctttagatgtcctaccctatcagcagattaaaatggaaggggtgtgtaactaaaaacataaatgttaagcattagtataaagtaacttctgtaataaattatatcgcatattttttcagataggacagctcaaccttacgatgcctacctgatgccaggtgatgcttattttcttcctaaagtaggttactggtcatatcttttttccaaatattaaatgcaccttgccagatattctcctgcagctctaaggaaaggaaatcaatttaaaaataatttgtagaatctactattgagccaccaaagtataattccctaaaagtttaagaaaccctggcaattaattcagcataaacatatcctataaacagcaggagaggttcagctttctgattttactgtggaccttttcctaagggcattcatgaatgcagcaacagttttaactatggcttacatttattttaaatttcactaaatacaaatcttgattgtcatgccagttttagatcttattaattttcagaatggataaattcaaataatcataaattacggtaactttttattataccaaggtgttctaatgccatcatatgaagacagatgcttcaaacaacctgcattaaattatatttttaataaaattaaaatctatttttaacct

SEQ ID NO: 132064 - DNA, 1044 bp, Homo sapiens
  Payload ID: 5779
  Gene Symbol: FAM149B1
  Gene Name: family with sequence similarity 149, member B1
  ENST ID: ENST00000475829
  CDS Start-End: 1-630
gggaagaaatcagaagcagctacagagaaacagaaattagggtatcctcccattgctccattttactgcatgaaagaagatgtccttgcttatgtgtttgacagtgtatggtgcaaggttgtgagctgtatggagcagttgacacgtagtcactgggaaggatttgcctctgatgatgagagtaatgttgcagttaccagacccgattcagaaagttcctgtgtgctgagtgaactacatcctttggtgttaccgcgagtgccacagtctaaggtgctgtacattacctcaaatccgatgagtctctgtcaagcaagcagacatcagccaaatgtgaatgatctcttggttcatggaatgcctctacagccaagaaatctctccctaatggacaagctcctagatcttgatgacaagctacttatgaggcctgggtccagtaccatcctttcaactcgaaattggccaaatcgagctgtggagtttagtacatcatctctgtcatacacagtgcagtccaccaggagacgcaatccaccaccacgaactcttcatccgatcagcacgagccattcatgtgctgaaacaccaagatctgtggaagaaatcctcagaggagcccgagtgtaggtttcaaaagcagaacttctggaaaccgtgcccagtggcacccgactcgctctcctctccctcaccgacgcccctgagtcgaaataatctgctaccacctattggcacagctgaagtggaacatgtgagcactgtggggccacaaagacagatgaaaccccatggcgactctagtcgagctcaaagtgcggtggtggatgaacctaactatcagcagccacaagaaaggctccttttgcccgactttttccccaggcccaacacaactcaatcatttttggtagagtgacgtacttcctagaatggtcttgatagttggggaaagaaaaggtggggggaataatagtttggcagacttaagattttatctagaggcttaacccagaataaaagttgagtttccaacaataaaaa

SEQ ID NO: 132065 - DNA, 1217 bp, Homo sapiens
  Payload ID: 5780
  Gene Symbol: FAM150A
  Gene Name: family with sequence similarity 150, member A
  Uniprot ID: Q6UXT8
  ENST ID: ENST00000358543
  CDS Start-End: 252-641
tggccccaggcaccgcctcccgttcccgccccgcgccccgcagcgcttaggcttcggcacactgaggaccgagtcccagtgcagctccagccgacccccgggacgtagacaagggcaggcgcgcggtgaagactgcggccggccgcgtagccgcgctgtggtcccgctggccttctcttgggccgcgcaccctccggacctgcgtcgggatcctcccggagtctcccgctctctcctcccggcttgcgaacatgcggccccttaagcccggcgcccctttgcccgcactcttcctgctggcgctggctttgtccccgcacggagcccacgggaggccccgggggcgcaggggagcgcgcgtcacggataaggagcccaagccgttgcttttcctccccgcggccggggccggccggactcccagcggctcccggagcgcagaaatattcccaagagactctaacttaaaagacaaattcataaagcatttcacagggccggtcacattttcaccagaatgcagcaaacatttccaccgactctattacaataccagggagtgctcaacgccagcttattacaaaagatgtgctagattgttaacaagattagcagtgagtccactgtgctcccagacctagcaaaactaccctacatttcctaagaatgtacatctaatttgaagaaaaagtgcctcaaatcatgcaaaatgtaaaaaaagatgaaatttatatttttatggatattaagatgagtaaaataagagacttcccagaaataactggttagctgtttcctgtcatagaatggagtctttcttgctttatctttttgtgtatacagtaatttataattttgtaaaacagagtttgaatcgcatattgaaaattagatattaaaaattgtgtgattgtattttatttttactagatatattattttctttatatggttaacattctaattaaacatttaattgtgtaaattatatctgtgagtgccagtgagaaataatgatttttttgtatatgactgttagtatatatttgtcaaatcatcgtgtaccaagttaaattttataattcttatttaatatttaaatacatttatttagaacttgttgtcttcacttgcattaatttgaactgtgaattttattaaagttgaaatatgaaaaaatgtgttgtttcctttgaattaaagatgtttgtaataga

SEQ ID NO: 132066 - DNA, 536 bp, Homo sapiens
  Payload ID: 5780
  Gene Symbol: FAM150A
  Gene Name: family with sequence similarity 150, member A
  Uniprot ID: Q6UXT8
  ENST ID: ENST00000523939
  CDS Start-End: 153-488
gggacgtagacaagggcaggcgcgcggtgaagactgcggccggccgcgtagccgcgctgtggtcccgctggccttctcttgggccgcgcaccctccggacctgcgtcgggatcctcccggagtctcccgctctctcctcccggcttgcgaacatgcggccccttaagcccggcgcccctttgcccgcactcttcctgctggcgctggctttgtccccgcacggagcccacgggaggccccgggggcgcaggggagcgcgcgtcacggataaggagcccaagccgttgcttttcctccccgcggccggggccggccggactcccagcggctcccggagcgcagaaatattcccaagagactctaacttaaaagacaaattcataaagcatttcacagggccggtcacattttcaccagaatgcagcaaacatttccaccgactctattacaataccagggagtgctcaacgccagcttacatttcctaagaatgtacatctaatttgaagaaaaagtgcctcaaatcatgcaaaatg

SEQ ID NO: 132067 - DNA, 449 bp, Homo sapiens
  Payload ID: 5781
  Gene Symbol: FAM150B
  Gene Name: family with sequence similarity 150, member B
  ENST ID: ENST00000344414
  CDS Start-End: 74-253
gaagtttgcttggcagagtctttccctgggattcttaccctacaaaccagaaattgttcctcgagatctgaggatgaaggacaagtttctaaaacaccttacaggccctctttattttagtccaaagtgcagcaaacacttccatagactttatcacaacaccagagactgcaccattcctgcatactataaaagatgcgccaggcttcttacccggctggctgtcagtccagtgtgcatggaggataagtgagcagaccgtacaggagcagcacaccaggagccatgagaagtgccttggaaaccaacagggaaacagaactatctttatacacatcccctcatggacaagagatttatttttgcagacagactcttccataagtcctttgagttttgtatgttgttgacagtttgcagatatatattcgataaatcagtgtacttga

SEQ ID NO: 132068 - DNA, 1389 bp, Homo sapiens
  Payload ID: 5781
  Gene Symbol: FAM150B
  Gene Name: family with sequence similarity 150, member B
  Uniprot ID: Q6UX46
  ENST ID: ENST00000403610
  CDS Start-End: 342-800
cgcgggagcgcggcccctccgaggtccgcccgcggccggggagctgcctggcacccgcggcttccaaaggggaaagaaagttgcgcccgcgccaggcgcagcgcgctcggcggacgcggcctttcgggcgaaagttaggaggggccgggctggcgggcgggcgggttccgggggctcctttccgcaccagcggcggtcgctccccgtgggcgggacctcgggcgtgatcgtcgaggagaccgcggctccctcacctgccggcttgttcctcggggtccgcggagcgagcccagctctcggcgcgtgtcggagtctcccagccccgcggccccgagcgcacgatgcgcggacccgggcaccccctcctcctggggctgctgctggtgctgggggcggcggggcgcggccgggggggcgcggagccccgggagccggcggacggacaggcgctgctgcggctggtggtggaactcgtccaggagctgcggaagcaccactcggcggagcacaagggcctgcagctcctcgggcgggactgcgccctgggccgcgcggaggcggcggggctggggccttcgccggagcagcgagtggaaattgttcctcgagatctgaggatgaaggacaagtttctaaaacaccttacaggccctctttattttagtccaaagtgcagcaaacacttccatagactttatcacaacaccagagactgcaccattcctgcatactataaaagatgcgccaggcttcttacccggctggctgtcagtccagtgtgcatggaggataagcagtgagcagaccgtacaggagcagcacaccaggagccatgagaagtgccttggaaaccaacagggaaacagaactatctttatacacatcccctcatggacaagagatttatttttgcagacagactcttccataagtcctttgagttttgtatgttgttgacagtttgcagatatatattcgataaatcagtgtacttgacagtgttatctgtcacttatttaaaaaaaaaacacaaaaggaatgctccacatttgacgtgtagtgctataaaacacagaatatttcattgtcttcattaggtgaaatcgcaaaaaatatttctttagaaacataagcagaatcttaaagtatattttcatataacataatttgatattctgtattactttcactgttaaattctcagagtattatttggaacggcatgaaaaattaaaatttcggtcatgttttagagacagtggagtgtaaatctgtggctaattctgttggtcgtttgtattataaatgtaaaatagtattccagctattgtgcaatatgtaaatagtgtaaataaacacaagtaataaatgaagtgtttgttataatga

SEQ ID NO: 132069 - DNA, 526 bp, Homo sapiens
  Payload ID: 5781
  Gene Symbol: FAM150B
  Gene Name: family with sequence similarity 150, member B
  ENST ID: ENST00000401489
  CDS Start-End: 1-308
agcaccactcggcggagcacaagggcctgcagctcctcgggcgggactgcgccctgggccgcgcggaggcggcggggctggggccttcgccggagcagcgagtggaaattgttcctcgagatctgaggatgaaggacaagtttctaaaacaccttacaggccctctttattttagtccaaagtgcagcaaacacttccatagactttatcacaacaccagagactgcaccattcctgcatactataaaagatgcgccaggcttcttacccggctggctgtcagtccagtgtgcatggaggataagtgagcagaccgtacaggagcagcacaccaggagccatgagaagtgccttggaaaccaacagggaaacagaactatctttatacacatcccctcatggacaagagatttatttttgcagacagactcttccataagtcctttgagttttgtatgttgttgacagtttgcagatatatattcgataaatcagtgtacttgacagtgttatctgtcacttattt

SEQ ID NO: 132070 - DNA, 748 bp, Homo sapiens
  Payload ID: 5781
  Gene Symbol: FAM150B
  Gene Name: family with sequence similarity 150, member B
  ENST ID: ENST00000401503
  CDS Start-End: 185-367
ctttggaaatggaagcatttccagcaaagctttcccaactgaaaaggaagcatccaggctccttcatggccctgcccagagtggtggcccacggggaatttcccaggaaagcatgaaagcgtctaatgcttttgtgacacaatcaggtcaaacatgataagaaattgttcctcgagatctgaggatgaaggacaagtttctaaaacaccttacaggccctctttattttagtccaaagtgcagcaaacacttccatagactttatcacaacaccagagactgcaccattcctgcatactataaaagatgcgccaggcttcttacccggctggctgtcagtccagtgtgcatggaggataagcagtgagcagaccgtacaggagcagcacaccaggagccatgagaagtgccttggaaaccaacagggaaacagaactatctttatacacatcccctcatggacaagagatttatttttgcagacagactcttccataagtcctttgagttttgtatgttgttgacagtttgcagatatatattcgataaatcagtgtacttgacagtgttatctgtcacttatttaaaaaaaaaacacaaaaggaatgctccacatttgacgtgtagtgctataaaacacagaatatttcattgtcttcattaggtgaaatcgcaaaaaatatttctttagaaacataagcagaatcttaaagtatattttcatataacataatttgatattctgtat

SEQ ID NO: 132071 - DNA, 558 bp, Homo sapiens
  Payload ID: 5781
  Gene Symbol: FAM150B
  Gene Name: family with sequence similarity 150, member B
  ENST ID: ENST00000405290
  CDS Start-End: 161-340
caaagctttcccaactgaaaaggaagcatccaggctccttcatggccctgcccagagtggtggcccacggggaatttcccaggaaagcatgaaagcgtctaatgcttttgtgacacaatcaggtcaaacatgataagaaattgttcctcgagatctgaggatgaaggacaagtttctaaaacaccttacaggccctctttattttagtccaaagtgcagcaaacacttccatagactttatcacaacaccagagactgcaccattcctgcatactataaaagatgcgccaggcttcttacccggctggctgtcagtccagtgtgcatggaggataagtgagcagaccgtacaggagcagcacaccaggagccatgagaagtgccttggaaaccaacagggaaacagaactatctttatacacatcccctcatggacaagagatttatttttgcagacagactcttccataagtcctttgagttttgtatgttgttgacagtttgcagatatatattcgataaatcagtgtacttgacagtgttatctgtcacttattt

SEQ ID NO: 132072 - DNA, 809 bp, Homo sapiens
  Payload ID: 5781
  Gene Symbol: FAM150B
  Gene Name: family with sequence similarity 150, member B
  ENST ID: ENST00000452023
  CDS Start-End: 357-809
ggcggggggactgacgaagatccgcatgggggtactaacacttcagcggcttctaattaaagccccgctcggagcccttggggacccgcctgacgtcggcgggcgcggggataagaagctccccgaggtctgaggcgggactcggagccggcgcaccccaggtcggccgtgggtccagcgctcggagcggccgagtccccgcgtcccgtgcgctccgcccgccgggcatggagtagtggcgcagctcggggcgcggggacagacgtgcgcacagacggcgacgactccggcggctccagcgagcccagctctcggcgcgtgtcggagtctcccagccccgcggccccgagcgcacgatgcgcggacccgggcaccccctcctcctggggctgctgctggtgctgggggcggcggggcgcggccgggggggcgcggagccccgggagccggcggacggacaggcgctgctgcggctggtggtggaactcgtccaggagctgcggaagcaccactcggcggagcacaagggcctgcagctcctcgggcgggactgcgccctgggccgcgcggaggcggcggggctggggccttcgccggagcagcgagtggaaattgttcctcgagatctgaggatgaaggacaagtttctaaaacaccttacaggccctctttattttagtccaaagtgcagcaaacacttccatagactttatcacaacaccagagactgcaccattcctgcatactataaaagatgcgccaggcttcttacccggctggctgtcagtccagtgtgcatggaggataag

SEQ ID NO: 132073 - DNA, 496 bp, Homo sapiens
  Payload ID: 5781
  Gene Symbol: FAM150B
  Gene Name: family with sequence similarity 150, member B
  Uniprot ID: Q6UX46
  ENST ID: ENST00000619265
  CDS Start-End: 3-278
cgatgcgcggacccgggcaccccctcctcctggggctgctgctggtgctggggccttcgccggagcagcgagtggaaattgttcctcgagatctgaggatgaaggacaagtttctaaaacaccttacaggccctctttattttagtccaaagtgcagcaaacacttccatagactttatcacaacaccagagactgcaccattcctgcatactataaaagatgcgccaggcttcttacccggctggctgtcagtccagtgtgcatggaggataagtgagcagaccgtacaggagcagcacaccaggagccatgagaagtgccttggaaaccaacagggaaacagaactatctttatacacatcccctcatggacaagagatttatttttgcagacagactcttccataagtcctttgagttttgtatgttgttgacagtttgcagatatatattcgataaatcagtgtacttgacagtgttatctgtcacttattt

SEQ ID NO: 132074 - DNA, 2005 bp, Homo sapiens
  Payload ID: 5782
  Gene Symbol: FAM151A
  Gene Name: family with sequence similarity 151, member A
  Uniprot ID: Q8WW52
  ENST ID: ENST00000302250
  CDS Start-End: 162-1919
gttatctccagaggggatattacagggctgcagagcagaccaggcccggtggagaattaggtgctgctgggagctcctgcctcccacaggattccagctgcagggagcctcagggactctgggccgcacggagttgggggcattccccagagagcgtcgccatggtctgcagggagcagttatcaaagaatcaggtcaagtgggtgtttgccggcattacctgtgtgtctgtggtggtcattgccgcaatagtccttgccatcaccctgcggcggccaggctgtgagctggaggcctgcagccctgatgccgacatgctggactacctgctgagcctgggccagatcagccggcgagatgccttggaggtcacctggtaccacgcagccaacagcaagaaagccatgacagctgccctgaacagcaacatcacagtcctggaggctgacgtcaatgtagaagggctcggcacagccaatgagacaggagttcccatcatggcacacccccccactatctacagtgacaacacactggagcagtggctggacgctgtgctgggctcttcccaaaagggcatcaaactggacttcaagaacatcaaggcagtgggcccctccctggacctcctgcggcagctgacagaggaaggcaaagtccggcggcccatatggatcaacgctgacatcttaaagggccccaacatgctcatctcaactgaggtcaatgccacacagttcctggccctggtccaggagaagtatcccaaggctaccctatctccaggctggaccaccttctacatgtccacgtccccaaacaggacgtacacccaagccatggtggagaagatgcacgagctggtgggaggagtgccccagagggtcaccttccctgtacggtcttccatggtgcgggctgcctggccccacttcagctggctgctgagccaatctgagaggtacagcctgacgctgtggcaggctgcctcggaccccatgtcggtggaagatctgctctacgtccgggataacactgctgtccaccaagtctactatgacatctttgagcctctcctgtcacagttcaagcagctggccttgaatgccacacggaaaccaatgtactacacgggaggcagcctgatccctcttctccagctgcctggggatgacggtctgaatgtggagtggctggttcctgacgtccagggcagcggtaaaacagcaacaatgaccctcccagacacagaaggcatgatcctgctgaacactggcctcgagggaactgtggctgaaaaccccgtgcccattgttcatactccaagtggcaacatcctgacgctggagtcctgcctgcagcagctggccacacatcccggacactggggcatccatttgcaaatagcggagcccgcagccctccggccatccctggccttgctggcacgcctctccagccttggcctcttgcattggcctgtgtgggttggggccaaaatctcccacgggagtttttcggtccccggccatgtggctggcagagagctgcttacagctgtggctgaggtcttcccccacgtgactgtggcaccaggctggcctgaggaggtgctgggcagtggctacagggaacagctgctcacagatatgctagagttgtgccaggggctctggcaacctgtgtccttccagatgcaggccatgctgctgggccacagcacagctggagccataggcaggctgctggcatcctccccccgggccaccgtcacagtggagcacaacccagctgggggcgactatgcctctgtgaggacagcattgctggcagctagggctgtggacaggacccgagtctactacaggctaccccagggctaccacaaggacttgctggctcatgttggtagaaactgagcacccaggggtggtgggccagcggacctcagggcggaggcttcccacggggaggcaggaagaaataaaggtctttggctttctcc

SEQ ID NO: 132075 - DNA, 1444 bp, Homo sapiens
  Payload ID: 5782
  Gene Symbol: FAM151A
  Gene Name: family with sequence similarity 151, member A
  Uniprot ID: Q8WW52
  ENST ID: ENST00000371304
  CDS Start-End: 162-1358
gttatctccagaggggatattacagggctgcagagcagaccaggcccggtggagaattaggtgctgctgggagctcctgcctcccacaggattccagctgcagggagcctcagggactctgggccgcacggagttgggggcattccccagagagcgtcgccatggtctgcagggagcagttatcaaagaatcaggtcaagtgggtgtttgccggcattacctgtgtgtctgtggtggtcattgccgcaatagtccttgccatcaccctgcggcggccaggctgtgagctggaggcctgcagccctgatgccgacatgctggactacctgctgagcctgggccagatcagccggcgagatgccttggaggtcacctggtaccacgcagccaacagcaagaaagccatgacagctgccctgaacagcaacatcacagtcctggaggctgacgtcaatgtagaagggctcggcacagccaatgagacaggagttcccatcatggcacacccccccactatctacagtgacaacacactggagcagtggctggacgctgtgctgggctcttcccaaaagggcatcaaactggacttcaagaacatcaaggcagtgggcccctccctggacctcctgcggcagctgacagaggaaggcaaagtccggcggcccatatggatcaacgctgacatcttaaagggccccaacatgctcatctcaactgaggtcaatgccacacagttcctggccctggtccaggagaagtatcccaaggctaccctatctccaggctggaccaccttctacatgtccacgtccccaaacaggacgtacacccaagccatggtggagaagatgcacgagctggtgggaggagtgccccagagggtcaccttccctgtacggtcttccatggtgcgggctgcctggccccacttcagctggctgctgagccaatctgagaggtacagcctgacgctgtggcaggctgcctcggaccccatgtcggtggaagatctgctctacgtccgggataacactgctgtccaccaagtctactatgacatctttgagcctctcctgctcacagatatgctagagttgtgccaggggctctggcaacctgtgtccttccagatgcaggccatgctgctgggccacagcacagctggagccataggcaggctgctggcatcctccccccgggccaccgtcacagtggagcacaacccagctgggggcgactatgcctctgtgaggacagcattgctggcagctagggctgtggacaggacccgagtctactacaggctaccccagggctaccacaaggacttgctggctcatgttggtagaaactgagcacccaggggtggtgggccagcggacctcagggcggaggcttcccacggggaggcaggaagaaataaaggtctttggctttctcc

SEQ ID NO: 132076 - DNA, 1717 bp, Homo sapiens
  Payload ID: 5783
  Gene Symbol: FAM151B
  Gene Name: family with sequence similarity 151, member B
  Uniprot ID: Q6UXP7
  ENST ID: ENST00000282226
  CDS Start-End: 156-986
gtgccgcggctccgtttggttccgcttcgctggcgcccgccgggctcttcccccgccgaggcctgtggtttgtggagtcgaatttccctgccaccagtgcccggttagcaggggcgccagcctgggcgcctgcgcggacggcgggcgtcgtcaccatggcagcatccgctggaggcccaggatcttggagtgaaaatatactggaatattttctgagaaatagccagattacagcagaagacggtgctgagatcacctggtatcatgcagctaaccacaaggcacaaacaaatgaggcactgaaaagtactgctcacatgatagaggctgatgtccttcttccaagtgatggatcagaacacagccagccaattatggcccatccccctgaaacaaacagtgataatactctacaggagtggctgactgaagttatgaaaagcaataaaggcatcaagctggatttcaaaagtctggcagttgtagaaccatccatgatgctcttggaaaatgtgaagaggcatctgaagcgtcctgtatggattaatgccgatattcttcctggtccaaatggaaatagcaaagtaatagatgcaaaaccatttttagacaccgtgatatccttctttccagacgtgacgttttccctgggttggacaacaggatggcatcctgagaaagtcaatgaagggtacagttggacaatggtgaaagagatggaatatatatgtaatgaactaagtcagcctgtaacgttccctgtcagagcagcattagtcaggcagtcttgttctcagttactttggctgttaaagaaatcaaacaggtacagcctgactatttggactggaaaaaatgataactattccgttgaagatttactttacattagagaccattttgacaaaaaacaagttttctatgacatcttggaaccacaaaaccatgaatttaaacaagccattggaatcaaagttaatctctaagaagaagattctcaattatttcctgtgttttggtttcataatccttctctccattggtctgaattaattaccatataaattatggttattgattgacgttccaagtcatctaatcaagaaacgtttattgtatgcttactctgtgggcatatgtccttataatagtgcacttacataaaagatttggaaagaagagatttatttacacacgtggcctagtctaataataattcaggaaaatgatactctgcaccccttcataaaaatagttttgataaactaaagatgattggcagaatccatatgtcataaaacaggtataaatcacatgtgcttggcacttgcattacagagattatgaaaaatatggtactcttttcctttttcctagaaaactggttattttagagataacaaaaaaggaagagggcttttaaaatgtttttaattttcacaggggtcagcagctgtctcatatcaagatctattaatccatttcctgaaactgtagattaaattagatagatctagaatttccatgtgattgagaagcatgctagtggctaagtgttttttttatatttcttatttctatagtatctgatttatagtggacaatatactgttggagagcagttttagtctttgttatgtatcatttgttttccaagtttcttactgccaccaccttcattcaggtccttgttctactagtaaaactttatgaacta

SEQ ID NO: 132077 - DNA, 508 bp, Homo sapiens
  Payload ID: 5783
  Gene Symbol: FAM151B
  Gene Name: family with sequence similarity 151, member B
  ENST ID: ENST00000502608
  CDS Start-End: 156-359
gtgccgcggctccgtttggttccgcttcgctggcgcccgccgggctcttcccccgccgaggcctgtggtttgtggagtcgaatttccctgccaccagtgcccggttagcaggggcgccagcctgggcgcctgcgcggacggcgggcgtcgtcaccatggcagcatccgctggaggcccaggatcttggagtgaaaatatactggaatattttctgagaaatagccagattacagcagaagacggtgctgagatcacctggtatcatgcagctaaccacaaggcacaaacaaatgaggcactgaaaaagacgagatttcaccgtgttggccagactggtctcgaactcctgacctcatgatccgcctgccttggcctcgcgaagtgctgggattacaggtgtgagccaccacgcccggccaagaactttacttttattaagatgagtggattggtcacgtgagatggcagtgacaaaaacttcagtttaaaatgccttatggatctgta

SEQ ID NO: 132078 - DNA, 4499 bp, Homo sapiens
  Payload ID: 5784
  Gene Symbol: FAM153A
  Gene Name: family with sequence similarity 153, member A
  Uniprot ID: Q9UHL3
  ENST ID: ENST00000360669
  CDS Start-End: 74-1006
taaaacttacaatccagattacgatgaggacctggtgcaggaagcttcatctgaagatgtcctgggcgttcatatggtggacaaagacacagagagagacattgagatgaaacggcaactacggcgactacgggagctccacctatacagcacatggaagaagtaccaagaggcgatgaagacatccttgggagttccacaatgtgagcgtgacgaaggctccttgggcaagccattgtgtccacccgagatactctcggagacgttgccaggctctgtgaagaaaagggtatgctttccatcagaagatcatctagaggagtttatagcagaacatctccctgaagcatccaatcagagtctcctcactgttgcccatgcagacgcaggcacccaaaccaacggtgacctggaagacctggaggagcatgggccagggcagacagtctctgaggaagccacagaagttcacacgatggagggggacccagacacactggccgaatttctgatcagggatgtacttcaggagctgtccagttacaacggtgaggaggaggacccagaggaggtgaagacatccttgggagttccacaacgtggtgacctggaagacctggaggagcatgtgccagggcagacagtctctgaggaagccacaggggttcacatgatgcaggtggacccagccacgctggcaaagagtgacctggaagacctggaggagcatgtgccagagcagacagtctctgaggaagccacaggggttcacatgatgcaggtggacccagccacactggcaaagcaattggaagactccaccattacaggcagccaccagcagatgtcagcaagtccttcctctgcacctgcagaagaagcaacagaaaagaccaaagtggaagaggaagtgaaaaccagaaagcccaagaagaaaaccaggaagcccagcaagaaaagccggtggaatgtcctgaaatgttgggacatttttaatatattttagagacctctgaagattcctcgaccaccaggaagggccccgacgtggggatgtcaacatggctcagacttgatgtggatcgtgatcatttcgggaaatgtgttactccaaaaacttttataatctttgcttaatttgtttttaaatactttcctggctgggcgtggtggcttatgcctgtaatcccagcactttgggaggccgaggcgggtggatcacctgaggtcaggagttcaagaccagcctggccaacaaggtgaaaccccgtctctactaaaaatacaaaaattagctaggcgtggtggcgcactcttgtagtcccagctatttgggaggctgaggcaggagaatcacttgaactcaggaggcggaggttgcggtgagccgagatcatgccactgcaccccagcacctggctacagagtgagactttgtctcaaaaaaaaaaaaaaaagaacaaaaaaattctgactttaacctctgtttttcagagggcacaaattgttcttgtattgtttccattttacatttttttcttgaagttattttccaattgttttcattctttctgaagttttgtttactcggttttaagtttttgtaattttgatagacttcttttgtgctttcattttcttaatgacttttacctcatttttaaaacaaatccatagtatggatgatattgatgatgaaatgtcttacgatgatcatttagaggtttatttcgaacaactggcaattccaggaatgatggaataaagcatacgaagtagaaggactggaacctccagaaaaagtactttaagttacctacaggtgatcctagtcaggtatgaattgataagaaatgcctgcaccttccctccttcctatctttcccttgcctacagaaaattaaaaggcaaaacaatggacatctacatattcttcattcagatcaaccagtggctagcatttgccaccttttgcagtttctttctctttccataagtactttcttctctgaatcatttgaaagcaaatgaaaacagtagcctaaagtgtcagtttcaacccgaaaataacagctctgatttctcatggctcacactcgtctgaaatgactcgggtagaggctgaggaaggctgtgttgtttgtctacctgggactacacctactgaaagaagttctcaagttctgattgagttctaaaattcttttgaagattggaattcttcatatggcaccatgggccggcactgccacgttttccaaggaacctgccagagctcctgcggaagctgctcctcgggcgatggagtccctttgctgctaggcccttcttcagtcaccacaggatgcctgccattcatgaacaggaaggagaggacgggctttgaataaaaaacaggatccaggaaatatttgtgaggccatttggacttcagtgtgaaatggtgttaaaagatgaagtcatttattcaagaagtaaacctctgccacctggactgtgctcagacatttcattgattttgtttaataaacattttctggctttgggaggtgtctctcttggtagagcacagtgtcaaagatggacaagatggacacatagtccattatttggtattgtttgtgtatgggagcggaccacaaattaatgtttggagaacaattttgtcataacacactgttgaggctcagttgtacagaactggaaaagtctttcagcttggcacatgtcctgattcagcctttgtttaacatacattccaatccggattctatcttcactggctacaaagaccacctgatacgtgcaccacgacacaggagctgctggagagggggtagtgttatcacctcaaacccacagccatatttttcaaaagccagcttagagagaggtgtactgatagctgcatagagaacatgcagtccatccattcttcccagtgatgtacatttctcaatcagtaaccacgtggtataccagccttgagtgtcacatctcccaaccataccaaatggatcacctaactggaggtggggggggcccctcagaaatgagatttcgtatttactgtaaaattgccttattttttcttttgaggtggagtctcactctgttgcctgggctggagtgcaatggtgtgatcactgctcactgcaacctccgcctcctgggttcaagcagttctcctgcctcagcctcccaagtagctgcaattacaggcgcatgccaccactcccagcaaatttttatatttttagtggagacagggtttcaccatgttggccaggctggtctcaaactcctgacctcaggtgatctgcccaccttggcctcccaaagttctgggattaaaggtacgagccaccgcaactggctgagaatctttttatttgctgatttgtctcttgtgtattttctttgttcagatgtctcttcagatctttttctcacttttaaattgtttttttaattgttaagaattttctgtctagtttagatataagccctttatcagacatgtgttttgcaaatattttctcctagtctgtggcttgtattctgtctcttaacagtcattttatttttacttttgaaactaaagaagaagaatggtcagctttccgttattcttgtaacagtaatggcagaaccaagtctgctaatgctacattgagcaaagaaagtcacctggtcaagtccaacattaatgaaatggggtagtacatgcaggcggcgttggggttggggagggaacaaatgcttcttgagagtaatataatctgccataccatccaggaacctacaatggctatctattaccttattctctggtttgtttaatgttcaaatctttcctaaagatccttcaacttttctggaagaatctaatctgataacaccatcaaaaacacattacttcttttggcataatttaaattgtaagacatcattcacatttatcaatgttacatatataagaactcacccaccatattcctccttgaggaattacagcatgtaattctataaccatttttataatcgtctaacaattttataatggattggctgctatcaattttttaaaagtcatggcttctccagtcatttcttgcttatcaaaattatttcatgagatgggtctatccttgtatatttgaaaatgaggtttgcttccttctacttaaaaaacaacttgaacatacctgtttggatcacatggtcttgtcctgataacttggaagaggttgcttcagcattattcttattgttgtggtggttattattaacattgtttcatattccgtttaaaaaattaaaattttacacaagaccaatgtcttcttttcaattccagtacagtcttcagaagtaactaatgctattggctttgtgcattataatttcagaccattgtatatgtctttagttatatgtacagtatacacacatatgtgtcatattattccattttttctagcattaaacattgctat

SEQ ID NO: 132079 - DNA, 1138 bp, Homo sapiens
  Payload ID: 5784
  Gene Symbol: FAM153A
  Gene Name: family with sequence similarity 153, member A
  ENST ID: ENST00000393518
  CDS Start-End: 454-798
aatgcgtatgcccgttacccttcaattccattatactaaaatacccttgggaaatagagatacatgcactttgtttttcacagcacttattttaaaaagaacccatagaatggatcttataagtaaatttcagttgcatccataggatgcaataatatgtgaccatcaaaggtgacaatagatatagaagtacgttgatgtgcgaagatgtattttgttttagccagcgaggaaaaaagaatcagtttgattacacatttaccaaacattaagaatttaatatggtaacttttatttcagtattaaaatagcaattttatttattacttttttatatacagaattcgacaccaaattttggaacttaaaaagaagattcttaaaacttacaatccagattacgatgaggacctggtgcaggaagcttcatctgaagatgtcctgggcgttcatatggtggacaaagacacagagagagacattgagatgaaacggcaactacggcgactacgggagctccacctatacagcacatggaagaagtaccaagaggcgatgaagacatccttgggagttccacaacgtggtgacctggaagacctggaggagcatgtgccagggcagacagtctctgaggaagccacaggggttcacatgatgcaggtggacccagccacactggcaaagcaattggaagactccaccattacaggcagccaccagcagatgtcagcaagtccttcctctgcacctgcagaagaagcaacagaaaagaccaaagtggaagaggaagtgtgagtgtgcagtgggcagaatgatgagggaagtgggcacgtgcccatgttcttcttggctacgctcactttcttgttgtcccatcaggaaaaccagaaagcccaagaagaaaaccaggaagcccagcaagaaaagccggtggaatgtcctgaaatgttgggacatttttaatatattttagagacctctgaaggcaagtgaaggatgccctgagaacatgctccaggaaacagacacccactccatagcagcccctgagcctgctgggctgagccctccacaggctgcttagtgagggagacactgaggtgctggtcgcacccccatgtgcaggactccaagg

SEQ ID NO: 132080 - DNA, 1966 bp, Homo sapiens
  Payload ID: 5784
  Gene Symbol: FAM153A
  Gene Name: family with sequence similarity 153, member A
  Uniprot ID: Q9UHL3
  ENST ID: ENST00000440605
  CDS Start-End: 285-1217
aggtgacaatagatatagaagtacgttgatgtgcgaagatgtattttgttttagccagcgaggaaaaaagaatcagtttgattacacatttaccaaacattaagaatttaatatggtaacttttatttcagtattaaaatagcaattttatttattacttttttatatacagaattcgacaccaaattttggaacttaaaaagaagattcttaaaacttacaatccagattacgatgaggacctggtgcaggaagcttcatctgaagatgtcctgggcgttcatatggtggacaaagacacagagagagacattgagatgaaacggcaactacggcgactacgggagctccacctatacagcacatggaagaagtaccaagaggcgatgaagacatccttgggagttccacaatgtgagcgtgacgaaggctccttgggcaagccattgtgtccacccgagatactctcggagacgttgccaggctctgtgaagaaaagggtatgctttccatcagaagatcatctagaggagtttatagcagaacatctccctgaagcatccaatcagagtctcctcactgttgcccatgcagacgcaggcacccaaaccaacggtgacctggaagacctggaggagcatgggccagggcagacagtctctgaggaagccacagaagttcacacgatggagggggacccagacacactggccgaatttctgatcagggatgtacttcaggagctgtccagttacaacggtgaggaggaggacccagaggaggtgaagacatccttgggagttccacaacgtggtgacctggaagacctggaggagcatgtgccagggcagacagtctctgaggaagccacaggggttcacatgatgcaggtggacccagccacgctggcaaagagtgacctggaagacctggaggagcatgtgccagagcagacagtctctgaggaagccacaggggttcacatgatgcaggtggacccagccacactggcaaagcaattggaagactccaccattacaggcagccaccagcagatgtcagcaagtccttcctctgcacctgcagaagaagcaacagaaaagaccaaagtggaagaggaagtgaaaaccagaaagcccaagaagaaaaccaggaagcccagcaagaaaagccggtggaatgtcctgaaatgttgggacatttttaatatattttagagacctctgaaggcaagtgaaggatgccctgagaacatgctccaggaaacagacacccactccatagcagcccctgagcctgctgggctgagccctccacaggctgcttagtgagggagacactgaggtgctggtcgcacccccatgtgcaggactccaagggctttgcactgtgttgtctgcagtaactcttcagctcaccaacatctcatttggggggacctagctctgtcttcccagccccttgaggacaacagggagcatcactagttcatcctgaggagacactagggttgacatgaatccccctggttcaggcctcctgggaaaggtgtgagagggatggaggcacccccaggctccttgtcacacaagcgagcagcccacccgacccagtattgcaggccagcaggccctcagtaggtcctggtgtcaagcaggggacacggcaggatccaagaagcactgaaatgtgtccagtcccaggagtccttcagcctctggggggtctgggggcctccagttccaggggtccttcagcctctgtgggggcctggggtggcctcatggccccctttttcaagatgaggttggaggcttctgtatgtagagggcactggcttgggccaaatgccaacaaaacaaacccttgaagacatttcagggccatgctcacttgggagggtttgaggacatgatttagcgagcctctgttttttaaatatattttccaatcttgaaataaggta

SEQ ID NO: 132081 - DNA, 596 bp, Homo sapiens
  Payload ID: 5784
  Gene Symbol: FAM153A
  Gene Name: family with sequence similarity 153, member A
  ENST ID: ENST00000505531
  CDS Start-End: 208-596
aggctcactaggtctgagaggtcggaggccgccagtgtcgctgctgaagggtggaccaggcgggatcgcggattctgggctagatcgcagacttgaattcgacaccaaattttggaacttaaaaagaagattcttaaaacttacaatccagattacgatgaggacctggtgcaggaagcttcatctgaagatgtcctgggcgttcatatggtggacaaagacacagagagagacattgagatgaaacggcaactacggcgactacgggagctccacctatacagcacatggaagaagtaccaagaggcgatgaagacatccttgggagttccacaatgtggtgacctggaagacctggaggagcatgtgccagggcagacagtctctgaggaagccacaggggttcacatgatgcaggtggacccagccacgctggcaaagaaattggaagactccaccattacaggcagccaccagcagatgtcagcaagtccttcctctgcacctgcagaagaagcaacagaaaagaccaaagtggaagaggaagtgaaaaccagaaagcccaagaagaaaaccaggaagcccagcaagaaaag

SEQ ID NO: 132082 - DNA, 1641 bp, Homo sapiens
  Payload ID: 5784
  Gene Symbol: FAM153A
  Gene Name: family with sequence similarity 153, member A
  Uniprot ID: Q9UHL3
  ENST ID: ENST00000510276
  CDS Start-End: 422-1354
agcaaagtcaggcggtcggcttcgccagcagccgatgagtctcatcctgtggattgcccagcgccagggatcaggatccggagaggtgtccaggaggagcagaccctcagaccagaattcgacaccaaattttggaacttaaaaagaagattcttaaaacttacaatccagcccagggcttcccagctgtcttcatccaggcctgcgccggtgttcacagtggtcctcatctaagccagccaagaagatctctgtcatccacgtgacagccagcccagatgtccctagccgtcctcatcaaggccagccagtttgcttacacgtgtgctaattggagccagccaccctcatagaggccatcccagattacgatgaggacctggtgcaggaagcttcatctgaagatgtcctgggcgttcatatggtggacaaagacacagagagagacattgagatgaaacggcaactacggcgactacgggagctccacctatacagcacatggaagaagtaccaagaggcgatgaagacatccttgggagttccacaatgtgagcgtgacgaaggctccttgggcaagccattgtgtccacccgagatactctcggagacgttgccaggctctgtgaagaaaagggtatgctttccatcagaagatcatctagaggagtttatagcagaacatctccctgaagcatccaatcagagtctcctcactgttgcccatgcagacgcaggcacccaaaccaacggtgacctggaagacctggaggagcatgggccagggcagacagtctctgaggaagccacagaagttcacacgatggagggggacccagacacactggccgaatttctgatcagggatgtacttcaggagctgtccagttacaacggtgaggaggaggacccagaggaggtgaagacatccttgggagttccacaacgtggtgacctggaagacctggaggagcatgtgccagggcagacagtctctgaggaagccacaggggttcacatgatgcaggtggacccagccacgctggcaaagagtgacctggaagacctggaggagcatgtgccagagcagacagtctctgaggaagccacaggggttcacatgatgcaggtggacccagccacactggcaaagcaattggaagactccaccattacaggcagccaccagcagatgtcagcaagtccttcctctgcacctgcagaagaagcaacagaaaagaccaaagtggaagaggaagtgaaaaccagaaagcccaagaagaaaaccaggaagcccagcaagaaaagccggtggaatgtcctgaaatgttgggacatttttaatatattttagagacctctgaagattcctcgaccaccaggaagggccccgacgtggggatgtcaacatggctcagacttgatgtggatcgtgatcatttcgggaaatgtgttactccaaaaacttttataatctttgcttaatttgtttttaaatactttcctggctgggcgtggtggcttatgcctgtaatcccagcactttgggaggccgaggcgggtggatcacctgaggtcaggagttcaagaccagcctggccaacaaggtgaaaccccgtctctactaaaaatacaaaaatt

SEQ ID NO: 132083 - DNA, 448 bp, Homo sapiens
  Payload ID: 5784
  Gene Symbol: FAM153A
  Gene Name: family with sequence similarity 153, member A
  ENST ID: ENST00000504518
  CDS Start-End: 91-448
atgatataggtcttgcctttcattttaactgccattctggcaactgaacgttggcagtaaacgcagcttagttgtctcagaggactcacaatgggatgtgtttatagttgttgccttgaagattacgatgaggacctggtgcaggaagcttcatctgaagatgtcctgggcgttcatatggtggacaaagacacagagagagacattgagatgaaacggcaactacggcgactacgggagctccacctatacagcacatggaagaagtaccaagaggcgatgaagacatccttgggagttccacaatgtgagcgtgacgaaggctccttgggcaagccattgtgtccacccgagatactctcggagacgttgccaggctctgtgaagaaaagggtatgctttccatcagaagatcatctagaggagtttatagcagaacatctccctg

SEQ ID NO: 132084 - DNA, 563 bp, Homo sapiens
  Payload ID: 5784
  Gene Symbol: FAM153A
  Gene Name: family with sequence similarity 153, member A
  ENST ID: ENST00000503845
  CDS Start-End: 92-217
gatgatataggtcttgcctttcattttaactgccattctggcaactgaacgttggcagtaaacgcagcttagttgtctcagaggactcacaatgggatgtgtttatagttgttgccttgaagtgtgttgtggcgaggatgaaatagtgtatcctaggatgccaggggaatccaccgtctgccaccgcgagcgtgagaagccaatcacctatcactgattacgatgaggacctggtgcaggaagcttcatctgaagatgtcctgggcgttcatatggtggacaaagacacagagagagacattgagatgaaacggcaactacggcgactacgggagctccacctatacagcacatggaagaagtaccaagaggcgatgaagacatccttgggagttccacaatgtgagcgtgacgaaggctccttgggcaagccattgtgtccacccgagatactctcggagacgttgccaggctctgtgaagaaaagggtatgctttccatcagaagatcatctagaggagtttatagcagaacatctccctgaagcatccaatcagagtctc

SEQ ID NO: 132085 - DNA, 558 bp, Homo sapiens
  Payload ID: 5784
  Gene Symbol: FAM153A
  Gene Name: family with sequence similarity 153, member A
  ENST ID: ENST00000503567
  CDS Start-End: 486-558
aaggcggggtgggccgcgcgcctgcgattttccgtccgtggtcctggggcagccctggccagcccaggagaacccgcgagcccagcggcgcctgcacctgcggcttccgggagccgggcggctttgcgaggctcactaggtctgagagaattcgacaccaaattttggaacttaaaaagaagattcttaaaacttacaatccagattctgggagttctgatgaatatgcagtcagcccagggcttcccagctgtcttcatccaggcctgcgccggtgttcacagtggtcctcatctaagccagccaagaagatctctgtcatccacgtgacagccagcccagatgtccctagccgtcctcatcaaggccagccagtttgcttacacgtgtgctaattggagccagccaccctcatagaggccatcccagattacgatgaggacctggtgcaggaagcttcatctgaagatgtcctgggcgttcatatggtggacaaagacacagagagagacagtacgtattctggaatcacccctatgctgaggaaaaattctagtg

SEQ ID NO: 132086 - DNA, 576 bp, Homo sapiens
  Payload ID: 5784
  Gene Symbol: FAM153A
  Gene Name: family with sequence similarity 153, member A
  ENST ID: ENST00000515787
  CDS Start-End: 70-177
attttaactgccattctggcaactgaacgttggcagtaaacgcagcttagttgtctcagaggactcacaatgggatgtgtttatagttgttgccttgaagattacgatgaggacctggtgcaggaagcttcatctgaagatgtcctgggcgttcatatgtgttttgtttttctctaaatgcaggtggacaaagacacagagagagacattgagatgaaacggcaactacggcgactacgggagctccacctatacagcacatggaagaagtaccaagaggcgatgaagacatccttgggagttccacaatgtgagcgtgacgaaggctccttgggcaagccattgtgtccacccgagatactctcggagacgttgccaggctctgtgaagaaaagggtatgctttccatcagaagatcatctagaggagtttatagcagaacatctccctgaagcatccaatcagagtctcctcactgttgcccatgcagacgcaggcacccaaaccaacggtgacctggaagacctggaggagcatgggccagggcagacagtctctgaggaagccacagaagtt

SEQ ID NO: 132087 - DNA, 1437 bp, Homo sapiens
  Payload ID: 5784
  Gene Symbol: FAM153A
  Gene Name: family with sequence similarity 153, member A
  ENST ID: ENST00000513554
  CDS Start-End: 467-901
ttttgttttagccagcgaggaaaaaagaatcagtttgattacacatttaccaaacattaagaatttaatatggtaacttttatttcagtattaaaatagcaattttatttattacttttttatatacagaattcgacaccaaattttggaacttaaaaagaagattcttaaaacttacaatccagattctgggagttctgatgaatatgcagtcagcccagggcttcccagctgtcttcatccaggcctgcgccggtgttcacagtggtcctcatctaagccagccaagaagatctctgtcatccacgtgacagccagcccagatgtccctagccgtcctcatcaaggccagccagtttgcttacacgtgtgctaattggagccagccaccctcatagaggccatcccagattacgatgaggacctggtgcaggaagcttcatctgaagatgtcctgggcgttcatatggtggacaaagacacagagagagacattgagatgaaacggcaactacggcgactacgggagctccacctatacagcacatggaagaagtaccaagaggcgatgaagacatccttgggagttccacaacgtggtgacctggaagacctggaggagcatgtgccagggcagacagtctctgaggaagccacaggggttcacatgatgcaggtggacccagccacgctggcaaagaaattggaagactccaccattacaggcagccaccagcagatgtcagcaagtccttcctctgcacctgcagaagaagcaacagaaaagaccaaagtggaagaggaagtgaaaaccagaaagcccaagaagaaaaccaggaagcccagcaagaaaagccggtggaatgtcctgaaatgttgggacatttttaatatattttagagacctctgaaggcaagtgaaggatgccctgagaacatgctccaggaaacagacacccactccatagcagcccctgagcctgctgggctgagccctccacaggctgcttagtgagggagacactgaggtgctggtcgcacccccatgtgcaggactccaagggctttgcactgtgttgtctgcagtaactcttcagctcaccaacatctcatttggggggacctagctctgtcttcccagccccttgaggacaacagggagcatcactagttcatcctgaggagacactagggttgacatgaatccccctggttcaggcctcctgggaaaggtgtgagagggatggaggcacccccaggctccttgtcacacaagcgagcagcccacccgacccagtattgcaggccagcaggccctcagtaggtcctggtgtcaagcaggggacacggcaggatccaagaagcactgaaatgtgtccagtcccaggagtccttcagcctctggggggtctgggggcctccagttccaggggtcct

SEQ ID NO: 132088 - DNA, 1912 bp, Homo sapiens
  Payload ID: 5784
  Gene Symbol: FAM153A
  Gene Name: family with sequence similarity 153, member A
  ENST ID: ENST00000614127
  CDS Start-End: 1-1164
atgggatgtgtttatagttgttgccttgaagtgtgttgtggcgaggatgaaatagtgtatcctaggatgccaggggaatccaccgtctgccaccgcgagcgtgagaagccaatcacctatcactggtatcactggcatcccggccatatataccctagaattgcatcaatggaagattacgatgaggacctggtgcaggaagcttcatctgaagatgtcctgggcgttcatatggtggacaaagacacagagagagacattgagatgaaacggcaactacggcgactacgggagctccacctatacagcacatggaagaagtaccaagaggcgatgaagacatccttgggagttccacaatgtgagcgtgacgaaggctccttgggcaagccattgtgtccacccgagatactctcggagacgttgccaggctctgtgaagaaaagggtatgctttccatcagaagatcatctagaggagtttatagcagaacatctccctgaagcatccaatcagagtctcctcactgttgcccatgcagacgcaggcacccaaaccaacggtgacctggaagacctggaggagcatgggccagggcagacagtctctgaggaagccacagaagttcacacgatggagggggacccagacacactggccgaatttctgatcagggatgtacttcaggagctgtccagttacaacggtgaggaggaggacccagaggaggtgaagacatccttgggagttccacaacgtggtgacctggaagacctggaggagcatgtgccagggcagacagtctctgaggaagccacaggggttcacatgatgcaggtggacccagccacgctggcaaagagtgacctggaagacctggaggagcatgtgccagagcagacagtctctgaggaagccacaggggttcacatgatgcaggtggacccagccacactggcaaagcaattggaagactccaccattacaggcagccaccagcagatgtcagcaagtccttcctctgcacctgcagaagaagcaacagaaaagaccaaagtggaagaggaagtgaaaaccagaaagcccaagaagaaaaccaggaagcccagcaagaaaagccggtggaatgtcctgaaatgttgggacatttttaatatattttagagacctctgaaggcaagtgaaggatgccctgagaacatgctccaggaaacagacacccactccatagcagcccctgagcctgctgggctgagccctccacaggctgcttagtgagggagacactgaggtgctggtcgcacccccatgtgcaggactccaagggctttgcactgtgttgtctgcagtaactcttcagctcaccaacatctcatttggggggacctagctctgtcttcccagccccttgaggacaacagggagcatcactagttcatcctgaggagacactagggttgacatgaatccccctggttcaggcctcctgggaaaggtgtgagagggatggaggcacccccaggctccttgtcacacaagcgagcagcccacccgacccagtattgcaggccagcaggccctcagtaggtcctggtgtcaagcaggggacacggcaggatccaagaagcactgaaatgtgtccagtcccaggagtccttcagcctctggggggtctgggggcctccagttccaggggtccttcagcctctgtgggggcctggggtggcctcatggccccctttttcaagatgaggttggaggcttctgtatgtagagggcactggcttgggccaaatgccaacaaaacaaacccttgaagacatttcagggccatgctcacttgggagggtttgaggacatgatttagcgagcctctgttttttaaatatattttccaatcttgaaataaggt

SEQ ID NO: 132089 - DNA, 1913 bp, Homo sapiens
  Payload ID: 5785
  Gene Symbol: FAM153B
  Gene Name: family with sequence similarity 153, member B
  Uniprot ID: P0C7A2
  ENST ID: ENST00000253490
  CDS Start-End: 1-1164
atgggatgtgcttatagttgttgcctcgaagtgtgttgtggcgaggatgaaatagtgtatcctaggatgccaggggaatccaccgtctgccaccgcgagcgtgagaagccaatcacctatcactggtatcactggcatcccggccatatataccctagagttgcatcaatggaagattacgatgaggacctggtgcaggaagcttcatctgaagatgtcctgggcgttcatatggtggacaaagacacagagagagacattgagatgaaacggcaactacggcgactacgggagctccacctatacagcacatggaagaagtaccaagaggcgatgaagacatccttgggagttccacaatgtgagcgtgacgaaggctccttgggcaagccattgtgtccacccgagatactctcggagacgttgccaggctctgtgaagaaaagggtatgctttccatcagaagatcatctagaggagtttatagcagaacatctccctgaagcatccaatcagagtctcctcactgttgcccatgcagacacaggcatccaaaccaacggtgacctggaagacctggaggagcatgggccagggcagacagtctctgaggaagccacagaagttcacatgatggagggggacccagacacactggccgaacttctgatcagggatgtacttcaggagctgtccagttacaacggcgaggaggaggacccagaggaggtgaagacatccttgggagttccacaacgtggtgacctggaagacctggaggagcatgtgccagggcagacagtctctgaggaagccacaggggttcacatgatgcaggtggacccagccacgccggcaaagagtgacctggaagacctggaggagcatgtgccagggcagacagtctctgaggaagccacaggggttcacatgatgcaggtggacccagccacactggcaaagcaattggaagactccaccattacaggcagccaccagcagatgtcagcaagtccttcctctgcacctgcagaagaagcaacagaaaagaccaaagtggaagaggaagtgaaaaccagaaagcccaagaagaaaaccaggaagcccagcaagaaaagccggtggaatgtcctgaaatgttgggacatttttaatatattttagagacctctgaaggtaagtgaaggatgccctgagaacatgctccaggaaacagacacccactccatagcagcccctgagcctgctgggctgagccctccacaggctgcttagtgagggagacactgaggtgctggtcgcacccccatgtgcaggactccaagggctttgcactgtgttgtctgcagtaactcttcagctcaccaacatctcatttggggggacctagctctgtcttcccagccccttgaggacaacagggagcatcactagttcatcctgaggagacactagggttgacatgaatccccctggttcaggcctcctgggaaaggtgtgagagggatggaggcacccccaggctccttgtcacacaagcgagcagcccacccgacccagtattgcaggccagcaggccctcagtaggtcctggtgtcaagcaggggacacggcaggatccaagaagcactgaaatgtgtccagtcccaggagtccttcagcctctggggggtctgggggcctccagttccaggggtccttcagcctctgtgggggcctggggtggcctcatggccccatttttcaagatgaggttggaggcttctgtatgtagagggcactggcttgggccaaatgccaacaaaacaaacccttgaagacatttcagggccatgctcacttgggagggtttgaggacatgatttagcgagcctctgttttttaaatatattttccaatcttgaaataaggta

SEQ ID NO: 132090 - DNA, 4334 bp, Homo sapiens
  Payload ID: 5785
  Gene Symbol: FAM153B
  Gene Name: family with sequence similarity 153, member B
  ENST ID: ENST00000508296
  CDS Start-End: 74-1006
taaaacttacaatccagattacgatgaggacctggtgcaggaagcttcatctgaagatgtcctgggcgttcatatggtggacaaagacacagagagagacattgagatgaaacggcaactacggcgactacgggagctccacctatacagcacatggaagaagtaccaagaggcgatgaagacatccttgggagttccacaatgtgagcgtgacgaaggctccttgggcaagccattgtgtccacccgagatactctcggagacgttgccaggctctgtgaagaaaagggtatgctttccatcagaagatcatctagaggagtttatagcagaacatctccctgaagcatccaatcagagtctcctcactgttgcccatgcagacacaggcatccaaaccaacggtgacctggaagacctggaggagcatgggccagggcagacagtctctgaggaagccacagaagttcacatgatggagggggacccagacacactggccgaacttctgatcagggatgtacttcaggagctgtccagttacaacggcgaggaggaggacccagaggaggtgaagacatccttgggagttccacaacgtggtgacctggaagacctggaggagcatgtgccagggcagacagtctctgaggaagccacaggggttcacatgatgcaggtggacccagccacgccggcaaagagtgacctggaagacctggaggagcatgtgccagggcagacagtctctgaggaagccacaggggttcacatgatgcaggtggacccagccacactggcaaagcaattggaagactccaccattacaggcagccaccagcagatgtcagcaagtccttcctctgcacctgcagaagaagcaacagaaaagaccaaagtggaagaggaagtgaaaaccagaaagcccaagaagaaaaccaggaagcccagcaagaaaagccggtggaatgtcctgaaatgttgggacatttttaatatattttagagacctctgaagattcctcgaccaccaggaagggccccgacgtggggatgtcaacatggctcagacttgatgtggatcgtgatcatttcgggaaatgtgttactccaaaaacttttataatctttgcttaatttgtttttaaatactttcctggctgggcgtggtggcttatgcctgtaatcccagcactttgggaggccgaggcgggtggatcacctgaggtcaggagttaaagaccagcctggccaacaaggtgaaaccccgtctctactaaaaatacaaaaattagctaggcgtggtggcgcactcttgtagtcccagctatttgggaggctgaggcaggagaatcacttgacctcaggaggcggaggttgcagtgagccgagatcatgccactgcaccccagcacctggctacagagtgagactttgtctcaaaaaaaaaaaaaaaagaacaaaaaaattctgactttaacctctgtttttcagagggcacaaattgttcttgtattgtttccattttacatttttttcttgaagttattttccaattgttttcattctttctgaagttttgtttactcggttttaagtttttgtaattttgatagacttttgtgctttcattttcttaatgacttttacctcatttttaaaacaaatccatagtatggatgatattgatgatgaaatgtcttacgatgatcatttagaggtttattttgaacaactggcaattccaggaatgatggaataaagcatacgaagtagaaggactggaacctccagaaaaagtactttaagttacctacaggtgatcctagtcaggtatgaattgataagaaatgcctgcaccttccctccttcctatctttcccttgcctacagaaaattaaaaggcaaaacaatagacatctgcatattcttcattcagatcaaccagtggctagcatttgccaccttttgcagtttctttctctttccataagtactttcttctctgaatcatttgaaagcaaatgaaaacagtagcctaaagtgtcagtttcaaccagaaaataacagctctgatttctcatggctcatactcgtctgaaacgactcaggtagaggctgaggaaggccgtgttgtttgtctacctgggactacacctactgaaagaagttctcaagttctgattgagttctaaaattttttgaagattggaattcttcatatggcaccatgggcccggcactgccacgttttccaaggaacctgccggagctcctgcggaagctgctcctcaggcgatggagtcccttcgctggtaggcccttcttcagtcaccacaggatgcctgccattcatgaacaagaaggagaggacgggctttgaataaaaaacaggatccaggaaatatttgtgaggccatttggacttcagtgtgaaatggtgttaaaagatgaagtcatttattcaagaagtaaacctctgccacctggactgtgcgcagacatttcattgattttgtttaataaacattttctggctttgggaggtgtctctcttggtagaacacagtgtcaaagatggacaagatggacacatagtccattatttggtattgtttgtgtatgggagcagaccacaaattaatgtttggagaacaattttgtcataacacactgttgaggctcagttgtacagaactggaaaagtcttcagcttggcacatgtcctgattcagcctttgtttaacatatattccaatccggattctatcttcactggctacaaagaccacctgatacgtgcaccacgacacaggagctgctggagagggggtagtgttatcacctcaaacccacagccatatttttcaaaagccagcttagagagaggtgtactgatagctgcatagagaacatgcagtccatccattcttcccagtgatgtacatttctcaatcagtaaccacgtggtataccagccttgagtgtcacatctcccaaccataccaaatggatcacctaactggaggtggggggggccctcagaaatgagatttcgtatttactgtaaaattgccttattttttcttttgaggtggagtctcactctgttgcctgggctggagtgcaatggtgtgatcactgctcactgcaacctccgcctcctgggttcaagcagttctcctgcctcagcctcccaagtagctgcaattacaggtgcatgccaccactcccagcaaatttttatatttttagtggagacagggtttcaccatgttgaccaggctggtctcaaactcctgacctcaggtgatctgcccaccttggcctcccaaagttctgggattaaaggtacgagccaccgcaactggctgagaatctttttatttgctgatttgtctcttgtgtattttctttgttcagatgtctcttcagatctttttctcacttttaaattgttttttaattgttaagaattttctgtctagtttagatataagccctttatcagacatgtgttttgcaaatattttctcctagtctgtggcttgtattctgtctcttaacactcattttatttttacttttggaactaaagaagaagaatggtcagctttccattattcttgtaacagtaatggcagaaccaagtctgctaatgctacactgagcaaagaaagtcacctggtgaagtccaacattaatgaaatggggtagtacatgcaggcagcgttgggggtggggagggaacaaatgcttcttgagagtaatataatctgccataccatccaggaacctacaatggctatctattaccttattctctggtttgtttaatgttcgaatctttccgaaagatccttcaacctttctggaagaatctaatctgataacaccatcaaaaacacattacttcttttggcataatttaaattgtaagacatcattcacatttatcaatgttacatatataagaactcacccaccatattcttccttgaggaattacagcatgtaattctataatcatttttataatcgtctaacaattttataatggattggttgcttactatcaattttttaaaagtcatggcttctccagtcatttcttgcttatcgaaattatttcatgagatgggtctctccttgtatatttgaaaatgaggtttgcttccttctacttaaaaaacaacttgaacatacctgtttggatcacatggtcttgtcctgataacttggaagaggttgcttcagcattgttcttattgttgtggtggttattattaatattgtttcatattctgtttaaaaaattaaaattttacacaaga

SEQ ID NO: 132091 - DNA, 1966 bp, Homo sapiens
  Payload ID: 5785
  Gene Symbol: FAM153B
  Gene Name: family with sequence similarity 153, member B
  ENST ID: ENST00000515817
  CDS Start-End: 285-1217
aggtgacaatagatatagaagtacgttgatgtgcgaagatgtattttgttttagccagcgaggaaaaaagaatcagtttgattatacatttaccaaacattaagaatttaatatggtaacttttatttcagtattaaaatagcaattttatttattacttttttatatacagaattcgacaccaaattttggaacttaaaaagaagattcttaaaacttacaatccagattacgatgaggacctggtgcaggaagcttcatctgaagatgtcctgggcgttcatatggtggacaaagacacagagagagacattgagatgaaacggcaactacggcgactacgggagctccacctatacagcacatggaagaagtaccaagaggcgatgaagacatccttgggagttccacaatgtgagcgtgacgaaggctccttgggcaagccattgtgtccacccgagatactctcggagacgttgccaggctctgtgaagaaaagggtatgctttccatcagaagatcatctagaggagtttatagcagaacatctccctgaagcatccaatcagagtctcctcactgttgcccatgcagacacaggcatccaaaccaacggtgacctggaagacctggaggagcatgggccagggcagacagtctctgaggaagccacagaagttcacatgatggagggggacccagacacactggccgaacttctgatcagggatgtacttcaggagctgtccagttacaacggcgaggaggaggacccagaggaggtgaagacatccttgggagttccacaacgtggtgacctggaagacctggaggagcatgtgccagggcagacagtctctgaggaagccacaggggttcacatgatgcaggtggacccagccacgccggcaaagagtgacctggaagacctggaggagcatgtgccagggcagacagtctctgaggaagccacaggggttcacatgatgcaggtggacccagccacactggcaaagcaattggaagactccaccattacaggcagccaccagcagatgtcagcaagtccttcctctgcacctgcagaagaagcaacagaaaagaccaaagtggaagaggaagtgaaaaccagaaagcccaagaagaaaaccaggaagcccagcaagaaaagccggtggaatgtcctgaaatgttgggacatttttaatatattttagagacctctgaaggtaagtgaaggatgccctgagaacatgctccaggaaacagacacccactccatagcagcccctgagcctgctgggctgagccctccacaggctgcttagtgagggagacactgaggtgctggtcgcacccccatgtgcaggactccaagggctttgcactgtgttgtctgcagtaactcttcagctcaccaacatctcatttggggggacctagctctgtcttcccagccccttgaggacaacagggagcatcactagttcatcctgaggagacactagggttgacatgaatccccctggttcaggcctcctgggaaaggtgtgagagggatggaggcacccccaggctccttgtcacacaagcgagcagcccacccgacccagtattgcaggccagcaggccctcagtaggtcctggtgtcaagcaggggacacggcaggatccaagaagcactgaaatgtgtccagtcccaggagtccttcagcctctggggggtctgggggcctccagttccaggggtccttcagcctctgtgggggcctggggtggcctcatggccccatttttcaagatgaggttggaggcttctgtatgtagagggcactggcttgggccaaatgccaacaaaacaaacccttgaagacatttcagggccatgctcacttgggagggtttgaggacatgatttagcgagcctctgttttttaaatatattttccaatcttgaaataaggta

SEQ ID NO: 132092 - DNA, 602 bp, Homo sapiens
  Payload ID: 5785
  Gene Symbol: FAM153B
  Gene Name: family with sequence similarity 153, member B
  ENST ID: ENST00000503724
  CDS Start-End: 203-602
gttgctgaggtgatctgatgatataggtcttgcctttcattttaactgccattctggcaactgaacgttggcagtaaacgcagcttagttgtctcagaggactcacaatgggatgtgcttatagttgttgcctcgaagattacgatgaggacctggtgcaggaagcttcatctgaagatgtcctgggcgttcatatgttgagatgaaacggcaactacggcgactacgggagctccacctatacagcacatggaagaagtaccaagaggcgatgaagacatccttgggagttccacaatgtgagcgtgacgaaggctccttgggcaagccattgtgtccacccgagatactctcggagacgttgccaggctctgtgaagaaaagggtatgctttccatcagaagatcatctagaggagtttatagcagaacatctccctgaagcatccaatcagagtctcctcactgttgcccatgcagacacaggcatccaaaccaacggtgacctggaagacctggaggagcatgggccagggcagacagtctctgaggaagccacagaagttcacatgatggagggggacccagacacactggccgaac

SEQ ID NO: 132093 - DNA, 1641 bp, Homo sapiens
  Payload ID: 5785
  Gene Symbol: FAM153B
  Gene Name: family with sequence similarity 153, member B
  ENST ID: ENST00000510151
  CDS Start-End: 422-1354
agcaaagtcaggcggtcggcttcgccagcagccgatgagtctcatcctgtggattgcccagcgccagggatcaggatccggagaggtgtccaggaggagcagaccctcagaccagaattcgacaccaaattttggaacttaaaaagaagattcttaaaacttacaatccagcccagggcttcccagctgtcttcatccaggcctgcgccggtgttcacagtggtcctcatctaagccagccaagaagatctctgtcatccacgtgacagccagcccagatgtccctagccgtcctcatcaaggccagccagtttgcttacacgtgtgctaattggagccagccaccctcatagaggccatcccagattacgatgaggacctggtgcaggaagcttcatctgaagatgtcctgggcgttcatatggtggacaaagacacagagagagacattgagatgaaacggcaactacggcgactacgggagctccacctatacagcacatggaagaagtaccaagaggcgatgaagacatccttgggagttccacaatgtgagcgtgacgaaggctccttgggcaagccattgtgtccacccgagatactctcggagacgttgccaggctctgtgaagaaaagggtatgctttccatcagaagatcatctagaggagtttatagcagaacatctccctgaagcatccaatcagagtctcctcactgttgcccatgcagacacaggcatccaaaccaacggtgacctggaagacctggaggagcatgggccagggcagacagtctctgaggaagccacagaagttcacatgatggagggggacccagacacactggccgaacttctgatcagggatgtacttcaggagctgtccagttacaacggcgaggaggaggacccagaggaggtgaagacatccttgggagttccacaacgtggtgacctggaagacctggaggagcatgtgccagggcagacagtctctgaggaagccacaggggttcacatgatgcaggtggacccagccacgccggcaaagagtgacctggaagacctggaggagcatgtgccagggcagacagtctctgaggaagccacaggggttcacatgatgcaggtggacccagccacactggcaaagcaattggaagactccaccattacaggcagccaccagcagatgtcagcaagtccttcctctgcacctgcagaagaagcaacagaaaagaccaaagtggaagaggaagtgaaaaccagaaagcccaagaagaaaaccaggaagcccagcaagaaaagccggtggaatgtcctgaaatgttgggacatttttaatatattttagagacctctgaagattcctcgaccaccaggaagggccccgacgtggggatgtcaacatggctcagacttgatgtggatcgtgatcatttcgggaaatgtgttactccaaaaacttttataatctttgcttaatttgtttttaaatactttcctggctgggcgtggtggcttatgcctgtaatcccagcactttgggaggccgaggcgggtggatcacctgaggtcaggagttaaagaccagcctggccaacaaggtgaaaccccgtctctactaaaaatacaaaaatt

SEQ ID NO: 132094 - DNA, 1071 bp, Homo sapiens
  Payload ID: 5785
  Gene Symbol: FAM153B
  Gene Name: family with sequence similarity 153, member B
  ENST ID: ENST00000512862
  CDS Start-End: 202-636
actaggtctgagaggtcggaggccgccagtgtcgctgctgaagggtggaccaggcgggatcgcggattctgggctagatcgcagacttgaattcgacaccaaattttggaacttaaaaagaagattcttaaaacttacaatccagattacgatgaggacctggtgcaggaagcttcatctgaagatgtcctgggcgttcatatggtggacaaagacacagagagagacattgagatgaaacggcaactacggcgactacgggagctccacctatacagcacatggaagaagtaccaagaggcgatgaagacatccttgggagttccacaacgtggtgacctggaagacctggaggagcatgtgccagggcagacagtctctgaggaagccacaggggttcacatgatgcaggtggacccagccacgccggcaaagaaattggaagactccaccattacaggcagccaccagcagatgtcagcaagtccttcctctgcacctgcagaagaagcaacagaaaagaccaaagtggaagaggaagtgaaaaccagaaagcccaagaagaaaaccaggaagcccagcaagaaaagccggtggaatgtcctgaaatgttgggacatttttaatatattttagagacctctgaagattcctcgaccaccaggaagggccccgacgtggggatgtcaacatggctcagacttgatgtggatcgtgatcatttcgggaaatgtgttactccaaaaacttttataatctttgcttaatttgtttttaaatactttcctggctgggcgtggtggcttatgcctgtaatcccagcactttgggaggccgaggcgggtggatcacctgaggtcaggagttaaagaccagcctggccaacaaggtgaaaccccgtctctactaaaaatacaaaaattagctaggcgtggtggcgcactcttgtagtcccagctatttgggaggctgaggcaggagaatcacttgacctcaggaggcggaggttgcagtgagccgagatcatgccactgcaccccagcacctggctacagagtgagactttgtctc

SEQ ID NO: 132095 - DNA, 1050 bp, Homo sapiens
  Payload ID: 5785
  Gene Symbol: FAM153B
  Gene Name: family with sequence similarity 153, member B
  ENST ID: ENST00000611539
  CDS Start-End: 454-888
aatgcgtatgcccgttacccttcaattccattatactaaaatacccttgggaaatagagatacatgcactttgtttttcacagcacttattttaaaaagaacccatagaatggatcttataagtaaatttcagttgcatccataggatgcaataatatgtgaccatcaaaggtgacaatagatatagaagtacgttgatgtgcgaagatgtattttgttttagccagcgaggaaaaaagaatcagtttgattatacatttaccaaacattaagaatttaatatggtaacttttatttcagtattaaaatagcaattttatttattacttttttatatacagaattcgacaccaaattttggaacttaaaaagaagattcttaaaacttacaatccagattacgatgaggacctggtgcaggaagcttcatctgaagatgtcctgggcgttcatatggtggacaaagacacagagagagacattgagatgaaacggcaactacggcgactacgggagctccacctatacagcacatggaagaagtaccaagaggcgatgaagacatccttgggagttccacaacgtggtgacctggaagacctggaggagcatgtgccagggcagacagtctctgaggaagccacaggggttcacatgatgcaggtggacccagccacgccggcaaagaaattggaagactccaccattacaggcagccaccagcagatgtcagcaagtccttcctctgcacctgcagaagaagcaacagaaaagaccaaagtggaagaggaagtgaaaaccagaaagcccaagaagaaaaccaggaagcccagcaagaaaagccggtggaatgtcctgaaatgttgggacatttttaatatattttagagacctctgaaggtaagtgaaggatgccctgagaacatgctccaggaaacagacacccactccatagcagcccctgagcctgctgggctgagccctccacaggctgcttagtgagggagacactgaggtgctggtcgcacccccatgtgcaggactccaagg

SEQ ID NO: 132096 - DNA, 1510 bp, Homo sapiens
  Payload ID: 5786
  Gene Symbol: FAM153C
  Gene Name: family with sequence similarity 153, member C
  Uniprot ID: Q494X1
  ENST ID: ENST00000398106
  CDS Start-End: 454-798
aatgcgtatgcccgttacccttcaattccattatactaaaatacccttgggaaatagagatacatgcactttgtttttcacagcacttattttaaaaagaacccatagaatggatcttataagtaaatttcagttgcatccataggatgcaataatatgtgaccatcaaaggtgacaatagatatagaagtacgttgatgtgcaaagatgtattttgttttagccagcgaggaaaaaagaatcagtttgattatacatttaccaaacattaagaatttaatatggtaacttttatttcagtattaaaatagcaattttatttattacttttttatatatagaattcgacaccaaattttggaacttaaaaagaagattcttaaaacttacaatccagattacgatgaggacctggtgcaggaagcttcatctgaagatgtcctgggcgttcatatggtggacaaagacacagagagagacattgagatgaaacggcaactacggcgactacgggagctccacctatacagcacatggaagaagtaccaagaggcgatgaagacatccttgggagttccacaacgtggtgacctggaagacctggaggagcatctgccagggcagacagtctctgaggaagccacaggggttcacatgatgcaggtggacccagccacaccggcaaagaaattggaagactccaccattacaggcagccaccagcagatgtcagcaagtccttcctctgcacctgcagaagaagcaacagaaaagaccaaagtggaagaggaagtgtgagtgtgcagtgcgcagaatgatgagggaagcaggcacgtgcccatgttcttcttggctacgctcactttcttgttgtcccatcaggaaaaccagaaagcccaagaagaaaaccaggaagcccagcaagaaaagccggtggaatgtcctgaaatgttgggacatttttaatatattttagagacctctgaaggtaagtgaaggatgccctgagaacatgctccaggaaacagacacccactccatagcagcccgagcctgctgggctgagccctccacaggctgcttagtgagggagacactgaggtgctggtcgcacccccatgtgcaggactccaagggctttgcactgtgttgtctgcagtaactcttcagctcaccaacatctcatttggggggacctagctctgtcctcccagccccttgaggacaacagggagcatcactagttcatcctgaggagacactagggttgacatgaatccccctggttcaggcctcctgggaaaggtgtgagagggatggaggcacccccaggctccttgtcacacaagcgagcagcccacccgacccagtattgcgggccagcaggccctcagtaggtcctggtgtcaagcaggggacacggcaggatccaagaagcactgaaatgtgtccagtcccaggagtccttcagcctctggggggtctgggggcctccagttccaggggtcct

SEQ ID NO: 132097 - DNA, 597 bp, Homo sapiens
  Payload ID: 5786
  Gene Symbol: FAM153C
  Gene Name: family with sequence similarity 153, member C
  ENST ID: ENST00000511856
  CDS Start-End: 70-597
attttaactgccattctggcaactgaacgttggcagtaaacgcagcttagttgtctcagaggactcacaatgggatgtgcttatagttgttgcctcgaagtgtgttgtggcaaggatgaaatagtgtatcctaggatgccaggggaatccaccgtctgccaccgcgagcgtgagaagccaatcacctatcactggtatcactggcatcccggccatatataccctagagttgcatcaatggaagattacgatgaggacctggtgcaggaagcttcatctgaagatgtcctgggcgttcatatggtggacaaagacacagagagagacattgagatgaaacggcaactacggcgactacgggagctccacctatacagcacatggaagaagtaccaagaggcgatgaagacatccttgggagttccacaacgtggtgacctggaagacctggaggagcatctgccagggcagacagtctctgaggaagccacaggggttcacatgatgcaggtggacccagccacaccggcaaagaaattggaagactccaccattacaggcagccaccagcagatgtcagcaagtccttcctctgca

SEQ ID NO: 132098 - DNA, 539 bp, Homo sapiens
  Payload ID: 5786
  Gene Symbol: FAM153C
  Gene Name: family with sequence similarity 153, member C
  ENST ID: ENST00000504530
  CDS Start-End: 422-539
agcaaagtcaggcggtcggcttcgccagcagccgatgagtctcatcctgtggattgcccagcgccagggatcaggatccggagaggtgtccaggaggagcagaccctcagaccagaattcgacaccaaattttggaacttaaaaagaagattcttaaaacttacaatccagcccagggcttcccagctgtcttcatccaggcctgcgccggtgttcacagtggtcctcatctaagccagccaagaagatctctgtcatccacgtgacagccagcccagatgtccctagccgtcctcatcaaggccagccagtttgcttacacgtgtgctaattggagccagccaccctcatagaggccatcccagattacgatgaggacctggtgcaggaagcttcatctgaagatgtcctgggcgttcatatggtggacaaagacacagagagagacattgagatgaaacggcaactacggcgactacgggagctccacctatacagcacatggaagaagtaccaagaggcgatgaagacatccttgg

SEQ ID NO: 132099 - DNA, 1071 bp, Homo sapiens
  Payload ID: 5786
  Gene Symbol: FAM153C
  Gene Name: family with sequence similarity 153, member C
  Uniprot ID: Q494X1
  ENST ID: ENST00000507848
  CDS Start-End: 202-636
actaggtctgagaggtcggaggccgccagtgtcgctgctgaagggcggaccaggcgggatcgcggattctgggctagatcgcagacttgaattcgacaccaaattttggaacttaaaaagaagattcttaaaacttacaatccagattacgatgaggacctggtgcaggaagcttcatctgaagatgtcctgggcgttcatatggtggacaaagacacagagagagacattgagatgaaacggcaactacggcgactacgggagctccacctatacagcacatggaagaagtaccaagaggcgatgaagacatccttgggagttccacaacgtggtgacctggaagacctggaggagcatctgccagggcagacagtctctgaggaagccacaggggttcacatgatgcaggtggacccagccacaccggcaaagaaattggaagactccaccattacaggcagccaccagcagatgtcagcaagtccttcctctgcacctgcagaagaagcaacagaaaagaccaaagtggaagaggaagtgaaaaccagaaagcccaagaagaaaaccaggaagcccagcaagaaaagccggtggaatgtcctgaaatgttgggacatttttaatatattttagagacctctgaagattcctcgaccaccaggaagggccccgacgtggggatgtcaacatggctcagacttgatgtggatcgtgatcatttcgggaaatgtgttactccaaaaacttttataatctttgcttaatttgtttttaaatactttcctggctgggcgtggtggcttatgcctgtaatcccagcactttgggaggccgaggcgggtggatcacctgaggtcaggagttcaagaccagcctggccaacaaggtgaaaccccgtctctactaaaaatacaaaaattagctaggcgtggtggcgcactcttgtagtcccagctatttgggaggctgaggcaggagaatcacttgaactcaggaggcggaggttgcggtgagccgagatcatgccactgcaccccagcacctggctacagagtgagactttgtctc

SEQ ID NO: 132100 - DNA, 926 bp, Homo sapiens
  Payload ID: 5786
  Gene Symbol: FAM153C
  Gene Name: family with sequence similarity 153, member C
  ENST ID: ENST00000511189
  CDS Start-End: 58-579
attctggcaactgaacgttggcagtaaacgcagcttagttgtctcagaggactcacaatgggatgtgcttatagttgttgcctcgaagattacgatgaggacctggtgcaggaagcttcatctgaagatgtcctgggcgttcatatggtggacaaagacacagagagagacattgagatgaaacggcaactacggcgactacgggagctccacctatacagcacatggaagaagtaccaagaggcgatgaagacatccttgggagttccacaacgtggtgacctggaagacctggaggagcatctgccagggcagacagtctctgaggaagccacaggggttcacatgatgcaggtggacccagccacaccggcaaagaaattggaagactccaccattacaggcagccaccagcagatgtcagcaagtccttcctctgcacctgcagaagaagcaacagaaaagaccaaagtggaagaggaagtgaaaaccagaaagcccaagaagaaaaccaggaagcccagcaagaaaagccggtggaatgtcctgaaatgttgggacatttttaatatattttagagacctctgaagattcctcgaccaccaggaagggccccgacgtggggatgtcaacatggctcagacttgatgtggatcgtgatcatttcgggaaatgtgttactccaaaaacttttataatctttgcttaatttgtttttaaatactttcctggctgggcgtggtggcttatgcctgtaatcccagcactttgggaggccgaggcgggtggatcacctgaggtcaggagttcaagaccagcctggccaacaaggtgaaaccccgtctctactaaaaatacaaaaattagctaggcgtggtggcgcactcttgtagtcccagctatttgggaggctgaggcaggagaa

SEQ ID NO: 132101 - DNA, 1048 bp, Homo sapiens
  Payload ID: 5786
  Gene Symbol: FAM153C
  Gene Name: family with sequence similarity 153, member C
  Uniprot ID: Q494X1
  ENST ID: ENST00000620373
  CDS Start-End: 454-888
aatgcgtatgcccgttacccttcaattccattatactaaaatacccttgggaaatagagatacatgcactttgtttttcacagcacttattttaaaaagaacccatagaatggatcttataagtaaatttcagttgcatccataggatgcaataatatgtgaccatcaaaggtgacaatagatatagaagtacgttgatgtgcaaagatgtattttgttttagccagcgaggaaaaaagaatcagtttgattatacatttaccaaacattaagaatttaatatggtaacttttatttcagtattaaaatagcaattttatttattacttttttatatatagaattcgacaccaaattttggaacttaaaaagaagattcttaaaacttacaatccagattacgatgaggacctggtgcaggaagcttcatctgaagatgtcctgggcgttcatatggtggacaaagacacagagagagacattgagatgaaacggcaactacggcgactacgggagctccacctatacagcacatggaagaagtaccaagaggcgatgaagacatccttgggagttccacaacgtggtgacctggaagacctggaggagcatctgccagggcagacagtctctgaggaagccacaggggttcacatgatgcaggtggacccagccacaccggcaaagaaattggaagactccaccattacaggcagccaccagcagatgtcagcaagtccttcctctgcacctgcagaagaagcaacagaaaagaccaaagtggaagaggaagtgaaaaccagaaagcccaagaagaaaaccaggaagcccagcaagaaaagccggtggaatgtcctgaaatgttgggacatttttaatatattttagagacctctgaaggtaagtgaaggatgccctgagaacatgctccaggaaacagacacccactccatagcagcccgagcctgctgggctgagccctccacaggctgcttagtgagggagacactgaggtgctggtcgcacccccatgtgcaggactccaagg

SEQ ID NO: 132102 - DNA, 8503 bp, Homo sapiens
  Payload ID: 5787
  Gene Symbol: FAM155A
  Gene Name: family with sequence similarity 155, member A
  Uniprot ID: B1AL88
  ENST ID: ENST00000375915
  CDS Start-End: 140-1516
gagagaaagagagagaggagagagaagaaacgggaggaggggataaggaaattaaaccctttaagtcaatgcatattgtggtgacaccggcacaggcgccctcacggtggagtcggccagggctgtgcgttcccaaaatatgaccaggggtgcttggatgtgtcggcagtatgacgacggcttaaaaatctggttggcagcaccccgagagaacgagaaaccgttcatcgattccgagagggctcagaaatggcgactgtctctggcatctctcttgtttttcacagtcctgctctctgatcacttgtggttctgcgccgaggccaagctgacccgggcccgggacaaggagcaccagcagcagcagcggcagcagcagcagcagcagcagcagcagaggcagcggcagcagcagcagcagcagcggcggcagcaggagccctcctggcccgcgctcctggcgagcatgggggagtcctcgcccgccgcccaggcacacagactcctctccgcctcctcgtcccccaccctgcccccctccccgggagacggcggcggcggcggcggcaagggcaaccgaggcaaagacgaccggggcaaggctctttttctaggaaactctgccaagcccgtgtggcgcctggagacttgttacccccagggcgcgtcctcgggccagtgcttcacggtggagaatgcggacgcggtgtgcgccaggaactggagtcggggggcggccgggggggacgggcaggaggtgaggagcaagcatcccactccgctctggaacttgtcggatttttacctttcgttttgtaattcctacacactttgggagttgttctcggggttgtccagtcccaacactttgaactgcagtctggatgtggtgctcaaggaaggcggcgagatgaccacttgcaggcagtgcgtcgaggcttaccaggactatgaccaccatgctcaggagaaatacgaagagtttgaaagcgtgctccacaaatatttacagtcggaggagtactcggtgaaatcctgtcctgaagactgtaagattgtctacaaagcctggctctgttcccagtattttgaagtcacacagtttaactgcagaaagacaattccttgcaagcaatactgtttggaggttcagacgaggtgtccatttatattgcccgacaatgatgaagtcatctacggaggcctctccagtttcatctgtacagggctttatgaaacctttctaaccaatgatgaaccagaatgctgtgacgtcaggagagaagaaaaatcaaataacccatccaaagggaccgtagagaaaagtggctcctgtcacaggacatcgctcacagtgtcatcagcaacaagactgtgcaacagcagactcaagctgtgtgttcttgtactgattctcttacacacagtgctcacagcctcggcagcacagaacacagccggactgagctttggaggcatcaacacgctggaagaaaactcaaccaatgaggagtaacggaaggacgagtgtcaccacagcagcagctggcccgccgtgaaaaatggcaactgctgtctcatgtaacagaaactgggtgcttttaccctcgaattacttattgcaaggcctttagggtaaaatttaaacagatgggcctgaatccaaacaaggacacaaccacagctttttattgactaaaaggctggaaagtgactttaaatttctcacaccattttatacactgtgttttaatgtttggaggttttatttgctttcgttttggtttgggtttatttgtttgtttattttttgcacttgttaatacaggatttattttgggggatggtttctcagaggtaaactaagtcttttcactgtctctatctctctatatatttctagtcattgtgtgtgttcatcagatagttctgtctttatgtcctgtcagcttctattagaggaatgattgctatgacctcatggtatagcaaaaaacaacaacaaaaaaagaataaaaaataaaaaagacaaaaaaaagaaaacaacaaaaaaataaaaataaaaaaaatccctaagtctcccttctacccacagaaccaacaacacccttcccggcctttcctttccctcgccctcttctcgtcccctaagcaaacaacatccgcttgcttctgtctgtgtaaccacagtgaatgggtgtgcacgcttggtgggcctctgagcccctgttgcacaaaccagaaacagagcggagccaagggggcctgacaagagttcctttttagctgaacaaacaagtgctctccataataggtggaatcagacagttaacacatttttatgttgaaaacaaaataaaaggaaaaaattaaaaaaaactatcatgaactgtattgctccagttcccatccccaagtggcccagccctttcttgctggtccagttggacaggagcagctatctagaatcaggatgcggggagtgaggaagtttttcttttgacaatgaaggtgggctttcattgtgatttttgttctgttgcagtaatataggagcacattttggccattgtaattacagggaacaaacaaagggattgcggacacatatctggacttcttttcctcccttattgttgtggaagagacactagaaatgctcaaacacctgcaatatacagaatatacacaattttattccagtatttccctaacatatggtttaaaattattccaggtatacagtgtatgcaattctgcattatcacagaggaacaacttcttttttaaaaaataaataggtcagccatttttattaacgtgcaaaaactttatcactctaacatgctctaggtagttgaggaaaagaggtctgatcactgtttgtattttattttctttgtgggaacatttcacctgctgagtgtacatgaatttgctttctataaaaggcttttatgagtttacagtagaatcagtggaaggaagagttaataagggctgtttttaaaaaaacaaacaaacaaacaaaacaaataattaaaaaaaaaattttacattccttcctattctctaactacacttgggaagtgcacttcagataagtttgcagtgtgactgagagatgaaggaaatccatagaaaaggtcctcttagtgaacaaaatttagttattaactttatagctatgaaatttccccgggcatttgtttttgttcaaacagactttaacctctgcatcatacttaaccctgcgacatgcgtacagtatgcatattttgttttgaaaaaaaatgtttcgttccagtctgttaagaatattcaaaaataataaaggtattgcttaataaaattgctagaattgtttagcagtacatgcacaatattttactagattctttgttttaatagtgttttgttgagactgaaaatcttaaaatggtctgcgcaaatacaaaaaaaaagaaaacaccaaaaatgcaaaattctcccgtttttgttccttttttaaaatttttttttctgcaaatgcaaatacattcacatgtggacagatacatacacataggcatcatattttagtgtatggaaacatggtgcttttctggggacacaagctgaggaagtgaatggctcgggggagacacattaattgcatggaattgttgactgtgaaacacttgtagaaatgagcactttggtatcccaaccaatggtggaatacagatttcaatggcgctggggggacgagaagcagaggaattgaggctgcaagtgattcctgaggaagagctcacagggtgattttattcagatgacctctaagggaatggctaggaaggagtctgttctgacctttatctacctctgctgtggtaaggccactccatgtgccatctcaccatctcttcagcgttcctcatgctgcttctccccgtgccataggcgtttccattcttgcaggaaaatgacaatgcaagtgcaaattccactcacttttattggtatgacaataaattattctttctaaacacttagcaaaatgacgaaaagcagtattccttaaaatataggttttcattttctcaatatattttgaactgactaaagttctttacaaagacaagaggatcagaaggttccacttacccgtgttttagcgtttgtttggagataatgccaaccaaaaggtggaaaactaaaaccaccattgctttacataagaggtacacactgccccccaccccccaaaaaaaaacacagctttgaaagttgggagaaacactgcagtcttcattgtaaatataaagtgataatttaggtgaggaaggaacggtaaggagggaaggggaatgagtcctttctccccatcaagtcagccagcattggaatagtctctaattctggcggaatattttctttgtcatgttcatctattcttattacaggagaatgatttcagtgcctagtatttattagtgtaagtgtgtaaccactttcccgcaatatttccactggacatgttgaagcaaagcagcttcttctggggtcaggcagaggatccaaataggcaacgactcctttcccaagctcagaaacaatcactgatgatgcagatttcactacatccgttgattctttgtagtagttttcctggcacacacttgagcatgcttaaggttgtgcatatgttcattttgaacaaataagttcagcccctgctcctttgtaatcatcatcttgtttagtttttcctgtagaggatgtctaccgtatactggctaatgaactacaatattaaaataattatttctgcaagcaagttgaaaaccaagaaaacaatatttgtttcataaatgtatggcatagatttccctgtttattattctttttatctgcaatagagaaatttcagtttctggaatatgttggtactgctaagctaaatggcaaataacatagagttcaatgtcattctttattgcatttacatttggtgatacgttatattgaacttttcttgcattaaaaagatagtatttttcccctctctcacaaggcagtaagtgaaagttgttcttttaaatggcatcattacaaaaagtaatttggtttcttaccaataaattggtaccttaggtactagaacctgtagtcattaaaacaaaagaaaataggcagatagcagaaacaaaagaatgacaggaaagaaggaaggaaagaggggagtgagggagggagggaagaagggagggatagagtcggggaatgagggggaaaggaggtttcatatgaatgaataagtacatacttttttccgggggaaaaaaacataaatgaaataagcaattggatgccagacccatgtgccaaatacctgaattggcatatggtatttgatatctgaacaacatcaaaaacgttaaccagtctgaagcatgatttacattctttctcagtaacaaagacatttacaattttcctgctactcaaagcattaaatcaacacagaactgaaagctgcattttgttttatttatttagaactgcagtcaggtatttaatttcttttctgtgtgtttgtttgttttttgagatggcatcttgctctgttgctcaagctggaatgcagcggcaagatctctgctcactgcaacctccacttcctgggttcaagcgattctcctgcctcaagcctctcgagtagctgggactacaggcttgtgccaccacgcctggctaatttgtgtatttttagtagagacgtggtgtcgccatgttggccaggctagtcttgaactcctgaccttgggagatccgccgattaggcctcccaaagtgttgggattacaggcgtgagataccacacccagccaggtatttaatttcataagtgtgcatatgcatatatgaggcgttagggttatatactatggcatatctttagagagatataaagatatatatacatacacacacacacacacacacacacacacacacacatcgcttgcaaataaaacttcaaccaaaacattatgtagtccataacagcacatgtataccataatgatgaatgatcctacttgtttgtcaaagttagagcagcatggtcatttaaaaaccatatctactttgacaagggaaacagactctcaaaatatctccattaatgaataaatcacaattttgaaacaggcagaatctccatcttccaagctttaacaatgtttataaaaaacctaatatagcaggtaggtattgggtgacaatgaataaaaagactttcagtgggggggaaggaaaataactaagtatagttttcaagcaatgtcttcatgacatttataagaactatcaaacagctacaaattctagaaattctccaaataatgagaaaatgtatagataatcttcttagccttggaataaaacttaaggcatgaaacaaaatatgaactatggtttttattcttgagatactgtacttcagggctatgtttaccacagacaagacattcagattaaactcagaagaaaatcacctggttattttgtcctgggtcacacaggtaggtaatgcaaatgatggaactcaagcatcttctgattacaaattacacaagctggctccgaggcacagtgggatccctaggtctcagacacacttgaagagttgaatggattttcttcatactccaagatatttgtagaatcactcaatcttaaatgaaaaaatcaaaatgatcaggaagatctagcgaatgtctcagagttcgtttgtcatgttacattttgttccatgactttgctgtgttattcaatattttggaggtaaaggagaagagggtctatgggaatattttaataaaatatagatttttaatttttatttttaatgtggagaaaaggcacaggatcttagggcaaagccatggtttagggatgagctttggctccaggtgacacagggaggtcaatgatgtatttgtacgtgacacctcatgcaagaagaatacttcgtggcaacattggaggcttaaaagagataagtaatataaatgtgcctggacaaaacaggtgctcagtagtagttagttatcatgactattcattcacaaagtgaaactggattggcttgctcatagggactgctcctggaagttgttcagagtttctgaatttctttggcttatctcttaattacattttttttttaacaacacctcacatccttaagctagcagactgaccatcaatagattttcaatacagtttgaaagtcttaacatatattacagaactaaagtgagctctgatgacttttaatataaacagcattggctattttcgatttccactcccaaaaggctactactgacaagcaaaagttaaaggcatctacacaaattgaagtggttctacaagcaagtgtaaattgatcaacagtggtagtagaaataatgatgcaacttcaaagtggttgtttaaggcactcatagatcaaaaaatatatataaatatttgatgcctctgaattccttaaaaaaactatagtaattttaaacatgaaaatgtttaaattggaacatttattatgaaaattaattaaactgaattaatatatattttaattaacactataattattatagaatgaaataacagtgaaaaagttagaaaacctgttcagtttttgataaagtatatggaaatagattaagcagggctcttgagtaaattatttcattgatttgtatctatttaggtaggtgagagttgcatagaatcagtggcgagaaggatcagtgaaataaatttacaacttcagtgaagaccaggtaatgagcattgatctatgaatacagactttcttcagtgactatttcccctaaaactcccagctcaccgcagcactgctgcttcaagattccagttattggcgtgctagccaagtagaaggtcatttttaccgaaacgcaaatttcaacttatggccattttctactgaccatttcactgcaaaatggataaaacaataggaaatataaactacagcaaaagttaaagctctatatggacgttaaaagaaaacctcttgctttctttttcttcctttttctcttgttttctttttctacctttttctgcatatggcatttattttcatatcatgataagcattctcatgtttgcacttaattttccttatttctatttttcttagatttgttgatgttgtgtggcatattaaaagtaggaaggactgtataaactcatgtattatttttaaattgtttttctgaatgtactcaagtacttttttatgtgaatatgaacacggaataaaagtactaaaaccagttaattatgagagactaagaatgtggaaaggaacattccggagtatattagtagctaaagaaatgccttggatcttaaatttcaacttctaaaattattaaaatacaaatattaaaaagatatagaggccactgctaaa

SEQ ID NO: 132103 - DNA, 4013 bp, Homo sapiens
  Payload ID: 5788
  Gene Symbol: FAM155B
  Gene Name: family with sequence similarity 155, member B
  Uniprot ID: O75949
  ENST ID: ENST00000252338
  CDS Start-End: 43-1461
ctcgcgcctgcctgttccctccagcccggacccccctgaaatatgttcaggggcgcttggatgtggcccgggaaagacgccgccgcgctgactatctgctgctgctgctgctgctgggctcccaggccgagcgacaaaccttgcgccgactccgagcgggcgcagcgatggcgactgtccctggcgtccctgctcttcttcaccgtgctgctcgctgaccatctgtggctgtgcgcgggggcccggccccgggccagggagctgagcagcgccatgcggcccccatggggggccggccgggagcggcagccggtgcctcctcgcgcggtgctgccgctgccgccgccgccgcccggcgagcccagcgcgcccccaggcacctgcggccccagatacagcaacctgaccaaagccgcccccgccgccggctctcggccggtctgcggcggcgtcccagagcccacggggctggacgcagcttgcaccaaattgcaatctttgcagagacttttcgaaccgactactccggccccccctctgcggccccctgactccctttcccgtgccccggccgagttcccctccgccaaaaaaaacttgctcaaaggccactttcggaacttcactctctccttttgcgacacctacacggtctgggacttgctgctgggcatggaccgccccgacagcctggactgtagcctggacaccctgatgggggacctgctggccgtggtggccagcccgggctccggggcctgggaggcgtgtagcaactgtatcgaggcgtaccagcggctggaccgacacgctcaggaaaaatatgacgagttcgacctcgtgctgcataaatacttacaggcggaagagtactcaatccggtcctgcacgaaaggctgtaaggctgtctacaaggcctggctgtgctcagaatacttcagcgtgacccagcaggaatgccagcgctgggtgccctgcaagcaatactgcctggaggtgcagacccggtgcccctttatactccccgacaatgaggaaatggtgtacggagggctccctggctttatctgtacagggttgctggatacttcaccaaagcgtctggaaaccaagtgctgtgacgtgcagtgggtctcctgtgaggcgaagaagaagaagttcaaggagtctgaggcccccaaaacccaccagcagcaattccaccactcctatttccaccactaccaccaacagtaccatcactaccacccccatcatgatcccccaggccgtgtcagcaacaagcccgccctgctgccggtctctgggggctcccgcctcagccctagcaggatccggctctgcgtccttgttctcatgctcctccataccgtggtgtccttctccagcaaccagggtggtgggggattggggctggagacactgcctgccctagaggagggcctgacacgggaagagtgacagtagggagggaggacagacctccaccacactgacatcagctccagctcccccaggttgggggggagggggctcctcccatgggaggtgtaggataaggtgggggcgggggaaatgggggaatgacacatcccccccaacctacccccaccccaaaagcagctccaacagaatggccagagggcctcagggagctgcaaaactcatccaggagaaaaaggcaggagcagcaagtgacccctcccaagctcccatctatggggcttagcaaaaaaagggaggaagtgggggctggatatgcccacccctgccaaaagccctgaccccagggaaggaggctgctcacccagccttggccctgcagggaatgttggggggcacagaggggagaagctctttcccccactccacattccttttgttgccaagatccttaattccctcctgcccatatccctacaggcgacggcagacagtgcaatggccctcctgccacttcagcacaccttgccccacctgggaccatcacacgtgaagcaccaggctgggagatgaggtgcacacagttgcagctaggtcggggccccagttaagctgtgccccaccaccctaggcaatgaggggcaggaaaggggtacagaatgaatggtgaaagagagtggagatacggaagggggagaggagaggagaaatgtggacagagggcttgaagacatggccgaataggctactgccacccggctttggggagatgggcgataagtgttgaggtaggctcgagaactgctccccaaatcagtgagaattgcattaggagccctctggggaaagagcacaggaactgagttgctgggcctcaaaacaaaaggctgcaggcacatggttagactgccgctgtctgaaggaccatatcttacagaaggtgcacatactcccaagggccactcttgccctggagatcttggccttggggccaaagacatttccatttccgatctccatggggaggagggacttaagcccaagtgggtcaggcctggcccaggtccttatactcccctatcttgtcctagcccaggcctccatgaaggagaacctggtggcattgccccagagctctccagagatgagcctcccctatccccaccctgtccccgtccccagcctaccaaagagtattcacacctttccatccctgactctatgggttactgtcccaattgcgaaacacccatactcctcttcaccctgtagcagggtcttctgctccagtcaccccggcctcttgcaagagaaagtccagggactggcaagaagaccctttgactaaagataatgtgctgtcatatcttggctgagaaactgttgagtcaggctagaggactggacaagagaagaggcattgagagcccccttgggagccattagccttgctctggtctgctgtgtggggttggggagtaggggggatcccacattgcctgggacatctgaatgctgatacgaatggacaggaaagggagccagagctgtatacctgggacaggccagggagcctttagtgccagcagggcctgtgtcctgggatgtgatgctagtgagtgaatgggagggcgggcctggagctgcgtgagagtgaaaccaagaagcggatggggaagggagagctggccttggtcagcttagggatgaatggagaaggaatcattcatgggcctcggctaggtcccagactgattacatgagactggggagtccttccctgccagttttctcatttattacagcctatcccccaaccctacccctgtgccctgcctacacactcccgtttggccctcagcactttgggcctggtcacataccccatccctagagtgctcttttcagctggggaggggaagaggtgctggctcctttccagacatgcttatgtataagtaaaggggcaggtgcttgggctccagagagaccctaggtactgccttctaactcctgcatcctcagaaggggaaaagggactgggaagtaaagggaaaccatatggccccagggaatggacccttggagactcccatcctctcttccccctcaccaagtgcccaggagacccctggctcagaccagcccaaggccttgcccagtggcaggggaaaggggcacctcactccacctcaaagtcatttgactgcccccatccaccccaccaccctaatcttccaccacctctccggctgcccctgccctccatcacagacagcagagccgggcagctttcttatgccattttctacactgtgcttcatgagtaggactttcttgcactagttcctatgactgagtctccaaactggtttcctagtagtcccccatcccttcctcccttacccagctatgattcagttgtctctgccctccctcttaccctgcctctgtgtttcggtgagagtctctgtatatgtactgctttctgttttgttgcattgtggggcagaggcctctctgctcttgtttaaccccataaagaaataaatggtaagacttgatgataa

SEQ ID NO: 132104 - DNA, 2942 bp, Homo sapiens
  Payload ID: 5789
  Gene Symbol: FAM156A
  Gene Name: family with sequence similarity 156, member A
  Uniprot ID: Q8NDB6
  ENST ID: ENST00000596733
  CDS Start-End: 1612-2253
gagaacgcgcgtgagagagcccgagagagacggagagcgagcgagcgcgcgggagagactgagagcgggggggtgggagagagacttccagagagacagagcgagaggccgagacggaggctgtccctagcacaggccagggtgtcttgggactcgaatccctgggttgggctggccgggagtggggctttcgaaggaagcgggtgattttccacgtcgtccatatctccccggtgtgggaatggcggtcgtgcactctgggggtggcgttgttctcgttccctacttgggggtggcctttttcagcggagaaagaggatgccgcgggcattggtagccggcgggactacacttgggctaggatcagtgttcagcgggttcagaaatcaccgtgtccttggcatcacctccctccccacctcctctcccatcgcacagcaggagacagtgactggagggttttcaaggaggactgcattgcccctattgaaacaaaccgtccgacaaaccctttctccgacgtgtgacagagggacggtcgtaatgtgaaatacgactagacatgcgtttaatgggcggtgtgattgctgcattcgtgcgcaatgaatggtccaggccatttgtgtccagtagccgcacaagctgcagggtctcatgtttagagagggagggcctctccgccgtccaccttgctggagtacaggcgaccctgggcggtagccctctccgccatcagaaatgtggtgctctgagtagccacagattcccatctgcatctccaataccatttccctctactcactgacccgttgggtgcgttggatttgtgcgtgggtgtgagggtagtttggtgtgtttgcttgcaaatggaaaagcgaatggccttggttggctgagcttatcagggcactagcagtggagagagaaaggactactgtattcttaggagcagaatctcaacaacttcctataaaacgggcagtgtgtcttacctggaatgctttggcatttaataaaatgtcctgtgaatacttttcatagggaagcactttgtttttactgtttctggttggacagtggttacatttcaaatcgtagttcagaattcgtgaaatacccaaattaaatctctacgtggcagtaatccattttctttccttggtgtgtggttggaagattaatttgagataagtgttcagttctgggctgggcagtcgtgccgggcacgggaaattcaggttctttaagggaaaggcctgatgtgctaagacgaaatctataccgtgtgtagccgcttatgagaatatgaaactaaggagagccacaggtgaaaggtgtagcagtcactcggcctacacccacagcatcgaccttgtgaacccagcgacctgactgccttgggagaattgaagcgaatgagagtggggagtgtgagaggtgcgtttggtgcagcatttctggcatgggaacagaactggccaggaggaagtgacgtctgggttctgcccgcacacattcctcgccaccttcttggtgtctgagaacctccagcttcacctccttttctggacccgagggcctggcggagcttccagctgggaccagacctccatggatccactccagaaacggaatccagcatcgccttccaaatcttccccgatgacagctgcagagacttcccaggaaggtccagcgccctctcagccttcgtactcagaacagccgatgatgggcctcagtaacctgagccccggtcctggccccagccaggccgtgcctctcccagaggggctgctccgccagcggtacagagaggagaagaccctggaagagcggcggtgggagaggctggagttccttcagaggaagaaagcattcctgcggcatgtgaggaggagacaccgcgatcacatggccccctatgctgttgggagggaagccagaatctccccattaggtgacagaagtcagaatcgattccgatgtgaatgtcgatactgccagagccacaggccgaatctttctgggatccctggggagagtaacagggccccacatccctcctcctgggagacgctggtgcagggcctcagtggcttgactctcagcctaggcaccaaccagcccgggcctctgcctgaagcggcactccagccacaggagacagaggagaagcgccagcgagagaggcagcaggagagcaaaataatgtttcagaggctgctcaagcagtggttagaggaaaactgagacgtgcacccccatgggatggagacccgaagggactcagacggagccgccgtgttggcagcgcctgggtgtgggcccattttggggaccaaacagcaagctgtggtcggatgagtgccaggacctgtgtaccgggacacgtgggagtcctcccagcatgatgcttgactgacccgaggaaggtcctcatgtttcgtgcctgtcattctcggatggctgtgaggcattccttggcaagggacgctgcgtaccagcggtcctcaccgcatctcacatggctcctgtgatgcatgttgtcgctttcccacccgggatctccatctctcttcccttcctgctgtcagtaagagatcacatgtctgtgtagtgtgaatgccttgtcgctgtcctgtgcttttgcaccattgagttgactgcctctgagaagcagcactaggcctgttgaaatgcaatgtgctgccctgagatccagtttcaagaatgggcaggtaaacgcagtgtgggaaaggaatgtggaatgagaacttggtggttcaccgctgtactatttgtgtaaatgtttacgtatgtgataagctacatgtatgtaaatgttgcaatacccctaacagtcgagtagtagtctcccttacaggaatttttgacggggttcctcatcatcaataccaaataaatatatgtaggaatgg

SEQ ID NO: 132105 - DNA, 848 bp, Homo sapiens
  Payload ID: 5789
  Gene Symbol: FAM156A
  Gene Name: family with sequence similarity 156, member A
  ENST ID: ENST00000622323
  CDS Start-End: 733-848
gattgcggagctgaagttcaggcagcgggagcgaggaggatggactcaccctgtcacccaggttggactgcactggcctcaacctcctgagttcaagtgatcgtcccacctcagcctccccagtagctgggaccatagctgtgcagcatcatgcctggctaattttttaagttttttgttgagatggtggtctcgccctgttgctcaggctggcctcaaactcctgggctgaagcagtcctcccacctcagcctcccaaagtgcttggattagaggcgtgagccaccattcctggctccttggacaatattttattcctcagattaagacacgtccttgggatggggctgcattggataattcaccgaaggcaccgctgaatggagtgggccctcagtaaatacctggaggaatgtgacctggccagtgaggttattttcttttgtaggtgaaaggtgtagcagtcactcggcctacacccacagcatcgaccttgtgaacccagcgacctgactgccttgggagaattgaagcgaatgagagtggggagtgtgagaggtgcgtttggtgcagcatttctggcatgggaacagaactggccaggaggaagtgacgtctgggttctgcccgcacacattcctcgccaccttcttggtgtctgagaacctccagcttcacctccttttctggacccgagggcctggcggagcttccagctgggaccagacctccatggatccactccagaaacggaatccagcatcgccttccaaatcttccccgatgacagctgcagagacttcccaggaaggtccagcgccctctcagccttcgtactcagaacagcc

SEQ ID NO: 132106 - DNA, 2098 bp, Homo sapiens
  Payload ID: 5789
  Gene Symbol: FAM156A
  Gene Name: family with sequence similarity 156, member A
  Uniprot ID: Q8NDB6
  ENST ID: ENST00000615092
  CDS Start-End: 768-1409
agtttgtgacaggcacgacgattgcggagctgaagttcaggcagcgggagcgaggagggtgtgtggcttttgatacagtagagttctttggcctactcaccaactgacagtcccaaaggggctggagatgccaccccggcaaagttcgccctagtcatttgcttcacatggactcaccctgtcacccaggttggactgcactggcctcaacctcctgagttcaagtgatcgtcccacctcagcctccccagtagctgggaccatagctgtgcagcatcatgcctggctaattttttaagttttttgttgagatggtggtctcgccctgttgctcaggctggcctcaaactcctgggctgaagcagtcctcccacctcagcctcccaaagtgcttggattagaggcgtgagccaccattcctggctccttggacaatattttattcctcagattaagacacgtccttgggatggggctgcattggataattcaccgaaggcaccgctgaatggagtgggccctcagtaaatacctggaggaatgtgacctggccagtgaggttattttcttttgtaggtgaaaggtgtagcagtcactcggcctacacccacagcatcgaccttgtgaacccagcgacctgactgccttggtctgggttctgcccgcacacattcctcgccaccttcttggtgtctgagaacctccagcttcacctccttttctggacccgagggcctggcggagcttccagctgggaccagacctccatggatccactccagaaacggaatccagcatcgccttccaaatcttccccgatgacagctgcagagacttcccaggaaggtccagcgccctctcagccttcgtactcagaacagccgatgatgggcctcagtaacctgagccccggtcctggccccagccaggccgtgcctctcccagaggggctgctccgccagcggtacagagaggagaagaccctggaagagcggcggtgggagaggctggagttccttcagaggaagaaagcattcctgcggcatgtgaggaggagacaccgcgatcacatggccccctatgctgttgggagggaagccagaatctccccattaggtgacagaagtcagaatcgattccgatgtgaatgtcgatactgccagagccacaggccgaatctttctgggatccctggggagagtaacagggccccacatccctcctcctgggagacgctggtgcagggcctcagtggcttgactctcagcctaggcaccaaccagcccgggcctctgcctgaagcggcactccagccacaggagacagaggagaagcgccagcgagagaggcagcaggagagcaaaataatgtttcagaggctgctcaagcagtggttagaggaaaactgagacgtgcacccccatgggatggagacccgaagggactcagacggagccgccgtgttggcagcgcctgggtgtgggcccattttggggaccaaacagcaagctgtggtcggatgagtgccaggacctgtgtaccgggacacgtgggagtcctcccagcatgatgcttgactgacccgaggaaggtcctcatgtttcgtgcctgtcattctcggatggctgtgaggcattccttggcaagggacgctgcgtaccagcggtcctcaccgcatctcacatggctcctgtgatgcatgttgtcgctttcccacccgggatctccatctctcttcccttcctgctgtcagtaagagatcacatgtctgtgtagtgtgaatgccttgtcgctgtcctgtgcttttgcaccattgagttgactgcctctgagaagcagcactaggcctgttgaaatgcaatgtgctgccctgagatccagtttcaagaatgggcaggtaaacgcagtgtgggaaaggaatgtggaatgagaacttggtggttcaccgctgtactatttgtgtaaatgtttacgtatgtgataagctacatgtatgtaaatgttgcaatacccctaacagtcgagtagtagtctcccttacaggaatttttgacggggttcctcatcatcaataccaaataaatatatgtaggaatgg

SEQ ID NO: 132107 - DNA, 567 bp, Homo sapiens
  Payload ID: 5789
  Gene Symbol: FAM156A
  Gene Name: family with sequence similarity 156, member A
  ENST ID: ENST00000622732
  CDS Start-End: 233-567
acgattgcggagctgaagttcaggcagcgggagcgaggagggtgaaaggtgtagcagtcactcggcctacacccacagcatcgaccttgtgaacccagcgacctgactgccttggtctgggttctgcccgcacacattcctcgccaccttcttggtgtctgagaacctccagcttcacctccttttctggacccgagggcctggcggagcttccagctgggaccagacctccatggatccactccagaaacggaatccagcatcgccttccaaatcttccccgatgacagctgcagagacttcccaggaaggtccagcgccctctcagccttcgtactcagaacagccgatgatgggcctcagtaacctgagccccggtcctggccccagccaggccgtgcctctcccagaggggctgctccgccagcggtacagagaggagaagaccctggaagagcggcggtgggagaggctggagttccttcagaggaagaaagcattcctgcggcatgtgaggaggagacaccgcgatcacatggccccctatgctgttgggagggaagccag

SEQ ID NO: 132108 - DNA, 896 bp, Homo sapiens
  Payload ID: 5789
  Gene Symbol: FAM156A
  Gene Name: family with sequence similarity 156, member A
  ENST ID: ENST00000612846
  CDS Start-End: 343-896
gccacagattcccatctgcatctccaataccatttccctctactcactgacccgttgggtgaaaggtgtagcagtcactcggcctacacccacagcatcgaccttgtgaacccagcgacctgactgccttgggagaattgaagcgaatgagagtggggagtgtgagaggtgcgtttggtgcagcatttctggcatgggaacagaactggccaggaggaagtgacgtctgggttctgcccgcacacattcctcgccaccttcttggtgtctgagaacctccagcttcacctccttttctggacccgagggcctggcggagcttccagctgggaccagacctccatggatccactccagaaacggaatccagcatcgccttccaaatcttccccgatgacagctgcagagacttcccaggaaggtccagcgccctctcagccttcgtactcagaacagccgatgatgggcctcagtaacctgagccccggtcctggccccagccaggccgtgcctctcccagaggggctgctccgccagcggtacagagaggagaagaccctggaagagcggcggtgggagaggctggagttccttcagaggaagaaagcattcctgcggcatgtgaggaggagacaccgcgatcacatggccccctatgctgttgggagggaagccagaatctccccattaggtgacagaagtcagaatcgattccgatgtgaatgtcgatactgccagagccacaggccgaatctttctgggatccctggggagagtaacagggccccacatccctcctcctgggagacgctggtgcagggcctcagtggcttgactctcagcctaggcaccaaccagcccgggcctctgcctgaagcggcactccagccacagga

SEQ ID NO: 132109 - DNA, 865 bp, Homo sapiens
  Payload ID: 5789
  Gene Symbol: FAM156A
  Gene Name: family with sequence similarity 156, member A
  ENST ID: ENST00000619586
  CDS Start-End: 854-865
ggttggaagattaatttgagataagtgttcagttctgggctgggcagtcgtgccgggcacgggaaattcaggttctttaagggaaaggcctgatgtgctaagacgaaatctataccgtgtgtagccgcttatgagaatatgaaactaaggagagccacagatggactcaccctgtcacccaggttggactgcactggcctcaacctcctgagttcaagtgatcgtcccacctcagcctccccagtagctgggaccatagctgtgcagcatcatgcctggctaattttttaagttttttgttgagatggtggtctcgccctgttgctcaggctggcctcaaactcctgggctgaagcagtcctcccacctcagcctcccaaagtgcttggattagaggcgtgagccaccattcctggctccttggacaatattttattcctcagattaagacacgtccttgggatggggctgcattggataattcaccgaaggcaccgctgaatggagtgggccctcagtaaatacctggaggaatgtgacctggccagtgaggttattttcttttgtaggtgaaaggtgtagcagtcactcggcctacacccacagcatcgaccttgtgaacccagcgacctgactgccttgggagaattgaagcgaatgagagtggggagtgtgagaggtgcgtttggtgcagcatttctggcatgggaacagaactggccaggaggaagtgacgtctgggttctgcccgcacacattcctcgccaccttcttggtgtctgagaacctccagcttcacctccttttctggacccgagggcctggcggagcttccagctgggaccagacctccatggatccactc

SEQ ID NO: 132110 - DNA, 2635 bp, Homo sapiens
  Payload ID: 5789
  Gene Symbol: FAM156A
  Gene Name: family with sequence similarity 156, member A
  Uniprot ID: Q8NDB6
  ENST ID: ENST00000613284
  CDS Start-End: 208-849
agcgggcggcgctgcgtttccagggcagaggaaacgaggcgccgcgttggcgcttggacggcgggaaccggctccggagcgagaacgcgctctgggttctgcccgcacacattcctcgccaccttcttggtgtctgagaacctccagcttcacctccttttctggacccgagggcctggcggagcttccagctgggaccagacctccatggatccactccagaaacggaatccagcatcgccttccaaatcttccccgatgacagctgcagagacttcccaggaaggtccagcgccctctcagccttcgtactcagaacagccgatgatgggcctcagtaacctgagccccggtcctggccccagccaggccgtgcctctcccagaggggctgctccgccagcggtacagagaggagaagaccctggaagagcggcggtgggagaggctggagttccttcagaggaagaaagcattcctgcggcatgtgaggaggagacaccgcgatcacatggccccctatgctgttgggagggaagccagaatctccccattaggtgacagaagtcagaatcgattccgatgtgaatgtcgatactgccagagccacaggccgaatctttctgggatccctggggagagtaacagggccccacatccctcctcctgggagacgctggtgcagggcctcagtggcttgactctcagcctaggcaccaaccagcccgggcctctgcctgaagcggcactccagccacaggagacagaggagaagcgccagcgagagaggcagcaggagagcaaaataatgtttcagaggctgctcaagcagtggttagaggaaaactgagacgtgcacccccatgggatggagacccgaagggactcagacggagccgccgtgttggcagcgcctgggtgtgggcccattttggggaccaaacagcaagctgtggtcggatgagtgccaggacctgtgtaccgggacacgtgggagtcctcccagcatgatgcttgactgacccgaggaaggtcctcatgtttcgtgcctgtcattctcggatggctgtgaggcattccttggcaagggacgctgcgtaccagcggtcctcaccgcatctcacatggctcctgtgatgcatgttgtcgctttcccacccgggatctccatctctcttcccttcctgctgtcatctgttttaggtagtccccagagctgtcttgctgcaaaagtctacacatctcctgccgacagaagtggcttgaaaacaggcttatgaagctaatgtcacctattggctctgctcaccttttcctgtcaattgtattttacaactcctccatttcctaccctggaagaaatctctccaccagtacggctgccatttgaggcatattcccatacaaactggacctctgacgactctaaaaaaggaacacaccctacccaggatacgcaccaaaggagatgaacttgtttttatccaaaggaagtgtttgtttgtaatcataaatttgtgagcctaagctactgcaaaggaaactggccaggttattagcccaaatgaaggcagtgggtaacttgggtttagccccaacaccagccgcacctaggaaagttacatgataaattgtgacaattgtttttttcccccccggagaataccaaagcaattcatactttgttgtgggttcactgcctttttttttttaaccagccaattggatagtcatgttatcttacccatctctttctccctttctgattatacatttgcatagagttatgacaacttaccaccttttcagaagtagagtaaaactctcactcctagacagaacaatccattgtcaggagtgagaacatccctctgcaaaacagccattctctccaggaaaacaacaggaactgtctgaagaagctaaaagacttggaatggttttagatgtgttcgcccccaacagggacaggtctcaggttgcaggcttttctggcaatccagctctgtgggttactgaagaagctcaacccaattcctgagttttccatgctctcattcatgaagccaaccaagtcaccagtgatgtcacgaaaaatattaacacaatcactcaagaaatgcaagaactccagaggctgttgtccatcatcaactggcattagccatcatccgggcagatctaggagatggatgcacttgtgcagttgtcaatgacgactgctgtacatatatcccccaacacctttctgatgtctttttgatgaattgccacctagtcctgatctctgggacctctgggttatcattgggtggctgagaatatgaccttttcccttgaatattcccaacagggatacagtcctggggatgcactgcttttccaagatatagtgataatttttctttttattctcataggaatactcctcatgaagtctatccagtcacatctagttaagaccagcagcactctcctgtccaaatggatgacccatgttacgactaaggaacagaagaccaaataacaaactgctcctcagatccattatggaggccttcttggctcaattcctgaatatgatatatccttataattttgttttctctccaaaaaagaatatgctggcaatgaaa

SEQ ID NO: 132111 - DNA, 1685 bp, Homo sapiens
  Payload ID: 5789
  Gene Symbol: FAM156A
  Gene Name: family with sequence similarity 156, member A
  Uniprot ID: Q8NDB6
  ENST ID: ENST00000611661
  CDS Start-End: 351-992
acaggcacgacgattgcggagctgaagttcaggcagcgggagcgaggagggtgtgtggcttttgatacagtagagttctttggcctactcaccaactgacagtcccaaaggggctggagatgccaccccggcaaagttcgccctagtcatttgcttcacgtgaaaggtgtagcagtcactcggcctacacccacagcatcgaccttgtgaacccagcgacctgactgccttggtctgggttctgcccgcacacattcctcgccaccttcttggtgtctgagaacctccagcttcacctccttttctggacccgagggcctggcggagcttccagctgggaccagacctccatggatccactccagaaacggaatccagcatcgccttccaaatcttccccgatgacagctgcagagacttcccaggaaggtccagcgccctctcagccttcgtactcagaacagccgatgatgggcctcagtaacctgagccccggtcctggccccagccaggccgtgcctctcccagaggggctgctccgccagcggtacagagaggagaagaccctggaagagcggcggtgggagaggctggagttccttcagaggaagaaagcattcctgcggcatgtgaggaggagacaccgcgatcacatggccccctatgctgttgggagggaagccagaatctccccattaggtgacagaagtcagaatcgattccgatgtgaatgtcgatactgccagagccacaggccgaatctttctgggatccctggggagagtaacagggccccacatccctcctcctgggagacgctggtgcagggcctcagtggcttgactctcagcctaggcaccaaccagcccgggcctctgcctgaagcggcactccagccacaggagacagaggagaagcgccagcgagagaggcagcaggagagcaaaataatgtttcagaggctgctcaagcagtggttagaggaaaactgagacgtgcacccccatgggatggagacccgaagggactcagacggagccgccgtgttggcagcgcctgggtgtgggcccattttggggaccaaacagcaagctgtggtcggatgagtgccaggacctgtgtaccgggacacgtgggagtcctcccagcatgatgcttgactgacccgaggaaggtcctcatgtttcgtgcctgtcattctcggatggctgtgaggcattccttggcaagggacgctgcgtaccagcggtcctcaccgcatctcacatggctcctgtgatgcatgttgtcgctttcccacccgggatctccatctctcttcccttcctgctgtcagtaagagatcacatgtctgtgtagtgtgaatgccttgtcgctgtcctgtgcttttgcaccattgagttgactgcctctgagaagcagcactaggcctgttgaaatgcaatgtgctgccctgagatccagtttcaagaatgggcaggtaaacgcagtgtgggaaaggaatgtggaatgagaacttggtggttcaccgctgtactatttgtgtaaatgtttacgtatgtgataagctacatgtatgtaaatgttgcaatacccctaacagtcgagtagtagtctcccttacaggaatttttgacggggttcctcatcatcaataccaaataaatatatgtaggaatggaaaa

SEQ ID NO: 132112 - DNA, 2032 bp, Homo sapiens
  Payload ID: 5789
  Gene Symbol: FAM156A
  Gene Name: family with sequence similarity 156, member A
  Uniprot ID: Q8NDB6
  ENST ID: ENST00000617970
  CDS Start-End: 698-1339
aattacgagcgggcggcgctgcgtttccagggcagaggaaacgaggcgccgcgttggcgcttggacggcgggaaccggctccggagcgagaacgcgcatggactcaccctgtcacccaggttggactgcactggcctcaacctcctgagttcaagtgatcgtcccacctcagcctccccagtagctgggaccatagctgtgcagcatcatgcctggctaattttttaagttttttgttgagatggtggtctcgccctgttgctcaggctggcctcaaactcctgggctgaagcagtcctcccacctcagcctcccaaagtgcttggattagaggcgtgagccaccattcctggctccttggacaatattttattcctcagattaagacacgtccttgggatggggctgcattggataattcaccgaaggcaccgctgaatggagtgggccctcagtaaatacctggaggaatgtgacctggccagtgaggttattttcttttgtaggtgaaaggtgtagcagtcactcggcctacacccacagcatcgaccttgtgaacccagcgacctgactgccttggtctgggttctgcccgcacacattcctcgccaccttcttggtgtctgagaacctccagcttcacctccttttctggacccgagggcctggcggagcttccagctgggaccagacctccatggatccactccagaaacggaatccagcatcgccttccaaatcttccccgatgacagctgcagagacttcccaggaaggtccagcgccctctcagccttcgtactcagaacagccgatgatgggcctcagtaacctgagccccggtcctggccccagccaggccgtgcctctcccagaggggctgctccgccagcggtacagagaggagaagaccctggaagagcggcggtgggagaggctggagttccttcagaggaagaaagcattcctgcggcatgtgaggaggagacaccgcgatcacatggccccctatgctgttgggagggaagccagaatctccccattaggtgacagaagtcagaatcgattccgatgtgaatgtcgatactgccagagccacaggccgaatctttctgggatccctggggagagtaacagggccccacatccctcctcctgggagacgctggtgcagggcctcagtggcttgactctcagcctaggcaccaaccagcccgggcctctgcctgaagcggcactccagccacaggagacagaggagaagcgccagcgagagaggcagcaggagagcaaaataatgtttcagaggctgctcaagcagtggttagaggaaaactgagacgtgcacccccatgggatggagacccgaagggactcagacggagccgccgtgttggcagcgcctgggtgtgggcccattttggggaccaaacagcaagctgtggtcggatgagtgccaggacctgtgtaccgggacacgtgggagtcctcccagcatgatgcttgactgacccgaggaaggtcctcatgtttcgtgcctgtcattctcggatggctgtgaggcattccttggcaagggacgctgcgtaccagcggtcctcaccgcatctcacatggctcctgtgatgcatgttgtcgctttcccacccgggatctccatctctcttcccttcctgctgtcagtaagagatcacatgtctgtgtagtgtgaatgccttgtcgctgtcctgtgcttttgcaccattgagttgactgcctctgagaagcagcactaggcctgttgaaatgcaatgtgctgccctgagatccagtttcaagaatgggcaggtaaacgcagtgtgggaaaggaatgtggaatgagaacttggtggttcaccgctgtactatttgtgtaaatgtttacgtatgtgataagctacatgtatgtaaatgttgcaatacccctaacagtcgagtagtagtctcccttacaggaatttttgacggggttcctcatcatcaataccaaataaatatatgtaggaatggaaaa

SEQ ID NO: 132113 - DNA, 753 bp, Homo sapiens
  Payload ID: 5789
  Gene Symbol: FAM156A
  Gene Name: family with sequence similarity 156, member A
  ENST ID: ENST00000622197
  CDS Start-End: 360-753
ggcgcttggacggcgggaaccggctccggagcgagaacgcgcccgcttatgagaatatgaaactaaggagagccacaggtgaaaggtgtagcagtcactcggcctacacccacagcatcgaccttgtgaacccagcgacctgactgccttggaattgaagcgaatgagagtggggagtgtgagaggtgcgtttggtgcagcatttctggcatgggaacagaactggccaggaggaagtgacgtctgggttctgcccgcacacattcctcgccaccttcttggtgtctgagaacctccagcttcacctccttttctggacccgagggcctggcggagcttccagctgggaccagacctccatggatccactccagaaacggaatccagcatcgccttccaaatcttccccgatgacagctgcagagacttcccaggaaggtccagcgccctctcagccttcgtactcagaacagccgatgatgggcctcagtaacctgagccccggtcctggccccagccaggccgtgcctctcccagaggggctgctccgccagcggtacagagaggagaagaccctggaagagcggcggtgggagaggctggagttccttcagaggaagaaagcattcctgcggcatgtgaggaggagacaccgcgatcacatggccccctatgctgttgggagggaagccagaatctccccattaggtgacagaagtcagaatcgattccgatgtgaatgtcgatactgcc

SEQ ID NO: 132114 - DNA, 3757 bp, Homo sapiens
  Payload ID: 5789
  Gene Symbol: FAM156A
  Gene Name: family with sequence similarity 156, member A
  Uniprot ID: Q8NDB6
  ENST ID: ENST00000622447
  CDS Start-End: 2423-3064
gctgcgtttccagggcagaggaaacgaggcgccgcgttggcgcttggacggcgggaaccggctccggagcgagaacgcgcgtgagagagcccgagagagacggagagcgagcgagcgcgcgggagagactgagagcgggggggtgggagagagacttccagagagacagagcgagaggccgagacggaggctgtccctagcacaggccagggtgtcttgggactcgaatccctgggttgggctggccgggagtggggctttcgaaggaagcgggtgattttccacgtcgtccatatctccccggtgtgggaatggcggtcgtgcactctgggggtggcgttgttctcgttccctacttgggggtggcctttttcagcggagaaagaggatgccgcgggcattggtagccggcgggactacacttgggctaggatcagtgttcagcgggttcagaaatcaccgtgtccttggcatcacctccctccccacctcctctcccatcgcacagcaggagacagtgactggagggttttcaaggaggactgcattgcccctattgaaacaaaccgtccgacaaaccctttctccgacgtgtgacagagggacggtcgtaatgtgaaatacgactagacatgcgtttaatgggcggtgtgattgctgcattcgtgcgcaatgaatggtccaggccatttgtgtccagtagccgcacaagctgcagggtctcatgtttagagagggagggcctctccgccgtccaccttgctggagtacaggcgaccctgggcggtagccctctccgccatcagaaatgtggtgctctgagtagccacagattcccatctgcatctccaataccatttccctctactcactgacccgttgggtgcgttggatttgtgcgtgggtgtgagggtagtttggtgtgtttgcttgcaaatggaaaagcgaatggccttggttggctgagcttatcagggcactagcagtggagagagaaaggactactgtattcttaggagcagaatctcaacaacttcctataaaacgggcagtgtgtcttacctggaatgctttggcatttaataaaatgtcctgtgaatacttttcatagggaagcactttgtttttactgtttctggttggacagtggttacatttcaaatcgtagttcagaattcgtgaaatacccaaattaaatctctacgtggcagtaatccattttctttccttggtgtgtggttggaagattaatttgagataagtgttcagttctgggctgggcagtcgtgccgggcacgggaaattcaggttctttaagggaaaggcctgatgtgctaagacgaaatctataccgtgtgtagccgcttatgagaatatgaaactaaggagagccacaggtaagtatacgtctatgaatgcgaattaaaacgggtgacaatataaagagagattggtgtcacaaatggtggagtgacttttgtatttcagcagacctcagtgagaaatggtcaccaccactccctagatgtgtgaccttgagtgagttgcttaacctctctgatcctgttacctcatctgcaactggggatgagaatatatatcatagcatgccctgggagaagctgttcctgaccacctgggctatggtgattttgacttcctctgtgtcagaagtacccccgtctcatgcctgccatagttgtctttttgttttgttttgtgatttcagatggactcaccctgtcacccaggttggactgcactggcctcaacctcctgagttcaagtgatcgtcccacctcagcctccccagtagctgggaccatagctgtgcagcatcatgcctggctaattttttaagttttttgttgagatggtggtctcgccctgttgctcaggctggcctcaaactcctgggctgaagcagtcctcccacctcagcctcccaaagtgcttggattagaggcgtgagccaccattcctggctccttggacaatattttattcctcagattaagacacgtccttgggatggggctgcattggataattcaccgaaggcaccgctgaatggagtgggccctcagtaaatacctggaggaatgtgacctggccagtgaggttattttcttttgtaggtgaaaggtgtagcagtcactcggcctacacccacagcatcgaccttgtgaacccagcgacctgactgccttgggagaattgaagcgaatgagagtggggagtgtgagaggtgcgtttggtgcagcatttctggcatgggaacagaactggccaggaggaagtgacgtctgggttctgcccgcacacattcctcgccaccttcttggtgtctgagaacctccagcttcacctccttttctggacccgagggcctggcggagcttccagctgggaccagacctccatggatccactccagaaacggaatccagcatcgccttccaaatcttccccgatgacagctgcagagacttcccaggaaggtccagcgccctctcagccttcgtactcagaacagccgatgatgggcctcagtaacctgagccccggtcctggccccagccaggccgtgcctctcccagaggggctgctccgccagcggtacagagaggagaagaccctggaagagcggcggtgggagaggctggagttccttcagaggaagaaagcattcctgcggcatgtgaggaggagacaccgcgatcacatggccccctatgctgttgggagggaagccagaatctccccattaggtgacagaagtcagaatcgattccgatgtgaatgtcgatactgccagagccacaggccgaatctttctgggatccctggggagagtaacagggccccacatccctcctcctgggagacgctggtgcagggcctcagtggcttgactctcagcctaggcaccaaccagcccgggcctctgcctgaagcggcactccagccacaggagacagaggagaagcgccagcgagagaggcagcaggagagcaaaataatgtttcagaggctgctcaagcagtggttagaggaaaactgagacgtgcacccccatgggatggagacccgaagggactcagacggagccgccgtgttggcagcgcctgggtgtgggcccattttggggaccaaacagcaagctgtggtcggatgagtgccaggacctgtgtaccgggacacgtgggagtcctcccagcatgatgcttgactgacccgaggaaggtcctcatgtttcgtgcctgtcattctcggatggctgtgaggcattccttggcaagggacgctgcgtaccagcggtcctcaccgcatctcacatggctcctgtgatgcatgttgtcgctttcccacccgggatctccatctctcttcccttcctgctgtcagtaagagatcacatgtctgtgtagtgtgaatgccttgtcgctgtcctgtgcttttgcaccattgagttgactgcctctgagaagcagcactaggcctgttgaaatgcaatgtgctgccctgagatccagtttcaagaatgggcaggtaaacgcagtgtgggaaaggaatgtggaatgagaacttggtggttcaccgctgtactatttgtgtaaatgtttacgtatgtgataagctacatgtatgtaaatgttgcaatacccctaacagtcgagtagtagtctcccttacaggaatttttgacggggttcctcatcatcaataccaaataaatatatgtaggaatggaaaa

SEQ ID NO: 132115 - DNA, 644 bp, Homo sapiens
  Payload ID: 5789
  Gene Symbol: FAM156A
  Gene Name: family with sequence similarity 156, member A
  ENST ID: ENST00000619518
  CDS Start-End: 399-644
gatggtcttaacccttcaattacgagcgggcggcgctgcgtttccagggcagaggaaacgaggcgccgcgttggcgcttggacggcgggaaccggctccggagcgagaacgcgcgtgaaaggtgtagcagtcactcggcctacacccacagcatcgaccttgtgaacccagcgacctgactgccttgggagaattgaagcgaatgagagtggggagtgtgagaggtgcgtttggtgcagcatttctggcatgggaacagaactggccaggaggaagtgacgtctgggttctgcccgcacacattcctcgccaccttcttggtgtctgagaacctccagcttcacctccttttctggacccgagggcctggcggagcttccagctgggaccagacctccatggatccactccagaaacggaatccagcatcgccttccaaatcttccccgatgacagctgcagagacttcccaggaaggtccagcgccctctcagccttcgtactcagaacagccgatgatgggcctcagtaacctgagccccggtcctggccccagccaggccgtgcctctcccagaggggctgctccgccagcggtacagagaggagaagaccctggaagagcggcggtgggagaggctggag

SEQ ID NO: 132116 - DNA, 992 bp, Homo sapiens
  Payload ID: 5789
  Gene Symbol: FAM156A
  Gene Name: family with sequence similarity 156, member A
  ENST ID: ENST00000618601
  CDS Start-End: 825-992
gttggaaaaaagtcagaggctgagtcgttccaacatggcgcagatgccacaaggacactagcacaccagcaggaagctgaacagaaggctggaggtgccacggtgacaaggacgggatcctgtcaggccagatggactcaccctgtcacccaggttggactgcactggcctcaacctcctgagttcaagtgatcgtcccacctcagcctccccagtagctgggaccatagctgtgcagcatcatgcctggctaattttttaagttttttgttgagatggtggtctcgccctgttgctcaggctggcctcaaactcctgggctgaagcagtcctcccacctcagcctcccaaagtgcttggattagaggcgtgagccaccattcctggctccttggacaatattttattcctcagattaagacacgtccttgggatggggctgcattggataattcaccgaaggcaccgctgaatggagtgggccctcagtaaatacctggaggaatgtgacctggccagtgaggttattttcttttgtaggtgaaaggtgtagcagtcactcggcctacacccacagcatcgaccttgtgaacccagcgacctgactgccttgggagaattgaagcgaatgagagtggggagtgtgagaggtgcgtttggtgcagcatttctggcatgggaacagaactggccaggaggaagtgacgtctgggttctgcccgcacacattcctcgccaccttcttggtgtctgagaacctccagcttcacctccttttctggacccgagggcctggcggagcttccagctgggaccagacctccatggatccactccagaaacggaatccagcatcgccttccaaatcttccccgatgacagctgcagagacttcccaggaaggtccagcgccctctcagccttcgtactcagaacagccgatgatgggcctcagtaacctgagccccggtcctggccccagccaggccgtg

SEQ ID NO: 132117 - DNA, 2233 bp, Homo sapiens
  Payload ID: 5789
  Gene Symbol: FAM156A
  Gene Name: family with sequence similarity 156, member A
  Uniprot ID: Q8NDB6
  ENST ID: ENST00000612915
  CDS Start-End: 903-1544
agtttgtgacaggcacgacgattgcggagctgaagttcaggcagcgggagcgaggaggattaatttgagataagtgttcagttctgggctgggcagtcgtgccgggcacgggaaattcaggttctttaagggaaaggcctgatgtgctaagacgaaatctataccgtgtgtagccgcttatgagaatatgaaactaaggagagccacagatggactcaccctgtcacccaggttggactgcactggcctcaacctcctgagttcaagtgatcgtcccacctcagcctccccagtagctgggaccatagctgtgcagcatcatgcctggctaattttttaagttttttgttgagatggtggtctcgccctgttgctcaggctggcctcaaactcctgggctgaagcagtcctcccacctcagcctcccaaagtgcttggattagaggcgtgagccaccattcctggctccttggacaatattttattcctcagattaagacacgtccttgggatggggctgcattggataattcaccgaaggcaccgctgaatggagtgggccctcagtaaatacctggaggaatgtgacctggccagtgaggttattttcttttgtaggtgaaaggtgtagcagtcactcggcctacacccacagcatcgaccttgtgaacccagcgacctgactgccttgggagaattgaagcgaatgagagtggggagtgtgagaggtgcgtttggtgcagcatttctggcatgggaacagaactggccaggaggaagtgacgtctgggttctgcccgcacacattcctcgccaccttcttggtgtctgagaacctccagcttcacctccttttctggacccgagggcctggcggagcttccagctgggaccagacctccatggatccactccagaaacggaatccagcatcgccttccaaatcttccccgatgacagctgcagagacttcccaggaaggtccagcgccctctcagccttcgtactcagaacagccgatgatgggcctcagtaacctgagccccggtcctggccccagccaggccgtgcctctcccagaggggctgctccgccagcggtacagagaggagaagaccctggaagagcggcggtgggagaggctggagttccttcagaggaagaaagcattcctgcggcatgtgaggaggagacaccgcgatcacatggccccctatgctgttgggagggaagccagaatctccccattaggtgacagaagtcagaatcgattccgatgtgaatgtcgatactgccagagccacaggccgaatctttctgggatccctggggagagtaacagggccccacatccctcctcctgggagacgctggtgcagggcctcagtggcttgactctcagcctaggcaccaaccagcccgggcctctgcctgaagcggcactccagccacaggagacagaggagaagcgccagcgagagaggcagcaggagagcaaaataatgtttcagaggctgctcaagcagtggttagaggaaaactgagacgtgcacccccatgggatggagacccgaagggactcagacggagccgccgtgttggcagcgcctgggtgtgggcccattttggggaccaaacagcaagctgtggtcggatgagtgccaggacctgtgtaccgggacacgtgggagtcctcccagcatgatgcttgactgacccgaggaaggtcctcatgtttcgtgcctgtcattctcggatggctgtgaggcattccttggcaagggacgctgcgtaccagcggtcctcaccgcatctcacatggctcctgtgatgcatgttgtcgctttcccacccgggatctccatctctcttcccttcctgctgtcagtaagagatcacatgtctgtgtagtgtgaatgccttgtcgctgtcctgtgcttttgcaccattgagttgactgcctctgagaagcagcactaggcctgttgaaatgcaatgtgctgccctgagatccagtttcaagaatgggcaggtaaacgcagtgtgggaaaggaatgtggaatgagaacttggtggttcaccgctgtactatttgtgtaaatgtttacgtatgtgataagctacatgtatgtaaatgttgcaatacccctaacagtcgagtagtagtctcccttacaggaatttttgacggggttcctcatcatcaataccaaataaatatatgtaggaatgg

SEQ ID NO: 132118 - DNA, 510 bp, Homo sapiens
  Payload ID: 5789
  Gene Symbol: FAM156A
  Gene Name: family with sequence similarity 156, member A
  ENST ID: ENST00000610625
  CDS Start-End: 501-510
caactgacagtcccaaaggggctggagatgccaccccggcaaagttcgccctagtcatttgcttcacgccttccagacagagggagcagttggaaaaaagtcagaggctgagtcgttccaacatggcgcagatgccacaaggacactagcacaccagcaggaagctgaacagaaggctggaggtgccacggtgacaaggacgggatcctgtcaggccaggtgaaaggtgtagcagtcactcggcctacacccacagcatcgaccttgtgaacccagcgacctgactgccttggaattgaagcgaatgagagtggggagtgtgagaggtgcgtttggtgcagcatttctggcatgggaacagaactggccaggaggaagtgacgtctgggttctgcccgcacacattcctcgccaccttcttggtgtctgagaacctccagcttcacctccttttctggacccgagggcctggcggagcttccagctgggaccagacctccatggatccac

SEQ ID NO: 132119 - DNA, 914 bp, Homo sapiens
  Payload ID: 5789
  Gene Symbol: FAM156A
  Gene Name: family with sequence similarity 156, member A
  ENST ID: ENST00000619373
  CDS Start-End: 535-914
ccagttcccacgtccctcgcccgggaagtcacgtccgctacagggagtgtcttcccatggcctccggaagcattcggcagtccacaagccacgcttcagagaagccgctccgggaacgccgcggcgcacctccggaagggatgacctccacgccttctcccctcgcagtccacccgagcggcgtgggtcgcgagaagccacccaaccgctccgtcttccggctccggcggtccgcggcagccaatcaaaggtgaaaggtgtagcagtcactcggcctacacccacagcatcgaccttgtgaacccagcgacctgactgccttgggagaattgaagcgaatgagagtggggagtgtgagaggtgcgtttggtgcagcatttctggcatgggaacagaactggccaggaggaagtgacgtctgggttctgcccgcacacattcctcgccaccttcttggtgtctgagaacctccagcttcacctccttttctggacccgagggcctggcggagcttccagctgggaccagacctccatggatccactccagaaacggaatccagcatcgccttccaaatcttccccgatgacagctgcagagacttcccaggaaggtccagcgccctctcagccttcgtactcagaacagccgatgatgggcctcagtaacctgagccccggtcctggccccagccaggccgtgcctctcccagaggggctgctccgccagcggtacagagaggagaagaccctggaagagcggcggtgggagaggctggagttccttcagaggaagaaagcattcctgcggcatgtgaggaggagacaccgcgatcacatggccccctatgctgttgggagggaagccagaatctccccattaggtgacagaagtcagaatcgattccgatgtga

SEQ ID NO: 132120 - DNA, 569 bp, Homo sapiens
  Payload ID: 5789
  Gene Symbol: FAM156A
  Gene Name: family with sequence similarity 156, member A
  ENST ID: ENST00000612083
  CDS Start-End: 465-569
ctgaagttcaggcagcgggagcgaggaggattaatttgagataagtgttcagttctgggctgggcagtcgtgccgggcacgggaaattcaggttctttaagggaaaggcctgatgtgctaagacgaaatctataccgtgtgtagccgcttatgagaatatgaaactaaggagagccacaggtgaaaggtgtagcagtcactcggcctacacccacagcatcgaccttgtgaacccagcgacctgactgccttgggagaattgaagcgaatgagagtggggagtgtgagaggtgcgtttggtgcagcatttctggcatgggaacagaactggccaggaggaagtgacgtctgggttctgcccgcacacattcctcgccaccttcttggtgtctgagaacctccagcttcacctccttttctggacccgagggcctggcggagcttccagctgggaccagacctccatggatccactccagaaacggaatccagcatcgccttccaaatcttccccgatgacagctgcagagacttcccaggaaggtccagcgccctctcagccttcgtac

SEQ ID NO: 132121 - DNA, 1931 bp, Homo sapiens
  Payload ID: 5789
  Gene Symbol: FAM156A
  Gene Name:: family with sequence similarity 156, member A
  Uniprot ID: Q8NDB6
  ENST ID: ENST00000623782
  CDS Start-End: 601-1242
agtttgtgacaggcacgacgattgcggagctgaagttcaggcagcgggagcgaggagggtgtgtggcttttgatacagtagagttctttggcctactcaccaactgacagtcccaaaggggctggagatgccaccccggcaaagttcgccctagtcatttgcttcacgccttccagacagagggagcagttggaaaaaagtcagaggctgagtcgttccaacatggcgcagatgccacaaggacactagcacaccagcaggaagctgaacagaaggctggaggtgccacggtgacaaggacgggatcctgtcaggccaggtgaaaggtgtagcagtcactcggcctacacccacagcatcgaccttgtgaacccagcgacctgactgccttggaattgaagcgaatgagagtggggagtgtgagaggtgcgtttggtgcagcatttctggcatgggaacagaactggccaggaggaagtgacgtctgggttctgcccgcacacattcctcgccaccttcttggtgtctgagaacctccagcttcacctccttttctggacccgagggcctggcggagcttccagctgggaccagacctccatggatccactccagaaacggaatccagcatcgccttccaaatcttccccgatgacagctgcagagacttcccaggaaggtccagcgccctctcagccttcgtactcagaacagccgatgatgggcctcagtaacctgagccccggtcctggccccagccaggccgtgcctctcccagaggggctgctccgccagcggtacagagaggagaagaccctggaagagcggcggtgggagaggctggagttccttcagaggaagaaagcattcctgcggcatgtgaggaggagacaccgcgatcacatggccccctatgctgttgggagggaagccagaatctccccattaggtgacagaagtcagaatcgattccgatgtgaatgtcgatactgccagagccacaggccgaatctttctgggatccctggggagagtaacagggccccacatccctcctcctgggagacgctggtgcagggcctcagtggcttgactctcagcctaggcaccaaccagcccgggcctctgcctgaagcggcactccagccacaggagacagaggagaagcgccagcgagagaggcagcaggagagcaaaataatgtttcagaggctgctcaagcagtggttagaggaaaactgagacgtgcacccccatgggatggagacccgaagggactcagacggagccgccgtgttggcagcgcctgggtgtgggcccattttggggaccaaacagcaagctgtggtcggatgagtgccaggacctgtgtaccgggacacgtgggagtcctcccagcatgatgcttgactgacccgaggaaggtcctcatgtttcgtgcctgtcattctcggatggctgtgaggcattccttggcaagggacgctgcgtaccagcggtcctcaccgcatctcacatggctcctgtgatgcatgttgtcgctttcccacccgggatctccatctctcttcccttcctgctgtcagtaagagatcacatgtctgtgtagtgtgaatgccttgtcgctgtcctgtgcttttgcaccattgagttgactgcctctgagaagcagcactaggcctgttgaaatgcaatgtgctgccctgagatccagtttcaagaatgggcaggtaaacgcagtgtgggaaaggaatgtggaatgagaacttggtggttcaccgctgtactatttgtgtaaatgtttacgtatgtgataagctacatgtatgtaaatgttgcaatacccctaacagtcgagtagtagtctcccttacaggaatttttgacggggttcctcatcatcaataccaaataaatatatgtaggaatgg

SEQ ID NO: 132122 - DNA, 1701 bp, Homo sapiens
  Payload ID: 5790
  Gene Symbol: FAM156B
  Gene Name: family with sequence similarity 156, member B
  Uniprot ID: Q8NDB6
  ENST ID: ENST00000509613
  CDS Start-End: 367-1008
accgaaggcaccgctgaatggagtgggccctcagtaaatacctggaggaatgtgacctggccagtgaggttattttcttttgtaggtgaaaggtgtagcagtcactcggcctacacccacagcatcgaccttgtgaacccagcgacctgactgccttggaattgaagcgaatgagagtggggagtgtgagaggtgcgtttggtgcagcatttctggcatgggaacagaactggccaggaggaagtgacgtctgggttctgcccgcacacattcctcgccaccttcttggtgtctgagaacctccagcttcacctccttttctggacccgagggcctggcggagcttccagctgggaccagacctccatggatccactccagaaacggaatccagcatcgccttccaaatcttccccgatgacagctgcagagacttcccaggaaggtccagcgccctctcagccttcgtactcagaacagccgatgatgggcctcagtaacctgagccccggtcctggccccagccaggccgtgcctctcccagaggggctgctccgccagcggtacagagaggagaagaccctggaagagcggcggtgggagaggctggagttccttcagaggaagaaagcattcctgcggcatgtgaggaggagacaccgcgatcacatggccccctatgctgttgggagggaagccagaatctccccattaggtgacagaagtcagaatcgattccgatgtgaatgtcgatactgccagagccacaggccgaatctttctgggatccctggggagagtaacagggccccacatccctcctcctgggagacgctggtgcagggcctcagtggcttgactctcagcctaggcaccaaccagcccgggcctctgcctgaagcggcactccagccacaggagacagaggagaagcgccagcgagagaggcagcaggagagcaaaataatgtttcagaggctgctcaagcagtggttagaggaaaactgagacgtgcacccccatgggatggagacccgaagggactcagacggagccgccgtgttggcagcgcctgggtgtgggcccattttggggaccaaacagcaagctgtggtcggatgagtgccaggacctgtgtaccgggacacgtgggagtcctcccagcatgatgcttgactgacccgaggaaggtcctcatgtttcgtgcctgtcattctcggatggctgtgaggcattccttggcaagggacgctgcgtaccagcggtcctcaccgcatctcacatggctcctgtgatgcatgttgtcgctttcccacccgggatctccatctctcttcccttcctgctgtcagtaagagatcacatgtctgtgtagtgtgaatgccttgtcgctgtcctgtgcttttgcaccattgagttgactgcctctgagaagcagcactaggcctgttgaaatgcaatgtgctgccctgagatccagtttcaagaatgggcaggtaaacgcagtgtgggaaaggaatgtggaatgagaacttggtggttcaccgctgtactatttgtgtaaatgtttacgtatgtgataagctacatgtatgtaaatgttgcaatacccctaacagtcgagtagtagtctcccttacaggaatttttgacggggttcctcatcatcaataccaaataaatatatgtaggaatggaaaa

SEQ ID NO: 132123 - DNA, 2537 bp, Homo sapiens
  Payload ID: 5790
  Gene Symbol: FAM156B
  Gene Name: family with sequence similarity 156, member B
  Uniprot ID: Q8NDB6
  ENST ID: ENST00000416841
  CDS Start-End: 1203-1844
ttctttccttggtgtgtggttggaagattaatttgagataagtgttcagttctgggctgggcagtcgtgccgggcacgggaaattcaggttctttaagggaaaggcctgatgtgctaagacgaaatctataccgtgtgtagccgcttatgagaatatgaaactaaggagagccacaggtaagtatacgtctatgaatgcgaattaaaacgggtgacaatataaagagagattggtgtcacaaatggtggagtgacttttgtatttcagcagacctcagtgagaaatggtcaccaccactccctagatgtgtgaccttgagtgagttgcttaacctctctgatcctgttacctcatctgcaactggggatgagaatatatatcatagcatgccctgggagaagctgttcctgaccacctgggctatggtgattttgacttcctctgtgtcagaagtacccccgtctcatgcctgccatagttgtctttttgttttgttttgtgatttcagatggactcaccctgtcacccaggttggactgcactggcctcaacctcctgagttcaagtgatcgtcccacctcagcctccccagtagctgggaccatagctgtgcagcatcatgcctggctaattttttaagttttttgttgagatggtggtctcgccctgttgctcaggctggcctcaaactcctgggctgaagcagtcctcccacctcagcctcccaaagtgcttggattagaggcgtgagccaccattcctggctccttggacaatattttattcctcagattaagacacgtccttgggatggggctgcattggataattcaccgaaggcaccgctgaatggagtgggccctcagtaaatacctggaggaatgtgacctggccagtgaggttattttcttttgtaggtgaaaggtgtagcagtcactcggcctacacccacagcatcgaccttgtgaacccagcgacctgactgccttgggagaattgaagcgaatgagagtggggagtgtgagaggtgcgtttggtgcagcatttctggcatgggaacagaactggccaggaggaagtgacgtctgggttctgcccgcacacattcctcgccaccttcttggtgtctgagaacctccagcttcacctccttttctggacccgagggcctggcggagcttccagctgggaccagacctccatggatccactccagaaacggaatccagcatcgccttccaaatcttccccgatgacagctgcagagacttcccaggaaggtccagcgccctctcagccttcgtactcagaacagccgatgatgggcctcagtaacctgagccccggtcctggccccagccaggccgtgcctctcccagaggggctgctccgccagcggtacagagaggagaagaccctggaagagcggcggtgggagaggctggagttccttcagaggaagaaagcattcctgcggcatgtgaggaggagacaccgcgatcacatggccccctatgctgttgggagggaagccagaatctccccattaggtgacagaagtcagaatcgattccgatgtgaatgtcgatactgccagagccacaggccgaatctttctgggatccctggggagagtaacagggccccacatccctcctcctgggagacgctggtgcagggcctcagtggcttgactctcagcctaggcaccaaccagcccgggcctctgcctgaagcggcactccagccacaggagacagaggagaagcgccagcgagagaggcagcaggagagcaaaataatgtttcagaggctgctcaagcagtggttagaggaaaactgagacgtgcacccccatgggatggagacccgaagggactcagacggagccgccgtgttggcagcgcctgggtgtgggcccattttggggaccaaacagcaagctgtggtcggatgagtgccaggacctgtgtaccgggacacgtgggagtcctcccagcatgatgcttgactgacccgaggaaggtcctcatgtttcgtgcctgtcattctcggatggctgtgaggcattccttggcaagggacgctgcgtaccagcggtcctcaccgcatctcacatggctcctgtgatgcatgttgtcgctttcccacccgggatctccatctctcttcccttcctgctgtcagtaagagatcacatgtctgtgtagtgtgaatgccttgtcgctgtcctgtgcttttgcaccattgagttgactgcctctgagaagcagcactaggcctgttgaaatgcaatgtgctgccctgagatccagtttcaagaatgggcaggtaaacgcagtgtgggaaaggaatgtggaatgagaacttggtggttcaccgctgtactatttgtgtaaatgtttacgtatgtgataagctacatgtatgtaaatgttgcaatacccctaacagtcgagtagtagtctcccttacaggaatttttgacggggttcctcatcatcaataccaaataaatatatgtaggaatggaaaa

SEQ ID NO: 132124 - DNA, 2942 bp, Homo sapiens; identical to SEQ ID NO: 132104
  Payload ID: 5790
  Gene Symbol: FAM156B
  Gene Name: family with sequence similarity 156, member B
  Uniprot ID: Q8NDB6
  ENST ID: ENST00000593751
  CDS Start-End: 1612-2253

SEQ ID NO: 132125 - DNA, 992 bp, Homo sapiens; identical to SEQ ID NO: 132116
  Payload ID: 5790
  Gene Symbol: FAM156B
  Gene Name: family with sequence similarity 156, member B
  ENST ID: ENST00000619346
  CDS Start-End: 825-992

SEQ ID NO: 132126 - DNA, 545 bp, Homo sapiens
  Payload ID: 5790
  Gene Symbol: FAM156B
  Gene Name: family with sequence similarity 156, member B
  ENST ID: ENST00000610609
  CDS Start-End: 535-545
ccagttcccacgtccctcgcccgggaagtcacgtccgctacagggagtgtcttcccatggcctccggaagcattcggcagtccacaagccacgcttcagagaagccgctccgggaacgccgcggcgcacctccggaagggatgacctccacgccttctcccctcgcagtccacccgagcggcgtgggtcgcgagaagccacccaaccgctccgtcttccggctccggcggtccgcggcagccaatcaaaggtgaaaggtgtagcagtcactcggcctacacccacagcatcgaccttgtgaacccagcgacctgactgccttgggagaattgaagcgaatgagagtggggagtgtgagaggtgcgtttggtgcagcatttctggcatgggaacagaactggccaggaggaagtgacgtctgggttctgcccgcacacattcctcgccaccttcttggtgtctgagaacctccagcttcacctccttttctggacccgagggcctggcggagcttccagctgggaccagacctccatggatccact

SEQ ID NO: 132127 - DNA, 776 bp, Homo sapiens
  Payload ID: 5790
  Gene Symbol: FAM156B
  Gene Name: family with sequence similarity 156, member B
  ENST ID: ENST00000612188
  CDS Start-End: 389-776
acccttcaattacgagcgggcggcgctgcgtttccagggcagaggaaacgaggcgccgcgttggcgcttggacggcgggaaccggctccggagcgagaacgcgcgtgaaaggtgtagcagtcactcggcctacacccacagcatcgaccttgtgaacccagcgacctgactgccttgggagaattgaagcgaatgagagtggggagtgtgagaggtgcgtttggtgcagcatttctggcatgggaacagaactggccaggaggaagtgacgtctgggttctgcccgcacacattcctcgccaccttcttggtgtctgagaacctccagcttcacctccttttctggacccgagggcctggcggagcttccagctgggaccagacctccatggatccactccagaaacggaatccagcatcgccttccaaatcttccccgatgacagctgcagagacttcccaggaaggtccagcgccctctcagccttcgtactcagaacagccgatgatgggcctcagtaacctgagccccggtcctggccccagccaggccgtgcctctcccagaggggctgctccgccagcggtacagagaggagaagaccctggaagagcggcggtgggagaggctggagttccttcagaggaagaaagcattcctgcggcatgtgaggaggagacaccgcgatcacatggccccctatgctgttgggagggaagccagaatctccccattaggtgacagaagtcagaatcgattccgatgtgaatgtcgat

SEQ ID NO: 132128 - DNA, 2032 bp, Homo sapiens; identical to SEQ ID NO: 132112
  Payload ID: 5790
  Gene Symbol: FAM156B
  Gene Name: family with sequence similarity 156, member B
  Uniprot ID: Q8NDB6
  ENST ID: ENST00000616419
  CDS Start-End: 698-1339

SEQ ID NO: 132129 - DNA, 858 bp, Homo sapiens
  Payload ID: 5790
  Gene Symbol: FAM156B
  Gene Name: family with sequence similarity 156, member B
  ENST ID: ENST00000610405
  CDS Start-End: 710-858
actttggaaaagctttggccgagaggaagggtccattcagatggttggggagtggggcttagaattttatttttagtttacaaagatgatgggggctgtgttaaaaagaaaaaatatacagatcacagtacagggattgggaattgggggaggcactgggttagctgcaggtaaattataacagagtgactagggtaggctgggttgagaaggtgacaatttgacaaagatgtgaagggggaggagtcagtcaagcagatatctgtggtgaaggccttccagacagagggagcagttggaaaaaagtcagaggctgagtcgttccaacatggcgcagatgccacaaggacactagcacaccagcaggaagctgaacagaaggctggaggtgccacggtgacaaggacgggatcctgtcaggccaggtgaaaggtgtagcagtcactcggcctacacccacagcatcgaccttgtgaacccagcgacctgactgccttgggagaattgaagcgaatgagagtggggagtgtgagaggtgcgtttggtgcagcatttctggcatgggaacagaactggccaggaggaagtgacgtctgggttctgcccgcacacattcctcgccaccttcttggtgtctgagaacctccagcttcacctccttttctggacccgagggcctggcggagcttccagctgggaccagacctccatggatccactccagaaacggaatccagcatcgccttccaaatcttccccgatgacagctgcagagacttcccaggaaggtccagcgccctctcagccttcgtactcagaacagccgatgatgggcctcagtaacctgagccccggtcc

SEQ ID NO: 132130 - DNA, 748 bp, Homo sapiens
  Payload ID: 5791
  Gene Symbol: FAM159A
  Gene Name: family with sequence similarity 159, member A
  Uniprot ID: Q6UWV7
  ENST ID: ENST00000517870
  CDS Start-End: 151-723
gtctctgtctcggcttctctcggcccctgggtctcttcgtctctgccgttctcaggctcagctccgtctcgctcggtccctcgcttccccgccgggctctagccggccgtctggtggcccgaggtggcggcgggctgggcgcggggcgcgatgagcggcgcctgcacgagctacgtgagcgcagagcaggaggtggtgcgcggcttcagctgcccgcggccggggggcgaggcggccgctgtcttctgctgcggcttccgcgaccacaagtactgctgcgacgacccgcacagcttcttcccctacgagcacagctacatgtggtggctcagcattggcgctctcataggcctgtccgtagcagcagtggttcttctcgccttcattgttaccgcctgtgtgctctgctacctgttcatcagctctaagccccacacaaagttggacctgggcttgagcttacagacagcaggccctgaggaggtttctcctgactgccaaggtgtgaacacaggcatggcggcagaagtgccaaaagtgagccctctccagcagagttactcctgcttgaacccgcagctggagagcaatgaggggcaggctgtgaactccaaacgcctcctccatcattgcttcatggccacagtgaccaccagtgacattccaggcagccctgaggaagcctctgtacccaaccctgacctatgtggaccagtcccataaacattcaataaatgtctccatacca

SEQ ID NO: 132131 - DNA, 847 bp, Homo sapiens
  Payload ID: 5792
  Gene Symbol: FAM159B
  Gene Name: family with sequence similarity 159, member B
  Uniprot ID: A6NKW6
  ENST ID: ENST00000389074
  CDS Start-End: 317-799
ggggacagctaaggtctccaggctgctgatgaagtgagggaaagtggaggagagtcggcgccgagatgggcggataaaaggagcgaccgctcagcagcgagagggagaggcgagagtaaggcgcccagacaccatgtggacaaggggaggagagaaatcagaggtggcgcgcgaaggctgagcgcccaggcagccagagcccagatcggaagagccgagtccgggcagaggggtccgcgggctctggaggtgctggacgggtgcgatccgagagcagaccggggccctcgcgagcctctcccggcccctgcccgcgatgagcgaggccagccgactgtgctccggctactacagcctcaaccagagcttcgtggagcccttccagtgcccccggcgcggcgagggggcagcgctccagtattgctgcggcttcgccgacctcaagtactgctgcagcgagccgggcagctacttcccctacaagcacagctacatgtggagcctcagcattggtgccttgattggactaggaattgctgcccttgttttactcgcctttgtcatcagtgtctgtgtcctttgctatttatttctgtatacgaaacctcaaagattagacactggccttaagcttcaacacttagaggcttcttccactcaagaaggcaagtcaaatggaaaaaccaaagccctcaattcaaatgcagcatcaaatgcaacaaatgaaacatactatgaagctgatgatataattcaagaaaaaacaatggatgcaacacaaatccacattgcttattaactaaaaattctgtgttttaaatgcttactggagagatgggacaataaa

SEQ ID NO: 132132 - DNA, 612 bp, Homo sapiens
  Payload ID: 5792
  Gene Symbol: FAM159B
  Gene Name: family with sequence similarity 159, member B
  ENST ID: ENST00000506473
  CDS Start-End: 93-305
gcagaggggtccgcgggctctggaggtgctggacgggtgcgatccgagagcagaccggggccctcgcgagcctctcccggcccctgcccgcgatgagcgaggccagccgactgtgctccggctactacagcctcaaccagagcttcgtggagcccttccagtgcccccggcgcggcgagggggcagcgctccagtattgctgcggcttcgccgacctcaagtactgctgcagcgagccgggcagctacttcccctacaagcacagctacatgtggagcctcaggtcaaacttgtcagtgtcctaatcccagagaaagagcagaagcctaaaggcaagccaggaagataatgaagaaaaagatcattacttttcaatgaccattggtgccttgattggactaggaattgctgcccttgttttactcgcctttgtcatcagtgtctgtgtcctttgctatttatttctgtatacgaaacctcaaagattagacactggccttaagcttcaacacttagaggcttcttccactcaagaaggcaagtcaaatggaaaaaccaaagccctcaattcaaatgcagcatcaaatgcaacaaatgaaacatactatgaag

SEQ ID NO: 132133 - DNA, 846 bp, Homo sapiens
  Payload ID: 5792
  Gene Symbol: FAM159B
  Gene Name: family with sequence similarity 159, member B
  ENST ID: ENST00000509189
  CDS Start-End: 183-395
tgtggacaaggggaggagagaaatcagaggtggcgcgcgaaggctgagcgcccaggcagccagagcccagatcggaagagccgagtccgggcagaggggtccgcgggctctggaggtgctggacgggtgcgatccgagagcagaccggggccctcgcgagcctctcccggcccctgcccgcgatgagcgaggccagccgactgtgctccggctactacagcctcaaccagagcttcgtggagcccttccagtgcccccggcgcggcgagggggcagcgctccagtattgctgcggcttcgccgacctcaagtactgctgcagcgagccgggcagctacttcccctacaagcacagctacatgtggagcctcaggtcaaacttgtcagtgtcctaatcccagagaaagagcagaagcctaaaggcaagccaggaagataatgaagaaaaagatcattacttttcaatgacgtatgttccaaatacagcattggtgccttgattggactaggaattgctgcccttgttttactcgcctttgtcatcagtgtctgtgtcctttgctatttatttctgtatacgaaacctcaaagattagacactggccttaagcttcaacacttagaggcttcttccactcaagaaggcaagtcaaatggaaaaaccaaagccctcaattcaaatgcagcatcaaatgcaacaaatgaaacatactatgaagctgatgatataattcaagaaaaaacaatggatgcaacacaaatccacattgcttattaactaaaaattctgtgttttaaatgcttactggagagatgggacaataaaaataaagcgtgcacttgaaa

SEQ ID NO: 132134 - DNA, 4576 bp, Homo sapiens
  Payload ID: 5793
  Gene Symbol: FAM160A1
  Gene Name: family with sequence similarity 160, member A1
  Uniprot ID: Q05DH4
  ENST ID: ENST00000435205
  CDS Start-End: 576-3698
acattcttcccgggcactcctgagtttgagccgggcctggaggacctgggccaagactttcgagcggcggccgcccgaggtgcgaggagccagcccggctttcctcactgggtcccgcgcaggcgtccccgggaccgcagagcaaactttctggactatctgaggacacttgtccagcgagccccactgctcggggaggaggagccacggccggggacaggtgatacacttgggtgttgaaggacatttttgaaatcatgagaactcaatgtttgactatgaatgtttcgttataactgcctggaaggttagcgtcaaagaagttgagatttttaaagtcttcttctaggggtttccagcagagccaaatgttagaaaaatctttccgctcctctgaagagtgaagtgagcaaatacaacccagcagtaggttattgaagacagcagccccaggttttggaaggtgacaatgaaatgtgaagaagttacatttctcaaacttgaaagttagtgacggcttaccaaattttaatgaaaattaaatatgacttagaagcattgatttatgaaggcttatgatgtcatcggtttcgacagaaagcaaactccagcaggctgtgagcctacagggagttgacccagaaacatgcatgattgtatttaaaaaccactgggcacaggttgtgaaaatcttggagaagcacgaccccttgaagaacacccaggcaaaatatgggtctatccctccagatgaggccagtgccgtgcagaattacgtagaacacatgctcttcttgttgattgaagagcaagccaaagatgctgcaatggggccgattctggaatttgtggtctctgagaacatcatggagaaacttttcctttggagcttgagaagggagtttactgatgagactaaaattgagcagctaaagatgtatgagatgttggtcacccagtcgcaccagcctctgctgcaccacaaacccattctgaagcctctgatgatgttgctgagctcttgttcaggaacaaccacccccactgtggaggagaagctggttgtcctactcaatcagctctgttccattcttgccaaagatccatccattttagaactcttcttccacactagtgaagaccaaggcgctgccaacttcctcatcttctcccttctgattcccttcattcaccgagaggggtcagtaggccagcaagctcgggatgcattgctcttcatcatgtctctttctgctgagaacaccatggtggcccatcacatcgtggagaacacctacttttgtccagtacttgcaactgggctcagtggtctctactcttccctgcctacaaagctagaagagaaaggcgaggaatggcactgccttctgaaagatgactggcttctacttccttctcttgtccagttcatgaactccctggagttttgcaatgcagtcatacaggtggctcaccccttgattcgaaatcagcttgtcaattacatttacaatggatttttggtaccagtcttggctcctgctctccataaggtgactgtggaagaggtcatgaccacaactgcatatctggaccttttcctgcgtagcatctccgagccagcactacttgagatcttcctccgttttatcctattgcaccagcacgagaatgtccacatcctagacactctcacgagtcgaatcaacaccccgtttcggctttgtgtggtgtctctggcattattcagaactctcattggtttacattgtgaagatgtgatgttacagctagttctaaggtatctgatcccctgcaatcacatgatgctgagtcagaggtgggctgtgaaggagagagactgttactctgtttctgcggccaagcttctcgccttgactcctgtctgctgctccagcgggatcactctgacgctggggaaccaagagagggattatattctctggtcaaagtgtatgcatgacacttcagggcctgtggagcggccattccccgaagcgttctccgagtcagcctgcattgtggagtatgggaaagccctggacatcagctacctgcagtacctgtgggaggcccacaccaacatcctccgctgcatgagggactgccgtgtctggtccgccctgtatgatggcgactcccccgaccctgagatgtttctccagagtctgacggaggagggcagtgtgagctcggcctgccctgtgttcgggctcccgcaacaactccccaggaagacaggacctcagctggctcccagaaaggacaagagccagacagagctggaatgggatgacagctatgacactggaatctcctcaggggctgacgtgggctccccagggccttatgatgatctggaggtttcaggccccccagcacccattgatccccccaaacacatccaggagatgaagaagaatgccctcctgctcttcaaagggtcctacatagaagagtcggactttcaggatgatgtgatggtgtacaggctgtgtgctgagaaggactccgaggacatgaaggattctcaggaggaagctgctaggccaccagctgaagcccaggctgaagttcagagtgtccccatcaacaacggccccctcctcagcacccagccagagacagattcagaggaggagtggaatagggacaattcagacccgtttcacagtgagcccaaggagccaaagcaagagagggaacctgaagcagccccagaatccaactcagagttagcatcccctgcccctgaggcagagcacagctctaacctgacagccgcccacccggagagcgaggagctcattgcccagtatgaccaaatcattaaagagctggattccggcgccgagggcttgatggaacagaattaccccacacctgatcccttgcttctcactaaggaggaagaagggaaggaagagagtaaaggagaaaaggagaaggaggggaagaaggagctagaagatgaggaggatgactttgactcttttatagcggagatgcctgctgtagagactgtgccttccccatttgtggggagagatgaggctgcctttgccagtcgccatcccgtgaggactcaaagcaccccattcacaggcccattcatcagcgtagtcctgtcaaagctggagaacatgctggagaactctttacatgttaatttgctgcttatcgggatcattactcagctagccagctacccccagccactcctgcgctcctttctgctcaacaccaacatggtcttccagccaagcgtccgctctctctatcaggtccttgcatctgtgaaaaacaagattgaacagtttgcttctgtggagagagacttcccagggctcctcattcaagctcagcagtacctgctcttccgtgtggacatgtctgatatgacccctgcagcactaaccaaagatcccattcaggaggcttccaggacaggaagtggcaagaaccttttggatggacctccaagagtgcttcagcccttcctgacccacagaaccaaggtggctgaggcaccccccaacctgcccctgccggtgaggaaccccatgctggctgctgccctcttcccagagttcctgaaggagctggcggccttggcccaggaacactccattctgtgctacaagatcttgggtgactttgaggactcctgctgttagcttttttttttttttttaatagaggttcttgttttgtaaggttttagtgtcttgactgaatgttaaatgcaaagctgcttacaaagatttctactttaatgtttcctgacaatacttgatttgtggggaggggaattttctgtatctttcctctctctctctagccgggcctttccaccttatgttatatatagaatgtaagtctcataagctggttgctcccttggcagttttctttgctctgtttttcctccttatatttttttggttgtcattctcctatccctttgagttactcttcttgcagctcagatcacgtcaagcagatattggggttcagtgatgtctggtgatgtctggaagtgccccatgtcagaattccagctgttcagcagcacaggaagattgtacacctgcaactgtgcgaatggtcctgttgcctcctgcattttggcctctgttctataaaggaagagtaaagatggagctcctcctgcctccatcacgaaagcacatatcatctgtccctttggattttacttccaggacgtgtgtcgtccccagcgtgtgttgccttatggtgccggcagagcctcagctatctgcctgggaagtcggatgtccttggagagaatttggaatgcagataatttttcttatttcttgagagcttactttaatcagcatgacactacctaaacactgaagatggccttatattagtaagatttgcacaaaattaagtatacctatgcaaactattactttggtttttaggagtttgatcagatgaagaagtaatggtatcacatatatatgtaagaagacaaccatcattatttttgtaagtgttttataaaaacaaactgattaacttg

SEQ ID NO: 132135 - DNA, 4156 bp, Homo sapiens
  Payload ID: 5793
  Gene Symbol: FAM160A1
  Gene Name: family with sequence similarity 160, member A1
  Uniprot ID: Q05DH4
  ENST ID: ENST00000505231
  CDS Start-End: 160-3282
cagccaaaccatatcaaccttattgatgtttttgcaggttttggaaggtgacaatgaaatgtgaagaagttacatttctcaaacttgaaagttagtgacggcttaccaaattttaatgaaaattaaatatgacttagaagcattgatttatgaaggcttatgatgtcatcggtttcgacagaaagcaaactccagcaggctgtgagcctacagggagttgacccagaaacatgcatgattgtatttaaaaaccactgggcacaggttgtgaaaatcttggagaagcacgaccccttgaagaacacccaggcaaaatatgggtctatccctccagatgaggccagtgccgtgcagaattacgtagaacacatgctcttcttgttgattgaagagcaagccaaagatgctgcaatggggccgattctggaatttgtggtctctgagaacatcatggagaaacttttcctttggagcttgagaagggagtttactgatgagactaaaattgagcagctaaagatgtatgagatgttggtcacccagtcgcaccagcctctgctgcaccacaaacccattctgaagcctctgatgatgttgctgagctcttgttcaggaacaaccacccccactgtggaggagaagctggttgtcctactcaatcagctctgttccattcttgccaaagatccatccattttagaactcttcttccacactagtgaagaccaaggcgctgccaacttcctcatcttctcccttctgattcccttcattcaccgagaggggtcagtaggccagcaagctcgggatgcattgctcttcatcatgtctctttctgctgagaacaccatggtggcccatcacatcgtggagaacacctacttttgtccagtacttgcaactgggctcagtggtctctactcttccctgcctacaaagctagaagagaaaggcgaggaatggcactgccttctgaaagatgactggcttctacttccttctcttgtccagttcatgaactccctggagttttgcaatgcagtcatacaggtggctcaccccttgattcgaaatcagcttgtcaattacatttacaatggatttttggtaccagtcttggctcctgctctccataaggtgactgtggaagaggtcatgaccacaactgcatatctggaccttttcctgcgtagcatctccgagccagcactacttgagatcttcctccgttttatcctattgcaccagcacgagaatgtccacatcctagacactctcacgagtcgaatcaacaccccgtttcggctttgtgtggtgtctctggcattattcagaactctcattggtttacattgtgaagatgtgatgttacagctagttctaaggtatctgatcccctgcaatcacatgatgctgagtcagaggtgggctgtgaaggagagagactgttactctgtttctgcggccaagcttctcgccttgactcctgtctgctgctccagcgggatcactctgacgctggggaaccaagagagggattatattctctggtcaaagtgtatgcatgacacttcagggcctgtggagcggccattccccgaagcgttctccgagtcagcctgcattgtggagtatgggaaagccctggacatcagctacctgcagtacctgtgggaggcccacaccaacatcctccgctgcatgagggactgccgtgtctggtccgccctgtatgatggcgactcccccgaccctgagatgtttctccagagtctgacggaggagggcagtgtgagctcggcctgccctgtgttcgggctcccgcaacaactccccaggaagacaggacctcagctggctcccagaaaggacaagagccagacagagctggaatgggatgacagctatgacactggaatctcctcaggggctgacgtgggctccccagggccttatgatgatctggaggtttcaggccccccagcacccattgatccccccaaacacatccaggagatgaagaagaatgccctcctgctcttcaaagggtcctacatagaagagtcggactttcaggatgatgtgatggtgtacaggctgtgtgctgagaaggactccgaggacatgaaggattctcaggaggaagctgctaggccaccagctgaagcccaggctgaagttcagagtgtccccatcaacaacggccccctcctcagcacccagccagagacagattcagaggaggagtggaatagggacaattcagacccgtttcacagtgagcccaaggagccaaagcaagagagggaacctgaagcagccccagaatccaactcagagttagcatcccctgcccctgaggcagagcacagctctaacctgacagccgcccacccggagagcgaggagctcattgcccagtatgaccaaatcattaaagagctggattccggcgccgagggcttgatggaacagaattaccccacacctgatcccttgcttctcactaaggaggaagaagggaaggaagagagtaaaggagaaaaggagaaggaggggaagaaggagctagaagatgaggaggatgactttgactcttttatagcggagatgcctgctgtagagactgtgccttccccatttgtggggagagatgaggctgcctttgccagtcgccatcccgtgaggactcaaagcaccccattcacaggcccattcatcagcgtagtcctgtcaaagctggagaacatgctggagaactctttacatgttaatttgctgcttatcgggatcattactcagctagccagctacccccagccactcctgcgctcctttctgctcaacaccaacatggtcttccagccaagcgtccgctctctctatcaggtccttgcatctgtgaaaaacaagattgaacagtttgcttctgtggagagagacttcccagggctcctcattcaagctcagcagtacctgctcttccgtgtggacatgtctgatatgacccctgcagcactaaccaaagatcccattcaggaggcttccaggacaggaagtggcaagaaccttttggatggacctccaagagtgcttcagcccttcctgacccacagaaccaaggtggctgaggcaccccccaacctgcccctgccggtgaggaaccccatgctggctgctgccctcttcccagagttcctgaaggagctggcggccttggcccaggaacactccattctgtgctacaagatcttgggtgactttgaggactcctgctgttagcttttttttttttttttaatagaggttcttgttttgtaaggttttagtgtcttgactgaatgttaaatgcaaagctgcttacaaagatttctactttaatgtttcctgacaatacttgatttgtggggaggggaattttctgtatctttcctctctctctctagccgggcctttccaccttatgttatatatagaatgtaagtctcataagctggttgctcccttggcagttttctttgctctgtttttcctccttatatttttttggttgtcattctcctatccctttgagttactcttcttgcagctcagatcacgtcaagcagatattggggttcagtgatgtctggtgatgtctggaagtgccccatgtcagaattccagctgttcagcagcacaggaagattgtacacctgcaactgtgcgaatggtcctgttgcctcctgcattttggcctctgttctataaaggaagagtaaagatggagctcctcctgcctccatcacgaaagcacatatcatctgtccctttggattttacttccaggacgtgtgtcgtccccagcgtgtgttgccttatggtgccggcagagcctcagctatctgcctgggaagtcggatgtccttggagagaatttggaatgcagataatttttcttatttcttgagagcttactttaatcagcatgacactacctaaacactgaagatggccttatattagtaagatttgcacaaaattaagtatacctatgcaaactattactttggtttttaggagtttgatcagatgaagaagtaatggtatcacatatatatgtaagaagacaaccatcattatttttgtaagtgttttataaaaacaaactgattaa

SEQ ID NO: 132136 - DNA, 548 bp, Homo sapiens
  Payload ID: 5793
  Gene Symbol: FAM160A1
  Gene Name: family with sequence similarity 160, member A1
  ENST ID: ENST00000512597
  CDS Start-End: 369-548
atacaacccagcagtaggttattgaagacagcagccccagtgaaattctagagaatccaagaacaagttaatcctcagtgttgattagcagcattagtgagcatggagaaaatggatcactagttattggagtttaaagcagtacaacttttgaggagtccgtttacatcaaaagccttcagatattcctactctttgagctgatgtttccacttctgggattctaattgaaggacaaaatcatgggttttggaaggtgacaatgaaatgtgaagaagttacatttctcaaacttgaaagttagtgacggcttaccaaattttaatgaaaattaaatatgacttagaagcattgatttatgaaggcttatgatgtcatcggtttcgacagaaagcaaactccagcaggctgtgagcctacagggagttgacccagaaacatgcatgattgtatttaaaaaccactgggcacaggttgtgaaaatcttggagaagcacgaccccttgaagaacacccaggcaaaatatgggtctatccctccagatgag

SEQ ID NO: 132137 - DNA, 570 bp, Homo sapiens
  Payload ID: 5793
  Gene Symbol: FAM160A1
  Gene Name: family with sequence similarity 160, member A1
  ENST ID: ENST00000503146
  CDS Start-End: 451-570
acattcttcccgggcactcctgagtttgagccgggcctggaggacctgggccaagactttcgagcggcggccgcccgaggtgcgaggagccagcccggctttcctcactgggtcccgcgcaggcgtccccgggaccgcagagcaaactttctggactatctgaggacacttgtccagcgagccccactgctcggggaggaggagccacggccggggacaggtgatacacttgggtgttgaaggacatttttgaaatcatgagaactcaatgtttgactatgaatgtttcgttataactgcctggaaggttagcgtcaaagaagttgaggttttggaaggtgacaatgaaatgtgaagaagttacatttctcaaacttgaaagttagtgacggcttaccaaattttaatgaaaattaaatatgacttagaagcattgatttatgaaggcttatgatgtcatcggtttcgacagaaagcaaactccagcaggctgtgagcctacagggagttgacccagaaacatgcatgattgtatttaaaaaccactgggcacaggttgtgaaaatcttg

SEQ ID NO: 132138 - DNA, 401 bp, Homo sapiens
  Payload ID: 5793
  Gene Symbol: FAM160A1
  Gene Name: family with sequence similarity 160, member A1
  ENST ID: ENST00000513086
  CDS Start-End: 362-401
actgggtcccgcgcaggcgtccccgggaccgcagagcaaactttctggactatctgaggacacttgtccagcgagccccactgctcggggaggaggagccacggccggggacagatttttaaagtcttcttctaggggtttccagcagagccaaatgttagaaaaatctttccgctcctctgaagagtgaagtgagcaaatacaacccagcagtaggttattgaagacagcagccccaggttttggaaggtgacaatgaaatgtgaagaagttacatttctcaaacttgaaagttagtgacggcttaccaaattttaatgaaaattaaatatgacttagaagcattgatttatgaaggcttatgatgtcatcggtttcgacagaaagcaaactccagcagg

SEQ ID NO: 132139 - DNA, 565 bp, Homo sapiens
  Payload ID: 5793
  Gene Symbol: FAM160A1
  Gene Name: family with sequence similarity 160, member A1
  ENST ID: ENST00000513962
  CDS Start-End: 439-565
agcaaagcttagagtccctctaagctgaacatctacaacacttctcttctggctctcattctaccttgtggctacagttactggtgatacacttgggtgttgaaggacatttttgaaatcatgagaactcaatgtttgactatgaatgtttcgttataactgcctggaaggttagcgtcaaagaagttgagatttttaaagtcttcttctaggggtttccagcagagccaaatgttagaaaaatctttccgctcctctgaagagtgaagtgagcaaatacaacccagcagtaggttattgaagacagcagccccaggttttggaaggtgacaatgaaatgtgaagaagttacatttctcaaacttgaaagttagtgacggcttaccaaattttaatgaaaattaaatatgacttagaagcattgatttatgaaggcttatgatgtcatcggtttcgacagaaagcaaactccagcaggctgtgagcctacagggagttgacccagaaacatgcatgattgtatttaaaaaccactgggcacaggttgtgaaaatcttggagaagc

SEQ ID NO: 132140 - DNA, 3481 bp, Homo sapiens
  Payload ID: 5794
  Gene Symbol: FAM160A2
  Gene Name: family with sequence similarity 160, member A2
  Uniprot ID: Q8N612
  ENST ID: ENST00000265978
  CDS Start-End: 360-3320
agtcgtgcgacgccgggcggttgcgtgtggtgcgcgggggcgcgggctgcgtgtggcgcggggcggggcgcggctggtgcgcttgagaagcgatggcggcggcctgaactcacctaacaccgcagcagcaaccgggcccggccaggttcggcgttccgtgagtgaacgatttagaaatctggactggccagtgacctctgggcttgccattccagcctggtataacctctggctccatgggcagctactggctcctacagaccggatgaagcagactggagacacaagtggagaaaacctccagctggcaaatcctcagagtgtaggcctctggctgccagtcctgcccagcctgcctcatggagaggatgaattggctgagcagactggcctcccggggccctgggcaccgtatacctcaaggggccaatctccaaaccccagtcatggctgatcccgagacctgcctcatggtcttcaagaatcactggtcccaggtggtgcgaatcctggagcggcaaggccctcgggcagctcctgggggtgcagacgatctcagtgctgtgcgcaaccacacttaccagatgttgacactgctggcagaggaccgtgcagttccctcggcccccacaggccctgggcccctgctggagtttgctctgcacgaggatctgctgacccgtgtgttgacatggcagctgcaatgggatgagcttggggatggggtcgaggaacggcgggctgagcaactgaaactatttgaaatgctagtgagcgaagctcgccagccactgttgcggcatggtccagttcgtgaggctctgctcaccctgctggatgcctgtggccgccctgtgcccagtagcccagcactggatgaaggcttggtgctacttctcagccagctgtgtgtttgtgtggcccaggagccttcattgctcgagttcttcctgcagccacctcctgagcctggagccgctccccgtcttcttctcttttctcgccttgtcccttttgtgcatcgagagggcaccctgggccagcaggcccgtgatgccctacttcttctcatggctttgtcagctgggagccccactgtgggccgctacatcgcggatcactcttacttctgcccggtgctggccacagggctcagtgccctgtactcatcactgcctcgaaagattgaggttccaggggatgattggcactgtctgcgacgggaagactggctgggagtgccagcccttgcactcttcatgagttccctggagttctgcaatgcagtaattcaggtggctcaccccctggtgcagaagcagttggttgattatatccataatgggttcctggtgcctgtcatgggtcctgccttgcacaagacctctgtggaggagatgatcgccagtaccgcctatctggaacttttcctacggagtatctcagagcctgctttgctccgtaccttcctgcgattcctgttgttgcaccggcatgacacccacaccatcctcgacaccctcgttgctcgtattggcagtaactcccggctctgcatggtctctctgagtctcttcaggaccctcctgaacctcagctgtgaggatgtcctgctgcagctggttctcaggtatcttgttccatgtaaccacgttatgctgagccagaagccggctgttcgtgatgtggacctatatggacgagcagctgacaagtttctctccctaatcccacgctgttgtcggcaccacgcccccagcccacctcgtccagagcatgcctcatgggcacgaggtgggcctagcagagagacagggagaagggaggacatcacgggtcctggaagcccaagtgtggactcctcttctgtgacgacagtaccccggccctccacaccatctcgtctggctctcttcctgcggcagcagagcctgggtggctctgagtctccaggcccagccccttgctcaccagggctttctgcatcccccgcctccagccctggccgacggcctacccctgcagaggagcctggagagctggaagacaattacctggagtatctgcgtgaggcacgtcgtggtgtggaccgctgtgtccgagcctgccgtacctggtctgccccctatgatggcgagcggccctctcctgagcccagtccttttggctcccggactaagaaacgcagcctactgcctgaggaggacaggaacaacgtgggggaaggggaggaggaagagctggggaggagggggcgggctgggggtgcaggggagggccctggtcacctgccccctccccagctcaatggagtgccaggatcatggcctgagggggccaagaaggttcgtctggtgccaaaggagggagctggggaactgctagagggcatctccgagggcatggcaggactagagggctttgggcaggagctccgggagctagaggtggcattgagcaatgggggaactggctcagagtcccccttagaacctccactgccccttgaggaggaggaggcctacgagagcttcacctgtccccctgagccccctggccccttcctcagcagccctttgcggactctcaaccagctgccaagccagcccttcactggccccttcatggctgtgctctttgccaaactcgagaacatgctgcagaactccgtctatgtcaacttcctgctgacggggctggtggcccagctggcctgtcacccccagcccctgctccgctctttcctgctcaacaccaacatggtcttccagcccagtgtcaagtccctgctgcaggtgctgggctctgtgaagaataagattgagaactttgcggcttcccaggaggacttcccagcactgctgtccaaagccaagaagtacctcattgcccgtggcaagttggactgggctgagggccctgcagcaggacctgccccacgccgttctgatcccctagtgaagagccggaggccatccttgggggagttactcctgcggcatgcacacagtccaaccagggcccggcaggcggcacaattggtccttcagcctgggcgagacggagcaggacttggcctaagtgggggctcccctggggcttcaactccagttctactcacccggggcggggcccctgaacgccaaggtgaggctcttcgagtcaagaatgctgtctactgtgcagtcattttccctgaatttctcaaggagttggctgccatctcccaggctcatgccgtcacctcgcctttcttgttggagacttcagaggaaggatctggccctctcatctcaggctgtgggcccctcaatccttaactttcttccatggacaatcagggccatgggtggcccgggctggggctagggcacaggctcctttttatgtttggaggcagtggcaaaaggactttttaatttatttcagatgaatgttttatggagaacttgttgcaatatgtataaaagggaaatctcta

SEQ ID NO: 132141 - DNA, 3354 bp, Homo sapiens
  Payload ID: 5794
  Gene Symbol: FAM160A2
  Gene Name: family with sequence similarity 160, member A2
  Uniprot ID: Q8N612
  ENST ID: ENST00000449352
  CDS Start-End: 265-3183
gcggcggcctgaactcacctaacaccgcagcagcaaccgggcccggccaggttcggcgttccgtgagtgaacgatttagaaatctggactggccagtgacctctgggcttgccattccagcctggtataacctctggctccatgggcagctactggctcctacagaccggatgaagcagactggagacacaagtggagaaaacctccagctggcaaatcctcagagtgtaggcctctggctgccagtcctgcccagcctgcctcatggagaggatgaattggctgagcagactggcctcccggggccctgggcaccgtatacctcaaggggccaatctccaaaccccagtcatggctgatcccgagacctgcctcatggtcttcaagaatcactggtcccaggtggtgcgaatcctggagcggcaaggccctcgggcagctcctgggggtgcagacgatctcagtgctgtgcgcaaccacacttaccagatgttgacactgctggcagaggaccgtgcagttccctcggcccccacaggccctgggcccctgctggagtttgctctgcacgaggatctgctgacccgtgtgttgacatggcagctgcaatgggatgagcttggggatggggtcgaggaacggcgggctgagcaactgaaactatttgaaatgctagtgagcgaagctcgccagccactgttgcggcatggtccagttcgtgaggctctgctcaccctgctggatgcctgtggccgccctgtgcccagtagcccagcactggatgaaggcttggtgctacttctcagccagctgtgtgtttgtgtggcccaggagccttcattgctcgagttcttcctgcagccacctcctgagcctggagccgctccccgtcttcttctcttttctcgccttgtcccttttgtgcatcgagagggcaccctgggccagcaggcccgtgatgccctacttcttctcatggctttgtcagctgggagccccactgtgggccgctacatcgcggatcactcttacttctgcccggtgctggccacagggctcagtgccctgtactcatcactgcctcgaaagattgaggttccaggggatgattggcactgtctgcgacgggaagactggctgggagtgccagcccttgcactcttcatgagttccctggagttctgcaatgcagtaattcaggtggctcaccccctggtgcagaagcagttggttgattatatccataatgggttcctggtgcctgtcatgggtcctgccttgcacaagacctctgtggaggagatgatcgccagtaccgcctatctggaacttttcctacggagtatctcagagcctgctttgctccgtaccttcctgcgattcctgttgttgcaccggcatgacacccacaccatcctcgacaccctcgttgctcgtattggcagtaactcccggctctgcatggtctctctgagtctcttcaggaccctcctgaacctcagctgtgaggatgtcctgctgcagctggttctcaggtatcttgttccatgtaaccacgttatgctgagccagaagccggctgttcgtgatgtggacctatatggacgagcagctgacaagtttctctccctaatcccacgctgttgtcggcaccacgcccccagcccacctcgtccagagcatgcctcatgggcacgaggtcctggaagcccaagtgtggactcctcttctgtgacgacagtaccccggccctccacaccatctcgtctggctctcttcctgcggcagcagagcctgggtggctctgagtctccaggcccagccccttgctcaccagggctttctgcatcccccgcctccagccctggccgacggcctacccctgcagaggagcctggagagctggaagacaattacctggagtatctgcgtgaggcacgtcgtggtgtggaccgctgtgtccgagcctgccgtacctggtctgccccctatgatggcgagcggccctctcctgagcccagtccttttggctcccggactaagaaacgcagcctactgcctgaggaggacaggaacaacgtgggggaaggggaggaggaagagctggggaggagggggcgggctgggggtgcaggggagggccctggtcacctgccccctccccagctcaatggagtgccaggatcatggcctgagggggccaagaaggttcgtctggtgccaaaggagggagctggggaactgctagagggcatctccgagggcatggcaggactagagggctttgggcaggagctccgggagctagaggtggcattgagcaatgggggaactggctcagagtcccccttagaacctccactgccccttgaggaggaggaggcctacgagagcttcacctgtccccctgagccccctggccccttcctcagcagccctttgcggactctcaaccagctgccaagccagcccttcactggccccttcatggctgtgctctttgccaaactcgagaacatgctgcagaactccgtctatgtcaacttcctgctgacggggctggtggcccagctggcctgtcacccccagcccctgctccgctctttcctgctcaacaccaacatggtcttccagcccagtgtcaagtccctgctgcaggtgctgggctctgtgaagaataagattgagaactttgcggcttcccaggaggacttcccagcactgctgtccaaagccaagaagtacctcattgcccgtggcaagttggactgggctgagggccctgcagcaggacctgccccacgccgttctgatcccctagtgaagagccggaggccatccttgggggagttactcctgcggcatgcacacagtccaaccagggcccggcaggcggcacaattggtccttcagcctgggcgagacggagcaggacttggcctaagtgggggctcccctggggcttcaactccagttctactcacccggggcggggcccctgaacgccaaggtgaggctcttcgagtcaagaatgctgtctactgtgcagtcattttccctgaatttctcaaggagttggctgccatctcccaggctcatgccgtcacctcgcctttcttgttggagacttcagaggaaggatctggccctctcatctcaggctgtgggcccctcaatccttaactttcttccatggacaatcagggccatgggtggcccgggctggggctagggcacaggctcctttttatgtttggaggcagtggcaaaaggactttttaatttatttcagatgaatgttttatggagaacttgttgcaatatgtataaaagggaaatctctattctgtgctc

SEQ ID NO: 132142 - DNA, 3327 bp, Homo sapiens
  Payload ID: 5794
  Gene Symbol: FAM160A2
  Gene Name: family with sequence similarity 160, member A2
  ENST ID: ENST00000524416
  CDS Start-End: 312-2828
gcgtgtggcgcggggcggggcgcggctggtgcgcttgagaagcgatggcggcggcctgaactcacctaacaccgcagcagcaaccgggcccggccaggttcggcgttccgtgagtgaacgatttagaaatctggactggccagtgacctctgggcttgccattccagcctggtataacctctggctccatgggcagctactggctcctacagaccggatgaagcagactggagacacaagtggagaaaacctccagctggcaaatcctcagagtgtaggcctctggctgccagtcctgcccagcctgcctcatggagaggatgaattggctgagcagactggcctcccggggccctgggcaccgtatacctcaaggggccaatctccaaaccccagtcatggctgatcccgagacctgcctcatggtcttcaagaatcactggtcccaggtggtgcgaatcctggagcggcaaggccctcgggcagctcctgggggtgcagacgatctcagtgctgtgcgcaaccacacttaccagatgttgacactgctggcagaggaccgtgcagttccctcggcccccacaggccctgggcccctgctggagtttgctctgcacgaggatctgctgacccgtgtgttgacatggcagctgcaatgggatgagcttggggatggggtcgaggaacggcgggctgagcaactgaaactatttgaaatgctagtgagcgaagctcgccagccactgttgcggcatggtccagttcgtgaggctctgctcaccctgctggatgcctgtggccgccctgtgcccagtagcccagcactggatgaaggcttggtgctacttctcagccagctgtgtgtttgtgtggcccaggagccttcattgctcgagttcttcctgcagccacctcctgagcctggagccgctccccgtcttcttctcttttctcgccttgtcccttttgtgcatcgagagggcaccctgggccagcaggcccgtgatgccctacttcttctcatggctttgtcagctgggagccccactgtgggccgctacatcgcggatcactcttacttctgcccggtgctggccacagggctcagtgccctgtactcatcactgcctcgaaagattgaggttccaggggatgattggcactgtctgcgacgggaagactggctgggagtgccagcccttgcactcttcatgagttccctggagttctgcaatgcagtaattcaggtggctcaccccctggtgcagaagcagttggttgattatatccataatgggttcctggtgcctgtcatgggtcctgccttgcacaagacctctgtggaggagatgatcgccagtaccgcctatctggaacttttcctacggagtatctcagagcctgctttgctccgtaccttcctgcgattcctgttgttgcaccggcatgacacccacaccatcctcgacaccctcgttgctcgtattggcagtaactcccggctctgcatggtctctctgagtctcttcaggaccctcctgaacctcagctgtgaggatgtcctgctgcagctggttctcaggtatcttgttccatgtaaccacgttatgctgagccagaagccggctgttcgtgatgtggacctatatggacgagcagctgacaagtttctctccctaatcccacgctgttgtcggcaccacgcccccagcccacctcgtccagagcatgcctcatgggcacgaggtcctggaagcccaagtgtggactcctcttctgtgacgacagtaccccggccctccacaccatctcgtctggctctcttcctgcggcagcagagcctgggtggctctgagtctccaggcccagccccttgctcaccagggctttctgcatcccccgcctccagccctggccgacggcctacccctgcagaggagcctggagagctggaagacaattacctggagtatctgcgtgaggcacgtcgtggtgtggaccgctgtgtccgagcctgccgtacctggtctgccccctatgatggcgagcggccctctcctgagcccagtccttttggctcccggactaagaaacgcagcctactgcctgaggaggacaggaacaacgtgggggaaggggaggaggaagagctggggaggagggggcgggctgggggtgcaggggagggccctggtcacctgccccctccccagctcaatggagtgccaggatcatggcctgagggggccaagaaggttcgtctggtgccaaaggagggagctggggaactgctagagggcatctccgagggcatggcaggactagagggctttgggcaggagctccgggagctagaggtggcattgagcaatgggggaactggctcagagtcccccttagaacctccactgccccttgaggaggaggaggcctacgagagcttcacctgtccccctgagccccctggccccttcctcagcagccctttgcggactctcaaccagctgccaagccagcccttcactggtaagctacttagcctaggccttcccttctgtgtactctttgcatgttctcgacatgtttgtgctggtttcttggacctcttggccatgtcatttctgtgtacttgcctagcccctcatccatcctgcttgcatcacttccagatacgtgtcatgtcatacttgtgtccctgtgtctgtctgtacgtcttccatgcttgtgctggtttgagtattgacttacatctgagccttgtatgtatgtcctatgtgcatgttcctcctctttccctagtctggccatttcctgcgatttgtaattaggatattctgtgtttgatgtttcctggtgaatcacagcaatatttctgaaccatattgaagacgtatgtgctgtcctgtatggagaggcacctaaacactctctatgccattccgtccagtttatctgtctgggtcttgggttttctgtcagctctcctggggcctaaggttaaccttctggtatttttctccctactcagctccttcctccccacctcttcaaagaaggacttgatttcaagtttttcctgttcgctttccttgtaccttcttggttgctgtgactgtctgctagcactaagactgtcttaagcagatagagtgcaatttctttgaaggcaaatgacaaagcgtggccctgagctccctgactgagttcatttggactctcaaggatgccctggagctagactcgatctgagtggttggactaactcctctttgtttttgtatgagagccagcttaccccgccattctaaacctcaggccaggaaaacc

SEQ ID NO: 132143 - DNA, 666 bp, Homo sapiens
  Payload ID: 5795
  Gene Symbol: FAM160B1
  Gene Name: family with sequence similarity 160, member B1
  ENST ID: ENST00000369246
  CDS Start-End: 310-615
gaaggaacccgagccgggctgccaccgtgtcccaaccggtgccgccgccggagcttctccgggccccgagtcctcgccgaacgccctcctcgccgcccgccgcgtcccggcgccctccggagccgccgagccgcccgcgcacacctgaagcggccgggccaggccctgcctcgatcctcagctcgtcctccccgccccgcaccggccttcactctggagcggccccggcagccgcagcaggggcggcggcggcggatcgaggagctctccaggtcgtcccgggagaggctgctgcagtcccgggacaggatgttctccaagttcacctccatcctgcagcacgccgtggaggcgcttgcaccttctcttcctttacaagaagattttgtttatcactggaaggcaattacccattactacatagagacttcagatgataaagccccagtgaccgatacaaatattccatcgcatctggaacagatgttagatatactggttcaagaagaaaatgaacgggaatctggagagacagggccatgtatggaatatttgcttcatcacaagatcttggaaacattatataccttggggaaagctgatgtaagttcctgatccacaccatgttcttgggcattagtacatgcattaatgtcttacgaataa

SEQ ID NO: 132144 - DNA, 5810 bp, Homo sapiens
  Payload ID: 5795
  Gene Symbol: FAM160B1
  Gene Name: family with sequence similarity 160, member B1
  Uniprot ID: Q5W0V3
  ENST ID: ENST00000369248
  CDS Start-End: 336-2633
gcaggccgcggcgggcagagcggggggaaggaacccgagccgggctgccaccgtgtcccaaccggtgccgccgccggagcttctccgggccccgagtcctcgccgaacgccctcctcgccgcccgccgcgtcccggcgccctccggagccgccgagccgcccgcgcacacctgaagcggccgggccaggccctgcctcgatcctcagctcgtcctccccgccccgcaccggccttcactctggagcggccccggcagccgcagcaggggcggcggcggcggatcgaggagctctccaggtcgtcccgggagaggctgctgcagtcccgggacaggatgttctccaagttcacctccatcctgcagcacgccgtggaggcgcttgcaccttctcttcctttacaagaagattttgtttatcactggaaggcaattacccattactacatagagacttcagatgataaagccccagtgaccgatacaaatattccatcgcatctggaacagatgttagatatactggttcaagaagaaaatgaacgggaatctggagagacagggccatgtatggaatatttgcttcatcacaagatcttggaaacattatataccttggggaaagctgattgtcctccgggaatgaaacagcaggttttggttttctatacgaaacttctgggaagaatccggcagccactacttccacacattaacgtgcacaggccagtgcagaaattaattagactctgtggtgaagtcctagcaacaccaacagaaaatgaagagattcagtttctttgcattgtgtgtgcgaagctgaaacaggacccctacctggttaactttttcctagagaataagatgaaatcattggcttccaaaggagtaccaaatgtaatttcagaagatacattaaaaggtcaggattccttgtcaacagatacaggacagtcccgtcaaccagaggaactatctggtgctactggaatggagcaaacagaattggaagatgagcctcctcatcagatggatcacctgtccacaagcttggataacctcagtgtcacctcactgccagaggcctcggttgtttgtccaaatcaggattacaatttagtgaattctttgttaaatcttactagaagtcctgatggcagaatagctgtgaaggcatgtgaaggcttgatgctgttagtaagtttgccagagcctgcggctgcaaagtgccttacacagagcacttgcttgtgtgaactactgacagacagacttgcctccctgtacaaggccctacctcagtcagtggatccgttagatattgaaaccgtggaagcaattaactggggcttggactcatatagtcataaagaagatgcttcagcatttccaggaaaacgagccttaatttcatttctttcctggtttgattattgtgatcagctcattaaggaagcccaaaagactgctgctgttgctcttgccaaagctgttcatgaaagatttttcattggtgttatggaacctcaattaatgcaaacttctgagatgggtattctcacatccactgctctgcttcatcgcatcgttcggcaagtgacctctgatgttttgcttcaagaaatggtgttttttatccttggagaacagagggaaccagaaactctggcagaaatcagcagacatcctttaaggcataggttaattgaacattgtgatcacatatctgatgagataagcataatgacattacgaatgtttgaacatcttttacaaaaacccaatgagcacattctttacaacttggtcttgagaaatcttgaagaaagaaattatacagaatataaacctttgtgcccagaagataaagatgtggtagaaaatggattgatagcaggagcagtagatctggaagaagatccattatttactgacatttcaccagaaaacactttgccaaaccaagagtggcttagttcttcacctcctgctactccagaccaccccaaaaatgatggaaaaactgaagttcataaaattgtaaatagttttctctgtctggtaccggatgacgcaaaatcctcctaccatgttgagggcacaggatatgacacttacctccgagacgctcataggcagttccgagactactgtgctatctgcttaagatgggagtggcctgggtctccaaaagcattggaaaagtgcaatttagaagctgctttctttgaaggtcattttttgaaagtgctgttcgacagaatgggaagaattcttgatcagccatatgatgtaaacttacaagtaacctcagtgttatctagactttctctcttccctcatccacacatccacgagtaccttttggatccttacgtgaacctcgctcctggctgtagatctctcttctctgtaattgtcagggttgttggagaccttatgcttcgaatccagcgtattcaagactttactcccaagcttctgttagtcagaaagcggttacttggtttggaacctgaaggccctattattgaccacatcacactgctagagggtgtgattgtgttagaagagttctgtaaggagctggcggcaatcgcatttgtaaaatatcatgcttcctccacaccataaataacatctttcatgtaactgggggaacagaactactgtgtacatttcaccaaaaaagactcagttccacccagccacaagaggataaaaagcctttttaaacgcagtattgctgtaaactggacagaaccattaagaacctattgagtggacattcttggtgaaatgttgtataatgttgttttcattggctttatcataatggttctatatatacaattgcacattgttgaatccaggatacaatcaaaggaacttcaggaaataagcatttctaatgactgtgaaaagctgcaatatttccaatgtcatgactttgatgatatttctgttatattaatgtccttttaggtagcaaggcattttgacattctctgggactcaaatgcttgtattcttttggattaataagtagcaaaaaaaaatcactaattttataactttttaaggtcagaattcttatcaaacaaaatatgaaaactgtaaatgagaaaaaaatacaattcagaaaccattgaatgaattaattataggcgataaaaatgtgtagagcaccattaactttcttcagcttttttaagaataacaatttaatatgataaattcttgattaatataatatatctatatttttaaagaaatgttcttttactcttttgtgcacatagccatgttagtgattttcttcatgtgtgggtcccagtttatttaaactgtgtcgttttcgcagcagtgttcaatttgctcaccattggtagtgtttgctaaaattgtatttttttaagctaagtaacatgtactgggttgagaacctttttcccccctctccctctcagaaaattgctttataaaattgctttataatttgattttcttactgaaacgcatggtggtgtctaggtggggaactgactgataacccttggcagcaatcaaagtgccagtggctcctcgatgtttacatttttttctattttgttcagtcttttgttttaaatgattctaaagagattaaagaaaacagagttttaaatgtcctatttacatgttaaaggatttggggaaattgggtatgtatgtgaatgggtgtacatgtaggaacctgtagttcagcaaagctgcgctgggcacagcatgcttgtacttgattgacaaaatcgtgtttgccagtccactttctatttttcctttaagtgatgctgatcactcaaataatgcttttaagctattgtttgtttttatttgacatgttaagccgcagcactttcttcttcatctttccatttactgatatttgggggaacaggctatcaaaggttccggcttgaagggaactgtcactaccccctctaggaagttattttatgtagcatgtttgcatatacgcattgtgtggcatgtgcatagaggcttgttttacacctatctgctcattttgttgtgttagcttttctggtttatttcatagtttgttcttgctatttattaagaacagaatatcaaaagattatgaatagcctcagctctagaatgcttaccactgttaaaacaacaaaaagactaaacctctaatttcatgcaaatctttgttagcttattctaagaaatttattaagtaaaacaaagaaaaaacagaagtgggagatagttattttgtgcgtaattttctttaaatcattttgaatgatgtgaaggcattcagtttgctgtatttttttaatcacttcatacaaggaaaacttcgacatttacatttctagatgtagtaacagtctactttgatatatgagtatttaaactaaggcattaagagatattagatatttcttaatgttttcatagtgctcaataggtgtagtagcaatgatattacctctgaaaccaaatactcttttatccttgattccactatgggaccttataactagtccatgaaaccaagctcagaaaagctttaactcttatatttgtgtatatgtatgctgcttctgaaaatataatttttctaagttgttgtaatgactttaatttgtaatcagctaaggcttaagatttcatttgtttctaagtttctgtttttcatcccttcttttttcttttatatttagttcagacctagagccagtagaagctctcacagtgagttcaatttgttagtgaaacattgtactgcatcaccagtttttcttaccttctgttgacagctgaatatttctgttactcagtacttgcaaaaacagtaactaaaatgcactatgctgagtggaaagcaccgtcataacaattgattgccatagcaagttccaaagtgaatttcagccttgcttcacatttgtatcaataaatatgcacattttttaaaactttctaacaatatagtctttggatttgtttttagttatgagccgcattctttacttgatagaactcagatttgtcttagcctattgccatatagtactcaccttataactatgtaactttctcgtaatgtatctgtttgtgcaatatggaagctgtgagtggattcatagctttttggtttaattgtacattattgtgtgtgtatatatgtatatatgtatatatataaggaccaaaattcttagctcgcttacactgttgctagtgtaaacattgttacacttaattttacagggcacaaattatggaattacttcataaattcatggtaatgttttcataaattattgcattaacatacaattgccatttaattatgaagtccatcagtattgacagaagacgttacagtgaagtgctaaaaccacactatatggtaattatattttgggttatgtagtaaatcaaatatgcatgtcattgtgacactttatgtgttaaaacatggtagataatcacattttctgggccctgtaaaatagtgttactgtaatactctgttttgcctcctgccttgtttacattaaacaggatatttggtaaatttttttgtattgaaagttgtgtaggttactgacagtgttaccagcgtctggaattcttggtccctccgtggagaaactcttcagatggtcattgtgtacctactctctcttcaaaggaagttgtgatcaagttcaactttttgtgctaacaatgcatgcaggactaagagggatgatctaaaaaataaataatgtaatttaaacaaaa

SEQ ID NO: 132145 - DNA, 2870 bp, Homo sapiens
  Payload ID: 5795
  Gene Symbol: FAM160B1
  Gene Name: family with sequence similarity 160, member B1
  Uniprot ID: Q5W0V3
  ENST ID: ENST00000369250
  CDS Start-End: 336-2552
gcaggccgcggcgggcagagcggggggaaggaacccgagccgggctgccaccgtgtcccaaccggtgccgccgccggagcttctccgggccccgagtcctcgccgaacgccctcctcgccgcccgccgcgtcccggcgccctccggagccgccgagccgcccgcgcacacctgaagcggccgggccaggccctgcctcgatcctcagctcgtcctccccgccccgcaccggccttcactctggagcggccccggcagccgcagcaggggcggcggcggcggatcgaggagctctccaggtcgtcccgggagaggctgctgcagtcccgggacaggatgttctccaagttcacctccatcctgcagcacgccgtggaggcgcttgcaccttctcttcctttacaagaagattttgtttatcactggaaggcaattacccattactacatagagacttcagatgataaagccccagtgaccgatacaaatattccatcgcatctggaacagatgttagatatactggttcaagaagaaaatgaacgggaatctggagagacagggccatgtatggaatatttgcttcatcacaagatcttggaaacattatataccttggggaaagctgattgtcctccgggaatgaaacagcaggttttggttttctatacgaaacttctgggaagaatccggcagccactacttccacacattaacgtgcacaggccagtgcagaaattaattagactctgtggtgaagtcctagcaacaccaacagaaaatgaagagattcagtttctttgcattgtgtgtgcgaagctgaaacaggacccctacctggttaactttttcctagagaataagatgaaatcattggcttccaaaggagtaccaaatgtaatttcagaagatacattaaaaggtcaggattccttgtcaacagatacaggacagtcccgtcaaccagaggaactatctggtgctactggaatggagcaaacagaattggaagatgagcctcctcatcagatggatcacctgtccacaagcttggataacctcagtgtcacctcactgccagaggcctcggttgtttgtccaaatcaggattacaatttagtgaattctttgttaaatcttactagaagtcctgatggcagaatagctgtgaaggcatgtgaaggcttgatgctgttagtaagtttgccagagcctgcggctgcaaagtgccttacacagagcacttgcttgtgtgaactactgacagacagacttgcctccctgtacaaggccctacctcagtcagtggatccgttagatattgaaaccgtggaagcaattaactggggcttggactcatatagtcataaagaagatgcttcagcatttccaggaaaacgagccttaatttcatttctttcctggtttgattattgtgatcagctcattaaggaagcccaaaagactgctgctgttgctcttgccaaagctgttcatgaaagatttttcattggtgttatggaacctcaattaatgcaaacttctgagatgggtattctcacatccactgctctgcttcatcgcatcgttcggcaagtgacctctgatgttttgcttcaagaaatggtgttttttatccttggagaacagagggaaccagaaactctggcagaaatcagcagacatcctttaaggcataggttaattgaacattgtgatcacatatctgatgagataagcataatgacattacgaatgtttgaacatcttttacaaaaacccaatgagcacattctttacaacttggtcttgagaaatcttgaagaaagaaattatacagaatataaacctttgtgcccagaagataaagatgtggtagaaaatggattgatagcaggagcagtagatctggaagaagatccattatttactgacatttcaccagaaaacactttgccaaaccaagagtggcttagttcttcacctcctgctactccagaccaccccaaaaatgatggaaaaactgaagttcataaaattgtaaatagttttctctgtctggtaccggatgacgcaaaatcctcctaccatgttgagggcacaggatatgacacttacctccgagacgctcataggcagttccgagactactgtgctatctgcttaagatgggagtggcctgggtctccaaaagcattggaaaagtgcaatttagaagctgctttctttgaaggtcattttttgaaagtgctgttcgacagaatgggaagaattcttgatcagccatatgatgtaaacttacaagtaacctcagtgttatctagactttctctcttccctcatccacacatccacgagtaccttttggatccttacgtgaacctcgctcctggctgtagatctctcttctctgtaattgtcagggttgttggagaccttatgcttcgaatccagcgtattcaagactttactcccaagcttctgttagtcagaaagcggttacttggtttggaacctgaaggccctatgcagacgttgccttcatggtggtaagagggattccagagtctcttatgtcctcaaagcttcaagctcagccaaaagaatctcgatggtttccacaaaaaatcttgggccttggatcaactgcccacccttgaaccaatcctggtggccccaggctgattggcagacctgaatcacctatcccatgcccagaactttggcttgaccaggctcatccaaaacaagggaatccagagtgtttccccaaagaaaatcagggggctattactgggaaaaagaattccaccacaagtataaaaaatactgttatcaataaaacatcacctgatactttggttcattaaa

SEQ ID NO: 132146 - DNA, 469 bp, Homo sapiens
  Payload ID: 5795
  Gene Symbol: FAM160B1
  Gene Name: family with sequence similarity 160, member B1
  ENST ID: ENST00000411414
  CDS Start-End: 1-252
ctttctctcttccctcatccacacatccacgagtaccttttggatccttacgtgaacctcgctcctggctgtagatctctcttctctgtaattgtcagggttgttggagaccttatgcttcgaatccagcgtattcaagactttactcccaagcttctgttagtcagaaagcggttacttggtttggaacctgaaggccctatttcagacctagagccagtagaagctctcacagtgagttcaatttgttagtgaaacattgtactgcatcaccagtttttcttaccttctgttgacagctgaatatttctgttactcagtacttgcaaaaacagtaactaaaatgcactatgctgagtggaaagcaccgtcataacaattgattgccatagcaagttccaaagtgaatttcagccttgcttcacatttgtatcaataaatatgcacattttttaaaactttctaacaa

SEQ ID NO: 132147 - DNA, 4245 bp, Homo sapiens
  Payload ID: 5796
  Gene Symbol: FAM160B2
  Gene Name: family with sequence similarity 160, member B2
  Uniprot ID: Q86V87
  ENST ID: ENST00000289921
  CDS Start-End: 47-2278
gctgccgccgccgctttcgcccgggagccgggggccgggcgccatcatgctgagccggctcggggcgctgctgcaggaagccgtgggggcgcgcgagcccagcattgacctgctgcaggccttcgtggagcactggaagggcatcacgcactactacatcgagagcacagatgaaagcacccccgccaagaagacagacattccctggcggctgaagcagatgctggatatcctggtgtatgaagagcagcagcaggcggccgcgggtgaggcagggccctgcctggagtacctgctgcagcacaagatcctggagactctctgcacgctgggcaaggccgagtaccccccaggcatgcggcagcaggtgttccagttcttcagcaaggttctggcgcaggtgcagcaccccctgctgcattacctcagcgtccacaggcctgtgcagaaactcctccgacttggtgggactgcttccggatccgttacagaaaaggaggaggtgcagttcaccaccgtcctctgctccaagatccagcaggacccagagctgctcgcctacatcctggaaggtaaaaagattgtaggtaggaagaaagcatgcggagaacccactgccctgcctaaggacacaaccagccacggggacaaggactgctcccacgatggtgctcctgccaggccccagctggacggggagtcctgtggggcccaggccttgaacagccacatgcctgctgagaccgaggagctggacggtgggaccacagagagcaacctgattacctccctgcttgggctgtgccagagcaagaagagtcgggtggccttgaaggcccaggagaacctgctgctcctggtgagcatggcctccccagcagctgccacctacctggtacagagcagcgcctgctgccctgcgatcgtccggcacctttgccagttgtaccggtccatgcctgtcttcctggaccccgcagacattgccaccttagagggcatcagctggaggttacccagtgccccgtctgatgaggcttccttccctggcaaggaggccttggctgccttcttgggctggtttgattactgcgaccacctcatcacagaggcacacacggtggttgcggacgccttggcgaaggctgtggctgagaacttcttcgtggagaccctgcagccccagctcctgcacgtgtccgagcagagcatcttgacctccaccgccctcctcacagccatgctgcgccagcttcgctcccctgcgctgctgcgggaggccgtggctttcctcctgggcacagaccggcagcctgaagcccccggggacaacccccacaccctgtatgctcatctcatcgggcattgtgaccacctctctgatgagatcagcatcaccacactccggctgtttgaggagctgctgcagaagccccacgaggggatcatccacagcctggtcctgcgcaaccttgagggccgcccttacgtggcctggggctcaccagagcctgagagctatgaggacaccctagacctggaggaagacccctacttcaccgacagcttcctggattccggctttcaaactcccgcaaagcctcgcctagctcctgctaccagttacgatggcaaaacagcagtgaccgagatcgtcaacagtttcctgtgcctggtccccgaggaagccaagacctctgccttcctggaggagacaggctatgacacatacgtccacgatgcttatggcctgttccaggagtgcagctcccgcgtcgcctcctggggctggcctctgacccccacacctttggacccccatgagcccgagcgacctttcttcgagggccacttcctccgagtgctgtttgaccgcatgtcccggattctggatcagccatacagcctgaacctgcaggtgacctcggtcctgtcccggcttgccctcttcccccacccccatattcatgagtacctgctggatccgtacatcagcctggcccccggctgcaggagcctattctccgtgttggtgagggtgatcggggacttgatgcagagaatccagagggtaccccagttcccaggcaagctgctcctggtgcgcaagcagttgacgggccaggctcctggggagcagctggaccaccagaccctcctccagggcgtggtggtgctggaggagttctgcaaggagctggctgccattgccttcgtcaagtttcccccacatgatcctcgccagaacgtctccccagccccggaagggcaggtctgagccagcaccagggcggtgggagactcctgtccacacctctgccccagagctgcctcctgcctggcactgccgccacactcccctcctgggatggggcttctgctcccgggctcactcaaggagactgcggcatgttgaccacaccagactgggtttcagggaatgggcatgccaggtgccaaggagccaaacagatggctttccaggcagcaaggtccttggggccttcttggaggagcttgggtgacagccaggtgagcacccagaccccagaccctcatgtgctgtgtgcctggccccttctgtactggccatttgtggccagggccaagcctgtgactcaactccaggggcaagatggggagtgagctgatggctccgagactggtcaggagcccaggccagtgagatggggcctggagccttgtctgtgtcacattaggtaccatgggagctgctgagacctgacattttgtcccctgcctacatggcttggcccatggagaaggagcagtgaatgggatcgtcggggaagcccctcttcctgctctgctcccctggaaactgttgcaaaactcccagccgcctcatggcaaatgcccaaagcatgttccgcacccaggcgggggcccctgctaatgagaaccttggtgcagctgcagccaggaggggagcgggcccaggagccaggctcaggtccagctggttcctctctggcgccttctgaacccgtctcagcaggtccacagcacctgggcagaggtcagagaccaggggaggccgggccttgccctcccttctgcccagggcccagtgttcttgatagaagacccttctggggagccagggagctcaggggacagataagggaaggacgccccctgactccaggcccctgagcctggcgggaagtggctgcggcccaggcagccagtcctggtggtgttctccctgcatgccctccgtggctgggctgccaccccacccggcccgaatctgtcttgacctgcaggaatacacgggcggcgccaggcattacctcacagcgggactacacagttgctggctttgctcctgggcaaggaggagcaggccagagcctcttttgcttccttttcttgcccatgccgcttctagaagccaggcacaggttgccaagaggtgacacgaaacaggaggaaactcagtgacctctgcctctcccacattcctccccgcgggggaggacctcgccgctctgaagagcaccgtgcacatgtgggtgcacaaacgtgggtgttggtgtggacggggcgcagatctccgtggatgaactgcgtctggactcttagattcataaaatattcgagggtttgggagtcacagaccctcccctctcctcagtgcactttggcatttgcacggtgtcttccccggacagcacagcaataaatggtgtgattgcgtggacaccgtggctctgttcttggccaagtttccccaccttctgcccaggactccactgctaattcgggcccatcttcctccccaaggaagacaaattctttttctagcgctgcagcagggaggtggggtgggcggtaaacagacaggctctggcagtgcagatctgctgatcctcagcgcctgccaggagccagactcttggcggagcagtgccacttctgctgggctgacctgcagcggagagtctgcccaccccggagacaccatgagggaatggaccacgtgggagcatctgtgtgcaagtctcatttgggtgtgtttatgctgcgtgttgtatgcctgttttagtcataaagtaggcctgatatttaaaaccttgtctttaagttcaaggctgcagtgagccgattgcaccactgcactccagcctgggcaatagagtaagaccctgtctaaaaaaaaaaaaaaaaaatttcacaggtgtgttctcagggaaaaagaaaagttaacacataaataaa

SEQ ID NO: 132148 - DNA, 932 bp, Homo sapiens
  Payload ID: 5796
  Gene Symbol: FAM160B2
  Gene Name: family with sequence similarity 160, member B2
  ENST ID: ENST00000427751
  CDS Start-End: 71-226
ggggctgcctcctccgcctagagcgctgccgccgccgctttcgcccgggagccgggggccgggcgccatcatgctgagccggctcggggcgctgctgcaggaagccgtgggggcgacaactccaggaccttgttggggtgcaggacgcccttcccgtcaccccgggacgtgggaagtgcaggccctgccggtccaagtccccacgaaggcgcgagcccagcattgacctgctgcaggccttcgtggagcactggaagggcatcacgcactactacatcgagagcacagatgaaagcacccccgccaagaagacagacattccctggcggctgaagcagatgctggatatcctggtgtatgaagagcagcagcaggcggccgcgggtgaggcagggccctgcctggagtacctgctgcagcacaagatcctggagactctctgcacgctgggcaaggccgagtaccccccaggcatgcggcagcaggtgttccagttcttcagcaaggttctggcgcaggtgcagcaccccctgctgcattacctcagcgtccacaggcctgtgcagaaactcctccgacttggtgggactgcttccggatccgttacagaaaaggaggaggtgcagttcaccaccgtcctctgctccaagatccagcaggacccagagctgctcgcctacatcctggaaggtaaaaagattgtaggtaggaagaaagcatgcggagaacccactgccctgcctaaggacacaaccagccacggggacaaggactgctcccacgatggtgctcctgccaggccccagctggacggggagtcctgtggggcccaggccttgaacagccacatgcctgctgagaccgaggagctggacggtgggaccacagagagcaacctgattacctccctgcttgggctgtgccagagcaag

SEQ ID NO: 132149 - DNA, 2846 bp, Homo sapiens
  Payload ID: 5796
  Gene Symbol: FAM160B2
  Gene Name: family with sequence similarity 160, member B2
  Uniprot ID: Q86V87
  ENST ID: ENST00000450006
  CDS Start-End: 47-2278
gctgccgccgccgctttcgcccgggagccgggggccgggcgccatcatgctgagccggctcggggcgctgctgcaggaagccgtgggggcgcgcgagcccagcattgacctgctgcaggccttcgtggagcactggaagggcatcacgcactactacatcgagagcacagatgaaagcacccccgccaagaagacagacattccctggcggctgaagcagatgctggatatcctggtgtatgaagagcagcagcaggcggccgcgggtgaggcagggccctgcctggagtacctgctgcagcacaagatcctggagactctctgcacgctgggcaaggccgagtaccccccaggcatgcggcagcaggtgttccagttcttcagcaaggttctggcgcaggtgcagcaccccctgctgcattacctcagcgtccacaggcctgtgcagaaactcctccgacttggtgggactgcttccggatccgttacagaaaaggaggaggtgcagttcaccaccgtcctctgctccaagatccagcaggacccagagctgctcgcctacatcctggaaggtaaaaagattgtaggtaggaagaaagcatgcggagaacccactgccctgcctaaggacacaaccagccacggggacaaggactgctcccacgatggtgctcctgccaggccccagctggacggggagtcctgtggggcccaggccttgaacagccacatgcctgctgagaccgaggagctggacggtgggaccacagagagcaacctgattacctccctgcttgggctgtgccagagcaagaagagtcgggtggccttgaaggcccaggagaacctgctgctcctggtgagcatggcctccccagcagctgccacctacctggtacagagcagcgcctgctgccctgcgatcgtccggcacctttgccagttgtaccggtccatgcctgtcttcctggaccccgcagacattgccaccttagagggcatcagctggaggttacccagtgccccgtctgatgaggcttccttccctggcaaggaggccttggctgccttcttgggctggtttgattactgcgaccacctcatcacagaggcacacacggtggttgcggacgccttggcgaaggctgtggctgagaacttcttcgtggagaccctgcagccccagctcctgcacgtgtccgagcagagcatcttgacctccaccgccctcctcacagccatgctgcgccagcttcgctcccctgcgctgctgcgggaggccgtggctttcctcctgggcacagaccggcagcctgaagcccccggggacaacccccacaccctgtatgctcatctcatcgggcattgtgaccacctctctgatgagatcagcatcaccacactccggctgtttgaggagctgctgcagaagccccacgaggggatcatccacagcctggtcctgcgcaaccttgagggccgcccttacgtggcctggggctcaccagagcctgagagctatgaggacaccctagacctggaggaagacccctacttcaccgacagcttcctggattccggctttcaaactcccgcaaagcctcgcctagctcctgctaccagttacgatggcaaaacagcagtgaccgagatcgtcaacagtttcctgtgcctggtccccgaggaagccaagacctctgccttcctggaggagacaggctatgacacatacgtccacgatgcttatggcctgttccaggagtgcagctcccgcgtcgcctcctggggctggcctctgacccccacacctttggacccccatgagcccgagcgacctttcttcgagggccacttcctccgagtgctgtttgaccgcatgtcccggattctggatcagccatacagcctgaacctgcaggtgacctcggtcctgtcccggcttgccctcttcccccacccccatattcatgagtacctgctggatccgtacatcagcctggcccccggctgcaggagcctattctccgtgttggtgagggtgatcggggacttgatgcagagaatccagagggtaccccagttcccaggcaagctgctcctggtgcgcaagcagttgacgggccaggctcctggggagcagctggaccaccagaccctcctccagggcgtggtggtgctggaggagttctgcaaggagctggctgccattgccttcgtcaagtttcccccacatgatcctcgccagaacgtctccccagccccggaagggcaggtctgagccagcaccagggcggtgggagactcctgtccacacctctgccccagagctgcctcctgcctggcactgccgccacactcccctcctgggatggggcttctgctcccgggctcactcaaggagactgcggcatgttgaccacaccagactgggtttcagggaatgggcatgccaggtgccaaggagccaaacagatggctttccaggcagcaaggtccttggggccttcttggaggagcttgggtgacagccagaagccaggcacaggttgccaagaggtgacacgaaacaggaggaaactcagtgacctctgcctctcccacattcctccccgcgggggaggacctcgccgctctgaagagcaccgtgcacatgtgggtgcacaaacgtgggtgttggtgtggacggggcgcagatctccgtggatgaactgcgtctggactcttagattcataaaatattcgagggtttgggagtcacagaccctcccctctcctcagtgcactttggcatttgcacggtgtcttccccggacagcacagcaataaatggtgtgattgcgtggaca

SEQ ID NO: 132150 - DNA, 1897 bp, Homo sapiens
  Payload ID: 5797
  Gene Symbol: FAM161A
  Gene Name: family with sequence similarity 161, member A
  ENST ID: ENST00000307507
  CDS Start-End: 24-251
gctcaggcctcggaggcggggcgatggccacctcccaccgagtggcgaagctggtggcctccagtctccagaccccggtaaatcccatcactggagcgcgggtcgcccagtacgaacgcgaagaccccttaaaggccctggcggcagcggaggcgatcttggaggacgaagaggaggagaaagtggctcagcccgctggggcatcgagatggggtttcaccatgttggccagattggtctcggattcctgacctcaagtgacccaaagtgctgggattacaggcatgaaccactgtgcctggccaattctgttgatttttcgagtgaaaactgcatactggattcagacactgctactaaaacgaactgctgctgcccagatgaataaccgttgctagactgacacaagccgacaggaagcagtcagagggctaacagaaaggagctgatttgaacaccagcttttctggggtggatgaacatgcaccgataagctatgaggactttgtgaactttcctgatattcaccactctaatgaggagtatttcaagaaagtagaagagttgaaggctgcccacatagaaactatggcaaaattagagaaaatgtaccaggataaattacatttaaaggaagttcagccagtggtcatcagagaagactctcttagtgactcttccagatctgtatcagaaaagaactcctatcaccctgtctcattaatgacatcattttcagagcctgatttaggccagtcttcctccttgtatgtgtcctcctctgaagaggagttacccaacctagaaaaagagtatcctaggaaaaacagaatgatgacctatgctaaggagctcatcaacaatatgtggacagacttttgtgttgaggattatattcgctgtaaagatactggcttccatgcagctgaaaaaagaaggaagaaacgaaaagaatgggtgcccacaattacagtaccggagccttttcaaatgatgataagagaacagaagaaaaaagaagagtccatgaaatctaaatcagatatcgaaatggtacataaagcgctcaaaaaacaagaagaggatccagagtataagaagaaattccgagccaatccagttcctgcatctgtctttctccccctttaccatgatttagtcaagcaaaaagaagaacggagaaggtctctgaaggagaaaagcaaagaagctcttttggcctcacaaaagccatttaaatttatagcaagggaggaacagaagcgagcagcccgggaaaagcagctgagagactttcttaagtataaaaagaaaacaaatcgatttaaagccagacccattcctcgatctacttatggttcaactaccaatgacaagttaaaagaagaagagctctatcgaaaccttaggacacagctgagagcccaggagcatttacagaactcatctcctctgccttgtaggtcagcttgtggatgcaggaaccccaggtgtcctgaacaggctgtaaagttgaagtgtaaacacaaggttaggtgcccaactcctgattttgaggaccttcctgagagataccagaaacacctctcagaacacaagtctccaaaactcttaacagtgtgtaaaccatttgatcttcatgcatctccacatgcatctattaaaagagaaaaaattttggcagacatcgaagcagatgaagaaaatttaaaagaaacacgttggccttatttgtctccaaggcgtaagtcaccagtaagatgtgcaggtgtaaaccctgtgccttgtaactgcaaccctcccgtgcccacggtatcttccagaggacgagaacaagccgtaagaaagagcgaaaaggaaaggatgagagaataccaacgagaactagaagaaagag

SEQ ID NO: 132151 - DNA, 3762 bp, Homo sapiens
  Payload ID: 5797
  Gene Symbol: FAM161A
  Gene Name: family with sequence similarity 161, member A
  Uniprot ID: Q3B820
  ENST ID: ENST00000404929
  CDS Start-End: 13-2163
ggaggcggggcgatggccacctcccaccgagtggcgaagctggtggcctccagtctccagaccccggtaaatcccatcactggagcgcgggtcgcccagtacgaacgcgaagaccccttaaaggccctggcggcagcggaggcgatcttggaggacgaagaggaggagaaagtggctcagcccgctggggcatcggctgatttgaacaccagcttttctggggtggatgaacatgcaccgataagctatgaggactttgtgaactttcctgatattcaccactctaatgaggagtatttcaagaaagtagaagagttgaaggctgcccacatagaaactatggcaaaattagagaaaatgtaccaggataaattacatttaaaggaagttcagccagtggtcatcagagaagactctcttagtgactcttccagatctgtatcagaaaagaactcctatcaccctgtctcattaatgacatcattttcagagcctgatttaggccagtcttcctccttgtatgtgtcctcctctgaagaggagttacccaacctagaaaaagagtatcctaggaaaaacagaatgatgacctatgctaaggagctcatcaacaatatgtggacagacttttgtgttgaggattatattcgctgtaaagatactggcttccatgcagctgaaaaaagaaggaagaaacgaaaagaatgggtgcccacaattacagtaccggagccttttcaaatgatgataagagaacagaagaaaaaagaagagtccatgaaatctaaatcagatatcgaaatggtacataaagcgctcaaaaaacaagaagaggatccagagtataagaagaaattccgagccaatccagttcctgcatctgtctttctccccctttaccatgatttagtcaagcaaaaagaagaacggagaaggtctctgaaggagaaaagcaaagaagctcttttggcctcacaaaagccatttaaatttatagcaagggaggaacagaagcgagcagcccgggaaaagcagctgagagactttcttaagtataaaaagaaaacaaatcgatttaaagccagacccattcctcgatctacttatggttcaactaccaatgacaagttaaaagaagaagagctctatcgaaaccttaggacacagctgagagcccaggagcatttacagaactcatctcctctgccttgtaggtcagcttgtggatgcaggaaccccaggtgtcctgaacaggctgtaaagttgaagtgtaaacacaaggttaggtgcccaactcctgattttgaggaccttcctgagagataccagaaacacctctcagaacacaagtctccaaaactcttaacagtgtgtaaaccatttgatcttcatgcatctccacatgcatctattaaaagagaaaaaattttggcagacatcgaagcagatgaagaaaatttaaaagaaacacgttggccttatttgtctccaaggcgtaagtcaccagtaagatgtgcaggtgtaaaccctgtgccttgtaactgcaaccctcccgtgcccacggtatcttccagaggacgagaacaagccgtaaggagatcacttgaggaaaagaaaatgttggaagaagagagaaatcggatcctaactaaacagaagcaaagaatgaaagaattgcagaaactcctgacaacccgggctaaggcttatgactcacatcaaagtttagctcaaatatctaaatccagagtaaaatgtctcagaaagagcgaaaaggaaaggatgagagaataccaacgagaactagaagaaagagaagaaaaattaaaaaagaggccactgctatttgaaagagttgctcagaaaaatgcaagaatggcagcagaaaagcattattctaataccctaaaagcactaggaatatctgatgagtttgtttcaaagaaaggccaaagtggaaaagtacttgagtacttcaacaatcaagagacgaaaagtgtcactgaagacaaagaaagctttaatgaagaagaaaaaatagaagaaagagagaatggggaagaaaattattttattgataccaacagccaggattcttacaaggaaaaagatgaagccaatgaggaaagtgaagaagagaaatctgttgaagaatcacactgaatcatcaaggtctcctctctatgcccttgctgttgtttgcagcgtcagggtgtcagcagccgcatttgtgtttagaacatctgtggggacgcttctgatatgtgcagggctgttgatcaaagtcatctgtagcctgaaaagcctgaatccagctgattggtcatttgatcagttagagtaaggctttgcctattcagttttaaaaatcattgtgtattatctgtttgcaactatgattttgtatttttaaaaagtgagaaccacagctgtcacaaactgattagttataaaaatatacattatttcattaattttactggaaaaaatggcttagtattgaaaggagagagaagtattggtctttggtggtttactttttaaaaattttggaaagtgtgaatcaataactatttttaattatactatttgcccattctttttctctgcagtgcatttcacagaataaatcctctaacttgttttgctgctctgagccatttttaaaagtatagaaaaaacgccgggtatggtggctcatgcctgtaatcccagcattttgggaggccgagacgggtggatcacgaggtcaggagatcgagaccatcctggctaacacgatgaaaccccgtctctactaaaaatacaaaaaattagccaggcgtggtggtgggcgcctgtagtcccagctacttgggaggcagaggcaggagaatggcatgaacccaggaggcagagcttgcagtgagccgagatcgcgccactgcactccagcttgggcaacagagcgagactccgtctccaaaaaaaaaaaaaaagtatagaaaaaaatggatacttgcaaatttacatttatttttgcactgagagtttactgttaaattgtctacaccatcatccctttttctttttatccttagttctagtccaaattatttttgatttgtaaattattaggaaagtttttatactagtttttttaaccctatgtattattacagatggaagtaattatggcatgtgtgagttataatctaaattaggggcaagtatccctttttttatatgatgaaattgtgcataataacttggctagggcaagtctccaaagtaattcagatttaactcttcactgctagacccagttgtgttcaactttttacatattattgccaacacactttatctctctgtgtacagtgttaatctgattttataaatctatatttttttctttaagcaaatttttgttttaaaatttgaagccaatcataaagataatatagcataagacattttcttttctaaaaacaatcagcatcattttaaaaggatgaactaatacaggtgtatgtaatagcagtgtttccaaactggcaatttatgctttaaatttaaaaataaggtcatttttctccatcaggggcaaatgtttacttgtaattttcttcctacagttcgtgttaaattactttttactattattatattgtaaactccttgggatttggcaccatttaaaaattcatctttgtattcccttaatatttggaacagtattgtacatatggtaggtacttaataaaggtttgaatgagtgtg

SEQ ID NO: 132152 - DNA, 3684 bp, Homo sapiens
  Payload ID: 5797
  Gene Symbol: FAM161A
  Gene Name: family with sequence similarity 161, member A
  Uniprot ID: Q3B820
  ENST ID: ENST00000405894
  CDS Start-End: 103-2085
atagcaaccggctccctagctaggcgcccccgggttgccaggggccgcaccagctttcccgtcccgggccagcgcaggcgctcaggcctcggaggcggggcgatggccacctcccaccgagtggcgaagctggtggcctccagtctccagaccccggtaaatcccatcactggagcgcgggtcgcccagtacgaacgcgaagaccccttaaaggccctggcggcagcggaggcgatcttggaggacgaagaggaggagaaagtggctcagcccgctggggcatcggctgatttgaacaccagcttttctggggtggatgaacatgcaccgataagctatgaggactttgtgaactttcctgatattcaccactctaatgaggagtatttcaagaaagtagaagagttgaaggctgcccacatagaaactatggcaaaattagagaaaatgtaccaggataaattacatttaaaggaagttcagccagtggtcatcagagaagactctcttagtgactcttccagatctgtatcagaaaagaactcctatcaccctgtctcattaatgacatcattttcagagcctgatttaggccagtcttcctccttgtatgtgtcctcctctgaagaggagttacccaacctagaaaaagagtatcctaggaaaaacagaatgatgacctatgctaaggagctcatcaacaatatgtggacagacttttgtgttgaggattatattcgctgtaaagatactggcttccatgcagctgaaaaaagaaggaagaaacgaaaagaatgggtgcccacaattacagtaccggagccttttcaaatgatgataagagaacagaagaaaaaagaagagtccatgaaatctaaatcagatatcgaaatggtacataaagcgctcaaaaaacaagaagaggatccagagtataagaagaaattccgagccaatccagttcctgcatctgtctttctccccctttaccatgatttagtcaagcaaaaagaagaacggagaaggtctctgaaggagaaaagcaaagaagctcttttggcctcacaaaagccatttaaatttatagcaagggaggaacagaagcgagcagcccgggaaaagcagctgagagactttcttaagtataaaaagaaaacaaatcgatttaaagccagacccattcctcgatctacttatggttcaactaccaatgacaagttaaaagaagaagagctctatcgaaaccttaggacacagctgagagcccaggagcatttacagaactcatctcctctgccttgtaggtcagcttgtggatgcaggaaccccaggtgtcctgaacaggctgtaaagttgaagtgtaaacacaaggttaggtgcccaactcctgattttgaggaccttcctgagagataccagaaacacctctcagaacacaagtctccaaaactcttaacagtgtgtaaaccatttgatcttcatgcatctccacatgcatctattaaaagagaaaaaattttggcagacatcgaagcagatgaagaaaatttaaaagaaacacgttggccttatttgtctccaaggcgtaagtcaccagtaagatgtgcaggtgtaaaccctgtgccttgtaactgcaaccctcccgtgcccacggtatcttccagaggacgagaacaagccgtaagaaagagcgaaaaggaaaggatgagagaataccaacgagaactagaagaaagagaagaaaaattaaaaaagaggccactgctatttgaaagagttgctcagaaaaatgcaagaatggcagcagaaaagcattattctaataccctaaaagcactaggaatatctgatgagtttgtttcaaagaaaggccaaagtggaaaagtacttgagtacttcaacaatcaagagacgaaaagtgtcactgaagacaaagaaagctttaatgaagaagaaaaaatagaagaaagagagaatggggaagaaaattattttattgataccaacagccaggattcttacaaggaaaaagatgaagccaatgaggaaagtgaagaagagaaatctgttgaagaatcacactgaatcatcaaggtctcctctctatgcccttgctgttgtttgcagcgtcagggtgtcagcagccgcatttgtgtttagaacatctgtggggacgcttctgatatgtgcagggctgttgatcaaagtcatctgtagcctgaaaagcctgaatccagctgattggtcatttgatcagttagagtaaggctttgcctattcagttttaaaaatcattgtgtattatctgtttgcaactatgattttgtatttttaaaaagtgagaaccacagctgtcacaaactgattagttataaaaatatacattatttcattaattttactggaaaaaatggcttagtattgaaaggagagagaagtattggtctttggtggtttactttttaaaaattttggaaagtgtgaatcaataactatttttaattatactatttgcccattctttttctctgcagtgcatttcacagaataaatcctctaacttgttttgctgctctgagccatttttaaaagtatagaaaaaacgccgggtatggtggctcatgcctgtaatcccagcattttgggaggccgagacgggtggatcacgaggtcaggagatcgagaccatcctggctaacacgatgaaaccccgtctctactaaaaatacaaaaaattagccaggcgtggtggtgggcgcctgtagtcccagctacttgggaggcagaggcaggagaatggcatgaacccaggaggcagagcttgcagtgagccgagatcgcgccactgcactccagcttgggcaacagagcgagactccgtctccaaaaaaaaaaaaaaagtatagaaaaaaatggatacttgcaaatttacatttatttttgcactgagagtttactgttaaattgtctacaccatcatccctttttctttttatccttagttctagtccaaattatttttgatttgtaaattattaggaaagtttttatactagtttttttaaccctatgtattattacagatggaagtaattatggcatgtgtgagttataatctaaattaggggcaagtatccctttttttatatgatgaaattgtgcataataacttggctagggcaagtctccaaagtaattcagatttaactcttcactgctagacccagttgtgttcaactttttacatattattgccaacacactttatctctctgtgtacagtgttaatctgattttataaatctatatttttttctttaagcaaatttttgttttaaaatttgaagccaatcataaagataatatagcataagacattttcttttctaaaaacaatcagcatcattttaaaaggatgaactaatacaggtgtatgtaatagcagtgtttccaaactggcaatttatgctttaaatttaaaaataaggtcatttttctccatcaggggcaaatgtttacttgtaattttcttcctacagttcgtgttaaattactttttactattattatattgtaaactccttgggatttggcaccatttaaaaattcatctttgtattcccttaatatttggaacagtattgtacatatggtaggtacttaataaaggtttgaatgagtgtg

SEQ ID NO: 132153 - DNA, 3579 bp, Homo sapiens
  Payload ID: 5797
  Gene Symbol: FAM161A
  Gene Name: family with sequence similarity 161, member A
  ENST ID: ENST00000456262
  CDS Start-End: 52-480
agctttcccgtcccgggccagcgcaggcgctcaggcctcggaggcggggcgatggccacctcccaccgagtggcgaagctggtggcctccagtctccagaccccggtaaatcccatcactggagcgcgggtcgcccagtacgaacgcgaagaccccttaaaggccctggcggcagcggaggcgatcttggaggacgaagaggaggagaaagtggctcagcccgctggggcatcggctgatttgaacaccagcttttctggggtggatgaacatgcaccgataagctatgaggactttgtgaactttcctgatattcaccactctaatgaggagtatttcaagaaagtagaagagttgaaggctgcccacatagaaactatggcaaaattagagaaaatgtaccaggataaattacatttaaaggaagttcagccagtggtcatcagagaagactctcttagtgactcttccagagcctgatttaggccagtcttcctccttgtatgtgtcctcctctgaagaggagttacccaacctagaaaaagagtatcctaggaaaaacagaatgatgacctatgctaaggagctcatcaacaatatgtggacagacttttgtgttgaggattatattcgctgtaaagatactggcttccatgcagctgaaaaaagaaggaagaaacgaaaagaatgggtgcccacaattacagtaccggagccttttcaaatgatgataagagaacagaagaaaaaagaagagtccatgaaatctaaatcagatatcgaaatggtacataaagcgctcaaaaaacaagaagaggatccagagtataagaagaaattccgagccaatccagttcctgcatctgtctttctccccctttaccatgatttagtcaagcaaaaagaagaacggagaaggtctctgaaggagaaaagcaaagaagctcttttggcctcacaaaagccatttaaatttatagcaagggaggaacagaagcgagcagcccgggaaaagcagctgagagactttcttaagtataaaaagaaaacaaatcgatttaaagccagacccattcctcgatctacttatggttcaactaccaatgacaagttaaaagaagaagagctctatcgaaaccttaggacacagctgagagcccaggagcatttacagaactcatctcctctgccttgtaggtcagcttgtggatgcaggaaccccaggtgtcctgaacaggctgtaaagttgaagtgtaaacacaaggttaggtgcccaactcctgattttgaggaccttcctgagagataccagaaacacctctcagaacacaagtctccaaaactcttaacagtgtgtaaaccatttgatcttcatgcatctccacatgcatctattaaaagagaaaaaattttggcagacatcgaagcagatgaagaaaatttaaaagaaacacgttggccttatttgtctccaaggcgtaagtcaccagtaagatgtgcaggtgtaaaccctgtgccttgtaactgcaaccctcccgtgcccacggtatcttccagaggacgagaacaagccgtaagaaagagcgaaaaggaaaggatgagagaataccaacgagaactagaagaaagagaagaaaaattaaaaaagaggccactgctatttgaaagagttgctcagaaaaatgcaagaatggcagcagaaaagcattattctaataccctaaaagcactaggaatatctgatgagtttgtttcaaagaaaggccaaagtggaaaagtacttgagtacttcaacaatcaagagacgaaaagtgtcactgaagacaaagaaagctttaatgaagaagaaaaaatagaagaaagagagaatggggaagaaaattattttattgataccaacagccaggattcttacaaggaaaaagatgaagccaatgaggaaagtgaagaagagaaatctgttgaagaatcacactgaatcatcaaggtctcctctctatgcccttgctgttgtttgcagcgtcagggtgtcagcagccgcatttgtgtttagaacatctgtggggacgcttctgatatgtgcagggctgttgatcaaagtcatctgtagcctgaaaagcctgaatccagctgattggtcatttgatcagttagagtaaggctttgcctattcagttttaaaaatcattgtgtattatctgtttgcaactatgattttgtatttttaaaaagtgagaaccacagctgtcacaaactgattagttataaaaatatacattatttcattaattttactggaaaaaatggcttagtattgaaaggagagagaagtattggtctttggtggtttactttttaaaaattttggaaagtgtgaatcaataactatttttaattatactatttgcccattctttttctctgcagtgcatttcacagaataaatcctctaacttgttttgctgctctgagccatttttaaaagtatagaaaaaacgccgggtatggtggctcatgcctgtaatcccagcattttgggaggccgagacgggtggatcacgaggtcaggagatcgagaccatcctggctaacacgatgaaaccccgtctctactaaaaatacaaaaaattagccaggcgtggtggtgggcgcctgtagtcccagctacttgggaggcagaggcaggagaatggcatgaacccaggaggcagagcttgcagtgagccgagatcgcgccactgcactccagcttgggcaacagagcgagactccgtctccaaaaaaaaaaaaaaagtatagaaaaaaatggatacttgcaaatttacatttatttttgcactgagagtttactgttaaattgtctacaccatcatccctttttctttttatccttagttctagtccaaattatttttgatttgtaaattattaggaaagtttttatactagtttttttaaccctatgtattattacagatggaagtaattatggcatgtgtgagttataatctaaattaggggcaagtatccctttttttatatgatgaaattgtgcataataacttggctagggcaagtctccaaagtaattcagatttaactcttcactgctagacccagttgtgttcaactttttacatattattgccaacacactttatctctctgtgtacagtgttaatctgattttataaatctatatttttttctttaagcaaatttttgttttaaaatttgaagccaatcataaagataatatagcataagacattttcttttctaaaaacaatcagcatcattttaaaaggatgaactaatacaggtgtatgtaatagcagtgtttccaaactggcaatttatgctttaaatttaaaaataaggtcatttttctccatcaggggcaaatgtttacttgtaattttcttcctacagttcgtgttaaattactttttactattattatattgtaaactccttgggatttggcaccatttaaaaattcatctttgtattcccttaatatttggaacagtattgtacatatggtaggtacttaataaaggtttgaatgagtgtgta

SEQ ID NO: 132154 - DNA, 4027 bp, Homo sapiens
  Payload ID: 5797
  Gene Symbol: FAM161A
  Gene Name: family with sequence similarity 161, member A
  ENST ID: ENST00000418113
  CDS Start-End: 1-1805
accgagtggcgaagctggtggcctccagtctccagaccccggtaaatcccatcactggagcgcgggtcgcccagtacgaacgcgaagaccccttaaaggccctggcggcagcggaggcgatcttggaggacgaagaggaggagaaagtggctcagcccgctggggcatcggctgatttgaacaccagcttttctggggtggatgaacatgcaccgataagctatgaggactttgtgaactttcctgatattcaccactctaatgaggagtatttcaagaaagtagaagagttgaaggctgcccacatagaaactatggcaaaattagagaaaatgtaccaggataaattacatttaaaggaagttcagccagtggtcatcagagaagactctcttagtgactcttccagatctgtatcagaaaagaactcctatcaccctgtctcattaatgacatcattttcagagcctgatttaggccagtcttcctccttgtatgtgtcctcctctgaagaggagttacccaacctagaaaaagagtatcctaggaaaaacagaatgatgacctatgctaaggagctcatcaacaatatgtggacagacttttgtgttgaggattatattcgctgtaaagatactggcttccatgcagctgaaaaaagaaggaagaaacgaaaagaatgggtgcccacaattacagtaccggagccttttcaaatgatgataagagaacagaagaaaaaagaagagtccatgaaatctaaatcagatatcgaaatggtacataaagcgctcaaaaaacaagaagaggatccagagtataagaagaaattccgagccaatccagttcctgcatctgtctttctccccctttaccatgatttagtcaagcaaaaagaagaacggagaaggtctctgaaggagaaaagcaaagaagctcttttggcctcacaaaagccatttaaatttatagcaagggaggaacagaagcgagcagcccgggaaaagcagctgagagactttcttaagtataaaaagaaaacaaatcgatttaaagccagacccattcctcgatctacttatggttcaactaccaatgacaagttaaaagaagaagagctctatcgaaaccttaggacacagctgagagcccaggagcatttacagaactcatctcctctgccttgtaggtcagcttgtggatgcaggaaccccaggtgtcctgaacaggctgtaaagttgaagtgtaaacacaaggttaggtgcccaactcctgattttgaggaccttcctgagagataccagaaacacctctcagaacacaagtctccaaaactcttaacagtgtgtaaaccatttgatcttcatgcatctccacatgcatctattaaaagagaaaaaattttggcagacatcgaagcagatgaagaaaatttaaaagaaacacgttggccttatttgtctccaaggcgtaagtcaccagtaagatgtgcaggtgtaaaccctgtgccttgtaactgcaaccctcccgtgcccacggtatcttccagaggacgagaacaagccgtaaggagatcacttgaggaaaagaaaatgttggaagaagagagaaatcggatcctaactaaacagaagcaaagaatgaaagaattgcagaaactcctgacaacccgggctaaggcttatgactcacatcaaagtttagctcaaatatctaaatccagagtaaaatgtctcaggccaggcgcaatggctcatgcctgtaatcccagcactttgagaggccaagacaggcagatcacctgaggtcaggagttcaagaccagcctggccaacatggtgaaaccctcatctctactaaaaatacagaaaattagccaggcatggtggtgcacacctgtaatctcagctattcgggaagctgaggcacgagaattgcatgaacccaggaggtagaagttgcagtgagctgagattgtgccaccgcaccagcctgagcaacagaatgagactccatctcaaaacaaaaaaagagcgaaaaggaaaggatgagagaataccaacgagaactagaagaaagagaagaaaaattaaaaaagaggccactgctatttgaaagagttgctcagaaaaatgcaagaatggcagcagaaaagcattattctaataccctaaaagcactaggaatatctgatgagtttgtttcaaagaaaggccaaagtggaaaagtacttgagtacttcaacaatcaagagacgaaaagtgtcactgaagacaaagaaagctttaatgaagaagaaaaaatagaagaaagagagaatggggaagaaaattattttattgataccaacagccaggattcttacaaggaaaaagatgaagccaatgaggaaagtgaagaagagaaatctgttgaagaatcacactgaatcatcaaggtctcctctctatgcccttgctgttgtttgcagcgtcagggtgtcagcagccgcatttgtgtttagaacatctgtggggacgcttctgatatgtgcagggctgttgatcaaagtcatctgtagcctgaaaagcctgaatccagctgattggtcatttgatcagttagagtaaggctttgcctattcagttttaaaaatcattgtgtattatctgtttgcaactatgattttgtatttttaaaaagtgagaaccacagctgtcacaaactgattagttataaaaatatacattatttcattaattttactggaaaaaatggcttagtattgaaaggagagagaagtattggtctttggtggtttactttttaaaaattttggaaagtgtgaatcaataactatttttaattatactatttgcccattctttttctctgcagtgcatttcacagaataaatcctctaacttgttttgctgctctgagccatttttaaaagtatagaaaaaacgccgggtatggtggctcatgcctgtaatcccagcattttgggaggccgagacgggtggatcacgaggtcaggagatcgagaccatcctggctaacacgatgaaaccccgtctctactaaaaatacaaaaaattagccaggcgtggtggtgggcgcctgtagtcccagctacttgggaggcagaggcaggagaatggcatgaacccaggaggcagagcttgcagtgagccgagatcgcgccactgcactccagcttgggcaacagagcgagactccgtctccaaaaaaaaaaaaaaagtatagaaaaaaatggatacttgcaaatttacatttatttttgcactgagagtttactgttaaattgtctacaccatcatccctttttctttttatccttagttctagtccaaattatttttgatttgtaaattattaggaaagtttttatactagtttttttaaccctatgtattattacagatggaagtaattatggcatgtgtgagttataatctaaattaggggcaagtatccctttttttatatgatgaaattgtgcataataacttggctagggcaagtctccaaagtaattcagatttaactcttcactgctagacccagttgtgttcaactttttacatattattgccaacacactttatctctctgtgtacagtgttaatctgattttataaatctatatttttttctttaagcaaatttttgttttaaaatttgaagccaatcataaagataatatagcataagacattttcttttctaaaaacaatcagcatcattttaaaaggatgaactaatacaggtgtatgtaatagcagtgtttccaaactggcaatttatgctttaaatttaaaaataaggtcatttttctccatcaggggcaaatgtttacttgtaattttcttcctacagttcgtgttaaattactttttactattattatattgtaaactccttgggatttggcaccatttaaaaattcatctttgtattcccttaatatttggaacagtattgtacatatggtaggtacttaataaaggtttgaatgagtgtg

SEQ ID NO: 132155 - DNA, 4078 bp, Homo sapiens
  Payload ID: 5798
  Gene Symbol: FAM161B
  Gene Name: family with sequence similarity 161, member B
  Uniprot ID: Q96MY7
  ENST ID: ENST00000286544
  CDS Start-End: 200-2332
accacctgcgccaggacaccagcgggccgctgtggggagctgcacgcacagccccgcatcggctgacaagccgggccgccatggtgcagacctgcgccgtcgcactcagaactcccgcaggcccacctacgtagtgcgtccggagcagagcactccaatcccgtcccgcttccgcggcgtcctcagaaccggaaataaaatgcgcggagaaaataggccaatcggaaaacgaaccttgcctcctcgggcgggatggatcggaggctgccctggaagccaaccagacgccaaagctagaaaggggtggaccctggccccgcatagctctcgctgccaccgctgctgccactatcgctgtcactgtcgctgctgcctctgtccagctgaaatgaccgtggggaggcctgagggagcccccggaggcgcggaggggagccgtcagatatttccccccgagtccttcgcagacacagaggcaggagaggagctgtccggggatgggctggttttgcccagggccagcaaacttgacgagttcctcagcccagaggaggagatagattctacttctgactcaactgggagcatttaccagaacttacaggaactgaagcagaaagggagatggtgtctgttggagtctctctttcagtctgacccagagagtgatgaaaacctctctgaagatgaggaggacctggagagtttcttccaagacaaggacagggggatggtgcaggtccagtgcccgcaggctctgaggtgtggctccacaaggcgctgcagctccctgaacaaccttccctccaacattcccaggcctcagacccagccaccctcaggctcccggcctccctcccagcacagaagcgtcagctcctgggcatcatccattactgtccctcggccattccgcatgacgctgcgcgaggcccggaagaaggccgagtggctgggctcacctgcctcctttgagcaggagaggcagcgggcccagaggcagggtgaggaagaggccgagtgccacaggcagttccgggcacagcctgtgcctgcacatgtctacctgcccctctaccaagagatcatggagcgcagcgaggcccgaaggcaggcagggatccagaagaggaaggaactgctcctctcttctttgaagcccttcagcttcctggagaaggaggagcagctaaaggaagctgctcgacagagagacttggcagccacagctgaagccaagatctccaagcagaaggccaccagaaggattcccaagtccattctggagccagcccttggggataaactccaggaagctgagctcttcaggaaaattcgcatccaaatgagagccctggacatgctccagatggcctcttcccctatcgcctcctctagtaaccgggctaacccacagccccgcacagccacccgaacccagcaggaaaagcttgggtttctgcacactaacttcagattccagcctcgggtgaatcctgtggtccctgactatgagggcctttacaaggccttccagagaagagcagccaaaagaagagaaacccaagaggccactcgcaacaagcccttcttgctgaggaccgccaacctgcgccaccctcagcggccctgtgatgctgccaccaccggaaggaggcaggattccccacagccaccagctacacccctgccaaggagtcgttctctgagcggccttgcttccctctctgccaacactctccctgtgcacatcacagatgccaccaggaagagggaatctgcagtcagaagtgcacttgaaaaaaagaacaaagcagatgagagtattcagtggctggagatacacaaaaagaagtctcaagcaatgtccaaatctgtgaccttgcgtgcaaaagccatggatccccataaaagcctggaggaagtgttcaaagcaaagctgaaagagaaccggaacaatgaccgtaaaagagcgaaagaatataagaaagaactggaggaaatgaagcagcgaatacaaacaaggccctatctctttgaacaagttgccaaggatctagccaagaaagaagcagaacagtggtatctagacaccctgaagcaggctgggctggaggaagactttgtgagaaacaagggtcaaggcacccgggctgttcaagagaaagagaccaaaatcaaggattttcccaggttccaagaaactacaaaactcagcatcagagatccagagcagggtttagaaggatctctagaacagcctgcaagccccaggaaagtactggaggagctgtctcatcagtcaccagaaaatctcgtatcacttgcttaatcactacacttaaaattactgcttttgaaaaatattaagcagctaacttgggtttgagtcaaggcagggaaaacttgggttttgagtcatggctactgttagaggatggacaaatgaagagtagcagattaacaggccaggcgcagtggctcacgcctgtaatcccaacactttgggaggctgaggcaggcagatcatctgaggtcaggagtttgagaccagtccagccaacacggcaaaactccacctctactaaaaatacaaaaattagctgggcgtgatgacacgtgcctgtaatcctagctacttgggaagctgaggcaggagaatcacttgaacccaagaggcagaggttgtaatgagctgagatcactccacagcactccagcctgggcagcagagcaaaactctgtctgagaaaaaaaaagagcagcagataacagagaatagttcaaggaaatcaaagtggggaggctcaggtggagggatggtagcctaaagttaagggttcctgctttgtgcctcacacttagagaattaggtacagaaaagagagcacaggcccaaatgcctataaggggctagtgcagaaacataaatgcgtccatggagtgggtgtagacagtaggagatagtagacactggaaagtatcaaatcctgctggaatataggctcagagttactacatcaactacattttcatcaagccagaaatttgtatgctatcaactaatttaaaaattacttagaaatattgtatgggcaaaataaaatacatctgcatatcagatctagcccatgggggatgaaaaacttacaacttctagtacaggatttcttatcctcagtgctattaatattttgggccacctaattctttgttgagggttggggaagggaactgtcctgtacattgtagaatgtttagtagcatccctggccactacctgctagatgccagtagtacccctctccccagctgtgacaaccaaaaatgtctccagatattgcatatccccagggggcaaaaatgtgcctggctgagaaccactgctctaatataaatggctgcatgaagcaaaaactggcattctaagaatacaagtaattgccatgaacacagtctatgtactatgtgattatgcatgtcattaacaaattaagaatttaaaacaattctctcccgttatctgtttagaatgtgcctgtgtgtttatgtgagcatgaggttcattttaagtaaacttaaaatttcccagacaaccaagattttctactagtaggtgaactttggaataattttcttctcaccaataataattggatattctggctcggtgcagtggttcatgcttgtaatcccagcactttgaggggccaaggcaggaggatcgcttgaagccaggcgttcaagaccagcctgggcaacacagacctcatttctaccaaaaaaaccacaaaaagttagctggactggtggtacatgcctatagtcctagctattcaggaggctgaggtgggaggatgccttgagcgtaggagttcaaggttacattgagctatgattacactactgcactccagcctgggtgacagagcaagaccccatctcaaatcataatgatgatgagtggatattttctcagtagctgtggagacaggatgactgatagcaagagtgcctgctctaactaaagcacctttctcaagcttttttaaaaaaactatctttgtggaaaaattca

SEQ ID NO: 132156 - DNA, 1365 bp, Homo sapiens
  Payload ID: 5798
  Gene Symbol: FAM161B
  Gene Name: family with sequence similarity 161, member B
  ENST ID: ENST00000556794
  CDS Start-End: 1-433
gaacaaagcagatgagagtattcagtggctggagatacacaaaaagaagtctcaagcaatgtccaaatctgtgaccttgcgtgcaaaagccatggatccccataaaagcctggaggaagtgttcaaagcaaagctgaaagagaaccggaacaatgaccgtaaaagagcgaaagaatataagaaagaactggaggaaatgaagcagcgaatacaaacaaggccctatctctttgaacaagttgccaaggatctagccaagaaagaagcagaacagtggtatctagacaccctgaagcaggctgggctggaggaagactttgtgagaaacaagggtcaaggcacccgggctgttcaagagaaagagaccaaaatcaaggattttcccagatgcgtcttttttggtggtgacagagtaactatcacctgggcttaagaaatgaagatgttcttgttgtttcctaagactcctcggttcagttttactggtatggaatcctaagggtaaatcaatacactattttaaagggaaagattaaattcttaatctctaagaaaacaaattttgtataaaacaagagccaaagaactgactgggctgttttgtttatttaaaggaaaacctgaatctctgcatcatgtaatttttaactttaaaaaaacaaaaacatgaaatccctcttaacatgctactgtatgttccattaacgaagaaagcaaagtgaccaagtagaagtgtataggacaagatagtacctcagcctgggccaaggggagattcaagtaatttatttttttgcagcccagtggcagagagtctcttactcaggttgctaaagggagaatgtaacaagagaattgacatcactcccttcttcaaagcaacaaggcatcttgaaaactcaacttcctggtgaagctctgttgttggtagcaggaattatttcatccatgtgaaaagacagctgagtctgggatgaaaactcttcaaaggaaaacctcccctcaacagtcagaatgaagaacttcagccaacacataatcaaattcacttttggtctatcccagaaatttgcagtgggaagagaggtaggtacagtttcccagcccacagtcattgcttcattccttgtctgatcagatggtagttagaaaagaagctctcctacatccatcttctataccaggaaagaggaagagtggcaaaagcagagtcttgtgccttcaaagattcattctggttctgttgtgggctaaggcatcctgttcccagtatacgcattttgagatcagatagagttgctcttccaggagtcagcacccacgctcatgtccgtctttcagttaaatctccttggtttagtaact

SEQ ID NO: 132157 - DNA, 801 bp, Homo sapiens
  Payload ID: 5799
  Gene Symbol: FAM162A
  Gene Name: family with sequence similarity 162, member A
  ENST ID: ENST00000232125
  CDS Start-End: 281-715
cttcccactccaacgctgggtgacattgagctcaccagcgccaccgtccccggcgaagttctgcgctggtcggcggagtagcaagtggccatggggagcctcagcggtctgcgcctggcagcaggttggttcatgtgatcctggttaatggaacataagtgagattttatgggtgacagggagagagatcaggcttgacttgagagcacgtgggaaaagaagggggctatctcttcgcaaagatttaagtatcttataagaactgtttgccagtgcaattatgagaagctgttttaggttatgtgaaagagatgtttcctcatctctaaggcttaccagaagctctgatttgaagagaataaatggattttgcacaaaaccacaggaaagtcccggagctccatcccgcacttacaacagagtgcctttacacaaacctacggattggcagaaaaagatcctcatatggtcaggtcgcttcaaaaaggaagatgaaatcccagagactgtctcgttggagatgcttgatgctgcaaagaacaagatgcgagtgaagatcagctatctaatgattgccctgacggtggtaggatgcatcttcatggttattgagggcaagaaggctgcccaaagacacgagactttaacaagcttgaacttagaaaagaaagctcgtctgaaagaggaagcagctatgaaggccaaaacagagtagcagaggtatccgtgttggctggattttgaaaatccaggaattatgttataacgtgcctgtattaaaaaggatgtggtatgaggatc

SEQ ID NO: 132158 - DNA, 3052 bp, Homo sapiens
  Payload ID: 5799
  Gene Symbol: FAM162A
  Gene Name: family with sequence similarity 162, member A
  Uniprot ID: Q96A26
  ENST ID: ENST00000477892
  CDS Start-End: 85-549
actccaacgctgggtgacattgagctcaccagcgccaccgtccccggcgaagttctgcgctggtcggcggagtagcaagtggccatggggagcctcagcggtctgcgcctggcagcaggaagctgttttaggttatgtgaaagagatgtttcctcatctctaaggcttaccagaagctctgatttgaagagaataaatggattttgcacaaaaccacaggaaagtcccggagctccatcccgcacttacaacagagtgcctttacacaaacctacggattggcagaaaaagatcctcatatggtcaggtcgcttcaaaaaggaagatgaaatcccagagactgtctcgttggagatgcttgatgctgcaaagaacaagatgcgagtgaagatcagctatctaatgattgccctgacggtggtaggatgcatcttcatggttattgagggcaagaaggctgcccaaagacacgagactttaacaagcttgaacttagaaaagaaagctcgtctgaaagaggaagcagctatgaaggccaaaacagagtagcagaggtatccgtgttggctggattttgaaaatccaggaattatgttataacgtgcctgtattaaaaaggatgtggtatgaggatccatttcataaagtatgatttgcccaaacctgtaccatttccgtatttctgctgtagaagtagaaataaattttcttaaataatgactgtgttttattgttttgatccaagtcaagtgtagcctctcagccttttggagaaaaatgaaacaatttatttcaacttgaataccaactcttcagagaagcaggtaccatatcttacttctcttcccattatcaaagtaacctctccacaggcgaactcattttgaggagataaggaaggccagttgagtatatggcccaggtgcagcttggagggccagccttctcaaatgtcctggtgtactggtggggaggctgccccctaatagagcgagcgctgagaagcagccagaccacattctataatctttgaacatgctggcagatggaggcttttaggagaatagttttttaaacattctgacaaggtccagccaggaatttctaaggacttagaaatcccagcgtcatggagttgcttggggtcaacacaagtcacctcttagcttcatgccttagaattctcaactggctgttttcttaccacctgagaaactaaatttctcaattataaaaatctcatgtattattactgttagaagtatttgcacctcatatatatctcatttacagtttgaccttgggatatcgagttgtctcatatttaggtatgaatacaggtttctattttaaacattgattctcacatgcttcttaattattcatggatgacaagccattatagtagtcccttcttatccacggctttgttttctgtggtttcagttacctgaggtctgaaaatattaaatggaaaattcctataacaatgcataagttatagattacataccattcagtgtagcatgatgaaatctcttgccaatctgttccatccacctgggatgtgaatcatccctctctctggtgtattcacactgtatgtgctagccgtctctgttacgagatcagctgtcgtggaatcagtgctagtgttcaggtaactcttatttaataattgcctcaaagtgcattgtgctgtgcctaatttataaaataaacggtatcataggtatgtatgtatacgaaaaacatagtatatgcagggttgggtactatccacagtttcaggcatctactggggggtcttggaatatatccccagagggtaaggggtgactactgtatacagccatgccaacatgctggttctcagagagttataagagagattaaaaatacatgcagctgtttgggcactttcttcccaaataaaatacccagtaaaatgtaacatactacctatagcttgataatctatctgaggatgtttatgatgtctgtctatatactttaatttggccttagcttctttgtaggtatcaagttatcacttgcaaatttattttcaaaaagcatagtttcttgtacattttagaagattagtttttcttattttgggacacctacaccaatgttttaaatgtggataaattttaatgtggaatttcttttaaaaataatcctcttcatagagcaatacaacaaaaatgtgttgtatcttggagatttacattataaatgtagtaacatttatgagcttaaatttaatgaaaccttttttttttttttgagacagtcttgcactgtcgcccaggctagagtgcagggcatgatctcagctcactgcaacctccgtctcccgggttcaagcaattctcgtgcctcagcctcctcagtaactggcattataggtgtgcaccaccacacctggctaatttttgtatttttcataaagacgggggtttcaccatgttggccaggctggtctcaaactcctgacctcaggtgatcagcctccctcggcctcccaaagtgctgggattacaggcatgagccatggtgcctggccaaacgtttttattacaaatattacattaaactaaagctcacaactgttattatgcatcaggaattaacagtcatttctcatttgtgttattctcctatttgataacatatagtgactatctctttatgggttaaatatcagtttcttggccagaattcaagatctgcccctaactaatcctacttctcccagtacccttacagcactcctaccctactagtaactctgatatctcatagtcctcagatttatcaagcaaacgaaactgaatgagcactactataaggtaccacaaactacaaaaggagacagttttgcccttgttgctttcagttaaattattgtgctattttttgcttaatttctaggttttttttgcgtgtttatcatgtctccgtaggtaaagtgggcagaaatctttttctactttacatttcctgtaagtgctgtttgtttgaataaagttaatgtgtgaggtta

SEQ ID NO: 132159 - DNA, 1015 bp, Homo sapiens
  Payload ID: 5799
  Gene Symbol: FAM162A
  Gene Name: family with sequence similarity 162, member A
  ENST ID: ENST00000469967
  CDS Start-End: 69-494
acattgagctcaccagcgccaccgtccccggcgaagttctgcgctggtcggcggagtagcaagtggccatggggagcctcagcggtctgcgcctggcagcaggaagctgttttaggttatgtgaaagagatgtttcctcatctctaaggcttaccagaagctctgatttgaagagaataaatggattttgcacaaaaccacaggaaagtcccggagctccatcccgcacttacaacagagtgcctttacacaaacctacggattggcagaaaaagatcctcatatggtcaggtcgcttcaaaaaggaagatgaaatcccagagactgtctcgttggagatgcttgatgctgcaaagaacaagatgcgagtgaagatcagctatctaatgattgccctgacggtggtaggatgcatcttcatggttattgagggcaagaaggtgagaaggggtttcttctctatccagtatgtatgttctccaccaagaacctagagtaaatcagggattgacccttgtatttaccctctgagaagaggaggctactttctacattacatgagaaaagataagcaaaaaaataagacatattgggaacaagcctggaatatcatccttggggatagatagcaaatcctaactttggcgtggtgaagaaggactagattcattttgtgtaatgtaaatttaaaaagtgtttctgatgacaggtgtcataatgtaaattaagaaataggacactggcatatttaatcacccactgcatatttccagagtgctcttggtacccaagtgtatttaccctcaccataactgccttcagcatggtgagctttcttagcggggttctttatttgaagctcagccagacagggccatgtgtctaaggaccacagctcctaagcagtacataggaatacaagtccagaaatctttagcacagattataattaatagctatcactaattgaacactcactgcattccaggtacttttctagctggtatctcatctg

SEQ ID NO: 132160 - DNA, 1036 bp, Homo sapiens
  Payload ID: 5800
  Gene Symbol: FAM162B
  Gene Name: family with sequence similarity 162, member B
  Uniprot ID: Q5T6X4
  ENST ID: ENST00000368557
  CDS Start-End: 148-636
agctgagtgtgcgagcgccaggggttccagctgcacgtcccaggctctccagcgcgcggcaggccggggcgggacgaggagagctgcggggacaacgcctgtggctgggtccggaggtgcgggtgcggcgcgggacaagcgggcagcatgctcagggcggtcgggagcctactgcgccttggccgcgggctaacagtccgctgcggccccggggcgcctctcgaggccacgcgacggcccgcaccggctcttccgccccggggtctcccctgctactccagcggcggggcccccagcaattctgggccccaaggtcacggggagattcaccgagtccccacgcagcgcaggccttcgcagttcgacaagaaaatcctgctgtggacagggcgtttcaaatcgatggaggagatcccgcctcggatcccgccagaaatgatagacaccgcaagaaacaaagctcgagtgaaagcttgttacataatgattggactcacaattatcgcctgctttgctgtgatagtgtcagccaaaagggctgtagaacgacatgaatccttaacaagttggaacttggcaaagaaagctaagtggcgtgaagaagctgcattggctgcacaggctaaagctaaatgatattctaagtgacaaagtgttcacctgaataccatccctgtcatcagcaacagtagaagatgggaaaaatagaatatttaccaaaatatctgccatggttttattttggtaacaagaagcacaatgtcttttttatttttattttttagtaaacttttactgaagtataccatgcattcaaaaagtggacaaaactgtatacagtctgatagatatttatgtcgtgaacacctgtgtaaccactgccaaagtgaagatgtagaatattggcaacacttcacagcctcattcctgccttttctcagccattacctcccaaacatagcagtttttctgagtttcatcacctttgattcattttgcctgtttttgaactttatataaatggatttatacatta

SEQ ID NO: 132161 - DNA, 2909 bp, Homo sapiens
  Payload ID: 5801
  Gene Symbol: FAM163A
  Gene Name: family with sequence similarity 163, member A
  Uniprot ID: Q96GL9
  ENST ID: ENST00000341785
  CDS Start-End: 397-900
cgcgtgcatcagcctctctggcgggggattctccccggactccggccagcgccaatcaggtcgcgcggtacctgcccccagccctggccacctggaggggcgatgaggctccacgcccggagcagggcagtcctcggagcgccggggaggccgcggagcctcacgtgtgccgccccagccgctggcgcccggaaggacgcgctgcgaccccgtgggagccgaacgcgggagtcgctgcccgagcggagctgctcagccgcgggactgatgcccttggccagacgcacccccaactgctgtctgctcaggtgtagcccgcgtgactgagtcaccgctgctccagctgtttcacgtcgccgttccctttactgaatagtttgatggggcgccgggcggatgacagcgggaacggttgtgatcactggcggaatcctagctacggtgatcctcctctgcatcattgccgtcctgtgctactgcaggctccagtattactgctgcaagaagagcggaaccgaggttgcagacgaggaggaggagcgggagcacgaccttcccacgcatcccagaggccccacctgcaatgcctgcagctcccaagccctggacggcagaggcagcctggcgcctctcaccagcgagccctgcagccagccctgtggggtggccgcgagccactgcactacctgctccccatacagctcccccttttacatacggacggctgacatggtgcccaatgggggtggaggcgagaggctctcctttgctcccacatactacaaagaggggggacccccatccctcaaattggcagcaccccagagttacccggtgacctggccaggctctgggcgtgaggccttcaccaatccaagggctattagtacagacgtgtaaatccttccaccccgacccgcacacacacccacactgctgccctggcgggggccatgggggtgatgaatgaccctccaacagccccacatgggttgtttctgtttctttggcttttctcgctccgcagtggagggtttactaggatttaagcttttgagtgcattgagaaccaagacagggcctggctccaactctgtgggccagaggtgggggactgctaggtcgagtctgcagcttcgccagtttcttggttgggacactcctctggcagccccagcaccaccacaaccccttgcagtgtgccccagtcccctggattcgctggactgcaaaaaggagcaccagggaaagctcagcaaaggctcaggaggcctcccgggtcctcgggagatgaagcatccgtgcctaggaaaaggggacagagggcaaggagagaagtgagagctacaattccagcattggagaagcgaggggcggggcgtcaacggcactgcttcaggacgcgcttgctgaaacgactccaacagctagttcacagcccagctttgtacgttggttaccatagctactgctgtcactgtagctgctcccgtagggtcgttgattcctgaacgtatcacatctcacctgcccccttcctcgtgggacgtgtcaagttgactttaaagcctaaggtggcttgtggggactgcaccagaaagtgtctaaccttgtgttccccgaaatcctttctctgacttaggaaccagcgccccctgctggagaagttttttcattttgttagccgacttctggtagcttagcaaagagaccagctgactgtctctcggcccagcccaccacgccgagtagcttgtgtggatgcagtcctgtgagggtgtgcataaccgttcccaggtgtacgcacgcgcgcgcgcgcgcacagacacacacacacacacacacacacacacacacacacagtaaccacgggtaggcaccaggggctttgtacattcaggagctgcagagaggaaaggtctcccatgtaccagagaaggaaaagtctgatcccgaaacagcttgaacgaaaggtggttaacacgtgaccaatccccatggcagacagcgggctggtgaacaggaagagcacagaatctctgtggggcgatgctgcagcggctgaaaccacgtcaagtcccccagagcccggcattctatgtaagcatccacctgtgacgccgtggagcaggatcttcattcatctcaccagagcaacagcccagtcctgaggatgggagggacgtgacttagccttgggattccacgctcgccgccctcccttggccgccctactccccagtttcctggcgatgagccatttattgtgtctcacaccagcctcatttccaactccgacttcctacttagaatgtggcagtggctttgtgagtgagaatcctgatgagttttccagtggcctctgcagaagctggcccccttctaagggcatagctaacccccttcccactcctgagtcactgaattcgaggagggtggggcagggaaagggctggcccccctgctgaaatcttgattctgcatttgaggaaggtcagggtgccgctgggggagcagggagcggggagggaggaagaggggaatgcacatcttttgcgccactattaaggcacctgtcaccttacatctcaatctggaatcaaagtgccctgggttgagaagcagacctgggctctggtcacactttggtcactcattagctctaggaccagtcactaatctctgagactccattttctccagggaaacgaggcttgcccagatagactaacaaccctttagtgctccaagaagtgagaatttccgaaaaagatctgccggcccagagcactccctcttgccctaatcctggcagggtctggatgtatttacccaactctgatcttgcgtgcagggatgcttgctgatggatgaaagaccacaataaaacaagattagcagcaaaacaa

SEQ ID NO: 132162 - DNA, 1131 bp, Homo sapiens
  Payload ID: 5802
  Gene Symbol: FAM163B
  Gene Name: family with sequence similarity 163, member B
  Uniprot ID: P0C2L3
  ENST ID: ENST00000356873
  CDS Start-End: 24-524
gctgttgatggagaagggggcggatgacagccgggaccgtggtcatcaccgggggcatcttggcgactgtgattttgctctgcatcatcgctgttctgtgctactgccggctccagtactactgctgcaagaaggacgagtcggaggaggacgaggaggaaccagacttcgccgttcactcgcacctgcccccgctgcactccaaccgcaacctggtgctgaccaacgggccggcgctctaccccaccgcctccacctccttcagccagaagtccccgcaggcccgcgccctctgccgcagctgctcccactgcgagccccccaccttcttcctgcaggagccgccggaggaggaagaggacgtgctgaacggcggggagcgcgtgctctacaagagcgtgagccaggaggacgtggagctgcccccggggggcttcgggggcctgcaggcgctcaaccccaaccgcctctcagccatgcgggaggccttcgccaggagccgcagcatcagcaccgacgtgtgacctgggcccgcccccgggatcctggccttgaaggtcctgagacaatggggggattcctttggcacacccacctggccccaggccccaagtggggcttggctgagccctcctggaatccctgtcctcaggggaggcccaggcttggggagcccccaggctcgtggcagggataaggctcattgaacacaaatgtgtcctggggggaggcacagctggggcctggggctagaaggaccaggtgaccatacagccggctgggcatgcaccagggctctcaggcacagaggccaccgttactcctgatgattctgtctcagacccaacaacctggccttcccaggaggtctccatgtgtcaccccctccctgggtctcacccttctcacctgctcaaggaagggatgacctcagtgaggcccagggccctgcagcaaggccctccctggcaattgcagaccaaggattctgctcctccaccttgaactccagcctctttctctccatttttccctctctctcccctacccgtctctccctctctctcacacacacactcttccgggttcaagggccaagtgtctgcctaggctgagacacgtgctgagctc

SEQ ID NO: 132163 - DNA, 811 bp, Homo sapiens
  Payload ID: 5802
  Gene Symbol: FAM163B
  Gene Name: family with sequence similarity 163, member B
  Uniprot ID: P0C2L3
  ENST ID: ENST00000496132
  CDS Start-End: 246-746
cccttctgccagcccacccccagccgggctctggataacatctcggagaccaaccgcggcagcacagggcagccgagcacttcctcgtctgtttattactgaacgcaggcatctgggagcccgcggagcatgaaattaggaacaaatgtgcaggaggtctagacaggaactctgcgggctgctctcctccgatcgaggacgccggggcccttgggcttccaggctgttgatggagaagggggcggatgacagccgggaccgtggtcatcaccgggggcatcttggcgactgtgattttgctctgcatcatcgctgttctgtgctactgccggctccagtactactgctgcaagaaggacgagtcggaggaggacgaggaggaaccagacttcgccgttcactcgcacctgcccccgctgcactccaaccgcaacctggtgctgaccaacgggccggcgctctaccccaccgcctccacctccttcagccagaagtccccgcaggcccgcgccctctgccgcagctgctcccactgcgagccccccaccttcttcctgcaggagccgccggaggaggaagaggacgtgctgaacggcggggagcgcgtgctctacaagagcgtgagccaggaggacgtggagctgcccccggggggcttcgggggcctgcaggcgctcaaccccaaccgcctctcagccatgcgggaggccttcgccaggagccgcagcatcagcaccgacgtgtgacctgggcccgcccccgggatcctggccttgaaggtcctgagacaatggggggattcctttggcac

SEQ ID NO: 132164 - DNA, 1124 bp, Homo sapiens
  Payload ID: 5803
  Gene Symbol: FAM166A
  Gene Name:: family with sequence similarity 166, member A
  Uniprot ID: Q6J272
  ENST ID: ENST00000344774
  CDS Start-End: 56-1009
aagggagctggatgccgggagggactggagccagcaaggccagagtgaaagcaaaatgacaactactcagaaacacgatctcttcacgccggagcctcactatgtccctggctatgccggcttctttccgcagctgcgctaccaggtggggaacacctatgggcgtaccacggggcagctgctcacagaccccagtgtgcagaagagcccctgctctgtgctgtcccccatgtccaaacccaagttcattgaggacttcagccagtccaagcccccgagggttccctgccaagacctgacggagccctacatcccccactacaccagtctgaagccctctaagaactttgagattctgggccagctcccacccttggaggtggacgcccaggagccgccaggggtagagaacatacccagacagattctgctgcctgcaggcttcacgcccgacaccccgcaccctccgtgcccaccaggcaggaagggagactccagagacttgggacacccagtatacggggaagaggcctggaagagcgccactcctgtttgcgaggcccccaggcagcaccagctgtaccactgccagagggatgagtacccaccccccgcccgccgccagcaggagacgctagatgtgggcagcttccagcggctgccgcagctggaccaccctaacctaatccaacgcaaggccatctcaggctatgctggcttcattccccgtttcacctgggtaatggggttgaattaccgagacggcgtcatgcaagccatggacgaattcgacaagagccagttcctgtttagaaacccccactgtgacctgggcgagaagctgcctggaacacactggcccagcaaccacatctacagcagccaaggcctgatccccttctacatggggttcatccccgccatgcaggacaactacgccctgacattcggcaacagcacccggagggcctactggaaggaatgggcaaagcgaaaccacacactatgaaaatgctttaatggtggtgtctgtacagcatggatgtggacagggaaaacagcaagtgcacacagtgggacaggccacaggacaggctgggagtgaataaagagttcacactgct

SEQ ID NO: 132165 - DNA, 705 bp, Homo sapiens
  Payload ID: 5803
  Gene Symbol: FAM166A
  Gene Name: family with sequence similarity 166, member A
  ENST ID: ENST00000484720
  CDS Start-End: 36-705
gggactggagccagcaaggccagagtgaaagcaaaatgacaactactcagaaacacgatctcttcacgccggagcctcactatgtccctggctatgccggcttctttccgcagctgcgctaccaggtggggaacacctatgggcgtaccacggggcagctgctcacagaccccagtgtgcagaagagcccctgctctgtgctgtcccccatgtccaaacccaagttcattgaggacttcagccagtccaagcccccgagggttccctgccaagacctgacggagccctacatcccccactacaccagtgagctgccagtccccagccctgcaccctcctgtgcccgcctgcctgtcccggcactcacaggctgccctgttggtacaggtctgaagccctctaagaactttgagattctgggccagctcccacccttggaggtggacgcccaggagccgccaggggtagagaacatacccagacagattctgctgcctgcaggcttcacgcccgacaccccgcaccctccgtgcccaccaggcaggaagggagactccagagacttgggacacccagtatacggggaagaggcctggaagagcgccactcctgtttgcgaggcccccaggcagcaccagctgtaccactgccagagggatgagtacccaccccccgcccgccgccagcaggagacgctagatgtgg

SEQ ID NO: 132166 - DNA, 958 bp, Homo sapiens
  Payload ID: 5804
  Gene Symbol: FAM166B
  Gene Name: family with sequence similarity 166, member B
  Uniprot ID: A8MTA8
  ENST ID: ENST00000399742
  CDS Start-End: 72-899
agccctggacacggtacacacagaccagagccttggctcaaaggcaaacaaaaggaaatgcccggctccccatggctgtggccagcaccttcataccagggctcaaccctcagaaccctcattatatcccagggtacactggacactgcccactacttcggttcagcgtgggccagacctatgggcaggtgactggtcagctacttcgaggccctcctggcctagcctggccccctgtccaccgcacacttctgcctcccattcggcctccaagatctcctgaggttcccagggagagtctacctgtcaggcgtgggcaagaaaggctcagctccagcatgatccctgggtacacaggttttgtaccccgggcacagttcatctttgccaagaactgcagccaggtctgggccgaggctctgagtgactttactcacttgcatgaaaagcaagggagtgaagagctaccaaaggaggccaagggaagaaaggacacagagaaggaccaggtgccagagccggaggggcagctggaggagccgacactggaggtggtggaacaagcttctccctactccatggatgacagggaccctcggaagttcttcatgtcaggcttcactggctatgtgccctgcgcccgcttcctcttcggctccagctttcctgtgctcaccaaccaggcactgcaggaatttgggcagaagcactcaccaggcagtgcccaggaccccaaacatctccccccacttcccagaacataccctcagaacctgggtcttttacctaactatgggggctacgtgccagggtataagttccagtttggccacacatttggccatctcacccatgatgctctgggcctcagcaccttccagaagcagctcttggcttaggccactggacatcaagttcccttcccttttcatcctatcccagccatccttttggaagg

SEQ ID NO: 132167 - DNA, 889 bp, Homo sapiens
  Payload ID: 5804
  Gene Symbol: FAM166B
  Gene Name: family with sequence similarity 166, member B
  Uniprot ID: A8MTA8
  ENST ID: ENST00000447837
  CDS Start-End: 72-722
agccctggacacggtacacacagaccagagccttggctcaaaggcaaacaaaaggaaatgcccggctccccatggctgtggccagcaccttcataccagggctcaaccctcagaaccctcattatatcccagggtacactggacactgcccactacttcggttcagcgtgggccagacctatgggcaggtgactggtcagctacttcgaggccctcctggcctagcctggccccctgtccaccgcacacttctgcctcccattcggcctccaagatctcctgaggttcccagggagagtctacctgtcaggcgtgggcaagaaaggctcagctccagcatgatccctgggtacacaggttttgtaccccgggcacagttcatctttgccaagaactgcagccaggtctgggccgaggctctgagtgactttactcacttgcatgaaaagcaagggagtgaagagctaccaaaggaggccaagggaagaaaggacacagagaaggaccaggtgccagagccggaggggcagctggaggagccgacactggaggtggtggaacaagcttctccctactccatggatgacagggaccctcggaagttcttcatgtcaggcactgcaggaatttgggcagaagcactcaccaggcagtgcccaggaccccaaacatctccccccacttcccagaacataccctcagaacctgggtcttttacctaactatgggggctacgtgccagggtataagttccagtttggccacacatttggccatctcacccatgatgctctgggcctcagcaccttccagaagcagctcttggcttaggccactggacatcaagttcccttcccttttcatcctatcccagccatccttttggaag

SEQ ID NO: 132168 - DNA, 1026 bp, Homo sapiens
  Payload ID: 5804
  Gene Symbol: FAM166B
  Gene Name: family with sequence similarity 166, member B
  ENST ID: ENST00000619051
  CDS Start-End: 72-851
agccctggacacggtacacacagaccagagccttggctcaaaggcaaacaaaaggaaatgcccggctccccatggctgtggccagcaccttcataccagggctcaaccctcagaaccctcattatatcccagggtacactggacactgcccactacttcggttcagcgtgggccagacctatgggcaggtgactggtcagctacttcgaggccctcctggcctagcctggccccctgtccaccgcacacttctgcctcccattcggcctccaagatctcctgaggttcccagggagagtctacctgtcaggcgtgggcaagaaaggctcagctccagcatgatccctgggtacacaggttttgtaccccgggcacagttcatctttgccaagaactgcagccaggtctgggccgaggctctgagtgactttactcacttgcatgaaaagcaagggagtgaagagctaccaaaggaggccaagggaagaaaggacacagagaaggaccaggtgccagagccggaggggcagctggaggagccgacactggaggtggtggaacaagcttctccctactccatggatgacagggaccctcggaagttcttcatgtcagctttcctgtgctcaccaaccaggcactgcaggaatttgggcagaagcactcaccaggcagtgcccaggaccccaaacatctccccccacttcccagaacataccctcagaacctgggtcttttacaactatgggggctacgtgccagggtataagttccagtttggccacacatttggccatctcacccatgatgctctgggcctcagcaccttccagaagcagctcttggcttaggccactggacatcaagttcccttcccttttcatcctatcccagccatccttttggaagggagagaggtgggtgggagggtgggagggtgggggaacacaaagagaaaatggtttggaggctgagcaccttttttattaataggtataataaataaataaataaatacataaacag

SEQ ID NO: 132169 - DNA, 4094 bp, Homo sapiens
  Payload ID: 5805
  Gene Symbol: FAM167A
  Gene Name: family with sequence similarity 167, member A
  Uniprot ID: Q96KS9
  ENST ID: ENST00000284486
  CDS Start-End: 540-1184
aaaggagcagcgccgagaattcaccggagctcggggaggcgaggcgggagccctgagctgaggccgggcagcgcggacccgcgcaggaggaggcggcggggacaccggcgagtccccagcagggcccctgggctcccggaagggtctccagccacctgcccttcccgagaagagagagctctgggccttcttcctgccagtctggtcttcgagtgcgttcaggacagatagaccttggcacaggctgccccgagattcctgcgacgctgtctgttcctgccttctgtggagcatggcacccacaggcttccaggacggatcatagacccgagcctccaggagggcgccctgtgcggctcactgcgcggtccctctcagctcccctgccacccagcctctgaggccggctcctgtcccggaaatgccctcgggcacctggatgaggccatcccagagcgggacccaactgtgccacccaccaagcctccccctgcgccccccgtgccctcgcatgtccggctgccagggcagactgtagaatgtctgtgccccagatccacgtggaagaagtgggtgcagaagagggggcgggagcagccgcaccacccgatgaccacctccggagcctgaaggccctcaccgagaaactgaggctggagacccgcaggccctcctacctggaatggcaggccaggctggaggagcatacctggcccttcccgaggccggctgcggagccacaggcgagcttggaggagggggagcgtggggggcaggagcccttgctccccctgagagaggctgggcagcaccccccttctgccaggagtgccagccaaggtgccagacccctgtccactggcaagctggaaggctttcagagcatcgatgaagctatagcctggctcaggaaggaactgacggagatgcggctgcaggaccagcaactggccagacagctcatgcgcctgcgtggcgacatcaacaagctgaaaatcgaacacacctgccgcctccacaggaggatgctcaacgatgccacctacgagctggaggagcgggatgagctggccgacctcttctgtgactcccctcttgcctcctccttcagcctctccacaccactcaagcttattggcgtgaccaagatgaacatcaactctcggaggttctctctctgctgaggagccctcagactgggcggaggggctggagcggagggcttgggctggaggggtgtcagaggaagctgaggccaagttactccagtgggtctcccggaggcaggggtccctgggactggcgactcaagggccccaggacctattcagtggtgctctcccacccaggggccctgggtgtggatgccagtgtctctgtgactggctcttgcttactacccaaagagctctgcagaagggccgctccaaccaagatgttaaaggagacctgggttcccaccataatccatccctccacggtcacgttcctgtttcctggaatcactggtgctatgaactgggattcccaaagggaggccccccaacaaagctgtcatttttgcagaaggctgtcccgcaagggccttgggggaaattaggcatgtcagatgtgcctgtctcacgtgctgttgctgtcctctaagtattgtctcaaattcaccctaagtacatgactcagcaacattgacagggagctactaggaagggaaaatcgaaaggcatgacaaatgggcacttggggacgcagccccagtggctggcagccagtgtctctggtgagcctgacactataaggctgtgtaaattgtaaattctggcgtgtgctgggacatgtgatgggggcactagcgtagcttgggtgcaacaagcacagatgtccccattgtctcccctggccacatgcatctccaaagagcctcttcactgccacccacaccccagggtgacagcctgggagaccactggtgactgaaccaggcaggtcctgaaagcattttccataactgaattctcctgcaggggcgtgaccggggcctcctggtggattctggtggtgtcaccttactgccctctctggaaagacaatctagggagcccagaggcccatcctgagcctcctctgagattttgtgcctgacctaaacaactagttttaataagactgttactgatgtgttgttcacttgttagtaactgatttttgtccaaatgcggaagccacttgtgtaggtcaactacagtgcgtaggatttgattttaagagtttctccctcccaacaggcttgaggatcagcaagttaagaccccagcaggttagggaggtcagtctggggtcatacggcatggcaggggtccctcggccagacccgtagaatcctgagataaggagtgtttctgacctttggtgtcatctagtcgagtcctctcattagtaaaggagcaaagtgaaacctgggggaggagaaggacttccctcaggttgcacagctgtttaggctatagaatattgatgtgtgaaaccattattgataatgcctagtagatcacatgtcaatgaacttgaaccccaaagatggtcgtgatgctttgccaaacccgcacactgccaacccctctactctccacctcagcccccacccacatctcccagagtattgcaattcagaacatttgggtcaaggtggagcaaggcactgacagtggccccacagggcatgtgtcactaatcactgtcccatggtctacgcacggcatctggctgctctgtctactgtgacttcttcctgtgtaatctcagtggggcccgtgtccacccacacatcgtgacccacataggggagaggttgcttttcttttgtgggctgagagtaggacaatgcaaatgaatgatctctagtagacagaaaagaacttggtctcttttttaaaatttcaaagagccagaagttctatgcctccttcaaagtaggcagaacaacgcagccaagatctactgtctgccatgctctgtgcaatgaagtctgcaggcctgaggaccatgtactgctgtccttcctcagagctctgcacaaacactgccaagtcctgaagacgcattcctttcctgccaacctctttccagataagcccttgaggtctcgggctgacctacacacacacacacacacacacacacacacacccccacacacacacacacgacagagaacatgccataaacatccttgaacccatgcaggaaagcccatcccatattctgaaaaaatgccaaattaggtttttctttctttttggaaatcagtcattacagtaaccgaaaccattgggttcagcgaaaatggaaagatttagctgaatgtagtcagtccaattaagttggatgcaactgagtgatttagttgcttgggtaacccagtgcttgcttgctttcttcattctctgggtggaaactaagatcaagacacatgtttggggataagttaaatgtctgagctattttgctcggtttatcctaagagaactttattatgggatgaggaggtgacccaagatgagaagtggagggggacagcgatgttttctaaacatcgtccagtgttgactggcttccttactttgcacagtgaacacaactaaccacattaattcagctttgtgaagtccctgctctctgtgggtctatgagtcagcagcaacattggcctaacctccgtcccagcctcctggctcaccacatgtgtacagtgctgtttgcagttgtactcattatccatccatctctctgccatccccaagcatcgctgggtgtaaaacgcaaactctccaccgacactgccatgcgtggtcatgtcttgatgccttcaggggctcagtagctatcaaagaggcctggagggcctgggcaggcttgacgatgcctgaccgagttcaagacccacaccctgtagcaataccaagtgctattacataatcaatggacgatttatacttttattttttatgattatttgtttctatattgctgttagaaaaagtgaaataaaaatacttcaaaagaagatatccatataaaaataaaaggagagaaaaatg

SEQ ID NO: 132170 - DNA, 1120 bp, Homo sapiens
  Payload ID: 5805
  Gene Symbol: FAM167A
  Gene Name: family with sequence similarity 167, member A
  ENST ID: ENST00000531804
  CDS Start-End: 847-1120
gtgagaatggcagactggagccctttgaaagacgcttccagccccgggcatctaggaaaggtgcttgatgaggtctgggatgaagaaaatgagacttagcaagcctgacaagacgtagagctaggccatctgatcccaactctagtgtctgcatctggagacagtggttctccaccccggctgcacactcggatcatcgggggagctgaacactgctgtctaagtcccatctctcgaccaattgaatcagaatccagttcctcagggggattctcgcttgctccaagcagagctggaggtgctgccatgcgggcacttaggtgaacacgagaagcctcgttctagaacaatgagtcacagcctgcttgtttagccatccagcccaggtgccaccgccttcttccctccacagctgcaggtttatttgcttctgtctctgaagaggtgagggtctccagccacctgcccttcccgagaagagagagctctgggccttcttcctgccagtctggtcttcgagtgcgttcaggacagatagaccttggcacaggctgccccgagattcctgcgacgctgtctgttcctgccttctgtggagcatggcacccacaggcttccaggacggatcatagacccgagcctccaggagggcgccctgtgcggctcactgcgcggtccctctcagctcccctgccacccagcctctgaggccggctcctgtcccggaaatgccctcgggcacctggatgaggccatcccagagcgggacccaactgtgccacccaccaagcctccccctgcgccccccgtgccctcgcatgtccggctgccagggcagactgtagaatgtctgtgccccagatccacgtggaagaagtgggtgcagaagagggggcgggagcagccgcaccacccgatgaccacctccggagcctgaaggccctcaccgagaaactgaggctggagacccgcaggccctcctacctggaatggcaggccaggctggaggagcatacctggcccttcccgaggccggctgcggagccacaggcgagcttggaggagggggagcgtggggggcaggagcccttgctccccctgagagaggctgggcagcacc

SEQ ID NO: 132171 - DNA, 1642 bp, Homo sapiens
  Payload ID: 5805
  Gene Symbol: FAM167A
  Gene Name: family with sequence similarity 167, member A
  Uniprot ID: Q96KS9
  ENST ID: ENST00000534308
  CDS Start-End: 476-1120
ctcctgtggagtggacgtgcccgcctctgagtggcagggcagggatcgggactgatgcggttctcatccctcccacagggtctccagccacctgcccttcccgagaagagagagctctgggccttcttcctgccagtctggtcttcgagtgcgttcaggacagatagaccttggcacaggctgccccgagattcctgcgacgctgtctgttcctgccttctgtggagcatggcacccacaggcttccaggacggatcatagacccgagcctccaggagggcgccctgtgcggctcactgcgcggtccctctcagctcccctgccacccagcctctgaggccggctcctgtcccggaaatgccctcgggcacctggatgaggccatcccagagcgggacccaactgtgccacccaccaagcctccccctgcgccccccgtgccctcgcatgtccggctgccagggcagactgtagaatgtctgtgccccagatccacgtggaagaagtgggtgcagaagagggggcgggagcagccgcaccacccgatgaccacctccggagcctgaaggccctcaccgagaaactgaggctggagacccgcaggccctcctacctggaatggcaggccaggctggaggagcatacctggcccttcccgaggccggctgcggagccacaggcgagcttggaggagggggagcgtggggggcaggagcccttgctccccctgagagaggctgggcagcaccccccttctgccaggagtgccagccaaggtgccagacccctgtccactggcaagctggaaggctttcagagcatcgatgaagctatagcctggctcaggaaggaactgacggagatgcggctgcaggaccagcaactggccagacagctcatgcgcctgcgtggcgacatcaacaagctgaaaatcgaacacacctgccgcctccacaggaggatgctcaacgatgccacctacgagctggaggagcgggatgagctggccgacctcttctgtgactcccctcttgcctcctccttcagcctctccacaccactcaagcttattggcgtgaccaagatgaacatcaactctcggaggttctctctctgctgaggagccctcagactgggcggaggggctggagcggagggcttgggctggaggggtgtcagaggaagctgaggccaagttactccagtgggtctcccggaggcaggggtccctgggactggcgactcaagggccccaggacctattcagtggtgctctcccacccaggggccctgggtgtggatgccagtgtctctgtgactggctcttgcttactacccaaagagctctgcagaagggccgctccaaccaagatgttaaaggagacctgggttcccaccataatccatccctccacggtcacgttcctgtttcctggaatcactggtgctatgaactgggattcccaaagggaggccccccaacaaagctgtcatttttgcagaaggctgtcccgcaagggccttgggggaaattaggcatgtcagatgtgcctgtctcacgtgctgttgctgtcctctaagtattgtctcaaattcaccctaagtacatgactcagcaacattgacagggagctactaggaa

SEQ ID NO: 132172 - DNA, 1620 bp, Homo sapiens
  Payload ID: 5805
  Gene Symbol: FAM167A
  Gene Name: family with sequence similarity 167, member A
  Uniprot ID: Q96KS9
  ENST ID: ENST00000528897
  CDS Start-End: 621-1265
gatgtagaaacggctgctggaggacaggacctgtggtgggtggaggtggtgagggggcagtggcacctggacggagcagacccaccttagcctgtgtggggtgcggtttccctgctggctggctctggggaccccccggctgttgccacagagaggaaagacctgtggcctcagattcagacagcctgagcttgtccccacaacttattgctgggagatctcgggtctccagccacctgcccttcccgagaagagagagctctgggccttcttcctgccagtctggtcttcgagtgcgttcaggacagatagaccttggcacaggctgccccgagattcctgcgacgctgtctgttcctgccttctgtggagcatggcacccacaggcttccaggacggatcatagacccgagcctccaggagggcgccctgtgcggctcactgcgcggtccctctcagctcccctgccacccagcctctgaggccggctcctgtcccggaaatgccctcgggcacctggatgaggccatcccagagcgggacccaactgtgccacccaccaagcctccccctgcgccccccgtgccctcgcatgtccggctgccagggcagactgtagaatgtctgtgccccagatccacgtggaagaagtgggtgcagaagagggggcgggagcagccgcaccacccgatgaccacctccggagcctgaaggccctcaccgagaaactgaggctggagacccgcaggccctcctacctggaatggcaggccaggctggaggagcatacctggcccttcccgaggccggctgcggagccacaggcgagcttggaggagggggagcgtggggggcaggagcccttgctccccctgagagaggctgggcagcaccccccttctgccaggagtgccagccaaggtgccagacccctgtccactggcaagctggaaggctttcagagcatcgatgaagctatagcctggctcaggaaggaactgacggagatgcggctgcaggaccagcaactggccagacagctcatgcgcctgcgtggcgacatcaacaagctgaaaatcgaacacacctgccgcctccacaggaggatgctcaacgatgccacctacgagctggaggagcgggatgagctggccgacctcttctgtgactcccctcttgcctcctccttcagcctctccacaccactcaagcttattggcgtgaccaagatgaacatcaactctcggaggttctctctctgctgaggagccctcagactgggcggaggggctggagcggagggcttgggctggaggggtgtcagaggaagctgaggccaagttactccagtgggtctcccggaggcaggggtccctgggactggcgactcaagggccccaggacctattcagtggtgctctcccacccaggggccctgggtgtggatgccagtgtctctgtgactggctcttgcttactacccaaagagctctgcagaagggccgctccaaccaagatgttaaaggagacctgggttcccaccataatccatccctccacggtcacgttcctgtttcctggaatcactggtgctatgaactgggattcccaaagggaggc

SEQ ID NO: 132173 - DNA, 936 bp, Homo sapiens
  Payload ID: 5806
  Gene Symbol: FAM167B
  Gene Name: family with sequence similarity 167, member B
  Uniprot ID: Q9BTA0
  ENST ID: ENST00000373582
  CDS Start-End: 190-681
cacacacccatctgctcactcaccctggcacattcagcccccctaacccaccttgaacattgaccaccacacactccctggcacgctcttctcaccctcaacttctgccacctctccctgggcaatactgccagcctttccctaatctcagagctgcagccctgccctgtcactcacctcaaacctgccatgtccctggggctactgaaattccaggcagtgggtgaagaggacgaggaggatgaggagggggagagcctggactctgtgaaggcactgacagccaagctgcagctgcagactcggcggccctcatatctggagtggacagcccaggtccagagccaggcctggcgcagggcccaagccaaacctggaccagggggacctggggacatctgtggtttcgactcaatggactccgcccttgagtggctccgacgggagctgcgggagatgcaggcgcaggacaggcagctggcagggcagctgctgcggctgcgggcccagctgcaccgactgaagatggaccaagcctgtcacctgcaccaggagctgctggatgaggccgagctggagctggagctggagcccggggccggcctagccctggccccgctgctgcggcacctgggcctcacgcgcatgaacatcagcgcccggcgcttcaccctctgctgaggaacacctgtgccccccgactccccgccccctctcccaatgccgcttcccctgcctgcctgggaagaggaaagggaggggtgccccagaggcaccagctcctggcgggggaggaggaacattcaggtttctgagagctgaattccaagagtgcaaaaccccagcatcctgtttcctctgctgacccagctgggagggggaggaggaggagctcacaccctcaaactcctcaataaacgctttctctggttccca

SEQ ID NO: 132174 - DNA, 7296 bp, Homo sapiens
  Payload ID: 5807
  Gene Symbol: FAM168A
  Gene Name: family with sequence similarity 168, member A
  Uniprot ID: Q92567
  ENST ID: ENST00000064778
  CDS Start-End: 286-1020
ccttctgagcggtcccccgcctcctccctccgcctcctcctccctcgcccgcagccgagcgtcccctccccccacccgtcgggctcctcggcggctactgcagaggattcagagccgagtcgctgaggaggaggctccggtccccgcgcgccatccgccaccctactggacacgggcgagagcgtcgccgccgtagcctccggagaagacaagggcatcgccgcctcagccgccgccgccgccgttttcgcctgcagctgctcaccggatcctcagtcttccacaatgaaccctgtttacagccccgtgcagcctggggctccttatggcaaccctaagaacatggcctacacgggttaccccacagcctatccagcagctgcccctgcctacaatcccagcctgtaccccaccaatagtcccagttatgctccagagtttcagttcctgcattcagcttatgcaactctgctgatgaaacaggcctggccacagaactcgtcttcctgtggcactgaaggcaccttccacctcccagtggacaccgggaccgagaaccgaacttaccaagcatcctctgcggctttcagatatactgcggggacaccatacaaggtcccaccgacccagagtaacactgctccacccccctactccccatcacccaacccctatcagacggccatgtatccaatcagaagtgcctacccccagcagaatctgtatgcccagggagcctactacacacagccggtgtatgctgcccagcctcatgtcatccaccataccacggtcgtccagcccaacagcattccctctgctatctacccagcacctgttgccgccccgaggaccaacggtgtggccatgggcatggtggcaggcaccaccatggcaatgtcagcaggtaccctgctgactacaccccagcacacggcgattggggcacaccctgtctccatgccaacatatagggcccaaggaacccctgcgtacagctacgtgcccccacactggtaaagcctgcagcccatccaaatctggagtcacacattgtatgcaactactcaagtcttacaccggtgctggagcagttccctagcagcaccacctctatttgcaagaagagacaacggaagtgcaagggtcactttatgcatctttaatggttttgatttttatttttggtttttgtaaaagctgctttttctaatctcctgcctctccccaactgtccccctcttagcccctgcccttccagctctatccccttcctcctacctgaccaggccatgtcctctctgctcttccctaagtgtcctgtccctggggatcccagtctagaggcaagcagagagtagggtttattgcagtggttcatctgaaggctggattccatttgaagagcataaacagatgtggtccagggtaggaactcagagctgttgagcaggctacatctctaggggagtgttctggttgttttttcttaagcaagattagttcaggacattcccatgtcccagacacaaatgaaatgtctcctgagaaccattgcaacagaccaagaacaaaaccacctgagtatgtaggcgtgttattagcagcttaataccccaggctgagaacctggggaaaaaagtctttagaatttgggggagggtggggggagggagggcattgtggggaaggagagggaagaagggaggagcggtgcttgcctcatggctttggtttgaaaggtctctggccaaagcatctggccctggaccttctgatttgcacagtgatgttaactgacctggcacttcctcaaaaggtgattttgtccttagacctgccaagcggctgcagggtggtaggatcccagcatcccgaggccttggaaggccggatgccctgtgtcatccagacttcagcctctgagctgtcatggacccactctgatgaggagcttcctcctgattggagtgggaacctagggcatttctctcccttttcttttgcccttcccagtgccaggactcacctgtctgaccatagagcttgcaggcaggccaagctcttggttacctgtgccattcatggcccaagtgaaggaaccacattccaggtgggtgctggcagctctgaaggtgaggatagtgaaggaaaagcaatagcaataaacatttcatagactcatggaactgaagggaccttagcaatcatctcatccatttccctatttggcagatgaggaaactgaggcccagagaagcggaaaggacttccctagaccttacagtaaattagcattaaatgcagccttcctacctagtgggcaccttgcttacaaaaatttacctagggacggattggcttggttttgtaaaaattaagtcggcagcgcccatacctggtgagtctggaatggtctctgggctcctgtttctgctcttttcctccacggactccaaaggcgggggttgaagactgggcagaggctacatgggggcggatggcaggaacagaaattgcaaatgaagaaatagcatttggaaattctgtgaagacatctggaacttccgtcctgtacctgactccacctccaggagaaggagcaggtggactggccgaaaaggagaggccatgcttttaggacagtagcccctcatcccgagaggagaggaagaggaggaagacagtgggagtcatcaggagaggagaatgaggatgaggcccaggagacaggctcatctgggagaagagggacccctgggacgaggaggtccctgctagtctcagccaggagcctggattgcccagcagcagcctccggcacccagcgcttggctgggccagcagcccctctgggggtggggcacgaacattttattgtaaaaaatgggatcattgacaacatttgggactttaaaaaactgctttcatttaaaattcatgcaaacttggacatatccttaccccaacctcccatgtctccctaagggagggaaaaatcaggaaacccttgggttggaaggagctcagaagctgtctagccattcccaggagggtaaagcccatcagcctccttggcctagagccaggagtttgggggcccaccttcctgggcttccaaggaactttaggaccagtaagaaaaaattcagctgttctaaattatctgttctgggtgctgatgaggtttcactttaaaacaatagaaagttttccagtgttaattcactttttgcaaatacctccttccaccctctttggttttgtaaaggtgggtgaaggttgttctagattatgtcatacgtgtttgaaaaatgccaaaataataataatgataataataatagaaacctttggatttgtcaggtgcatcacagaggtcaaagcacttcacggcctttcatgtactcgccctgagagggacagggttagagttattacagtcaattgacaaatgaggaaacaggttatggaagggaacaggcccacagtgagcagcatgctggtatccgctaggcttcccagaaccctgctgcctccatgtgggctggggtggaaccacagagaggagaaaggaagaagaggagacctaggaatgaccttgtaacttttgttctttcaacaccagtaagtaaaactaacagctggacctcacagttcacagaacagttgaacataaattatctggtttaacccgatgaaatagaggttatttctcctatttgatccataaggaaatcaaggcttggaaaagtcaagtgacttgctaataagtgacagagccactcgaatcccaggctgtctgctgtctcgttcccctccatctgatccccacacaggctcacgtactgaagcatctgtgctctgtgccctatcttagcacctactatgtaattcaagagcaaaggggggccccaaggtgaaaataaggcactgaaaggctgtggtctggaagagcccaggtccagcacccctttttcagtatgagccccagttcagccggcctcagcctcttgctgtgatggagatccacaagcctagccaagcttggggagtcactgcaaaaggactgagcccaggagagcggggacagtcatgtgcctctggtaggatgggcacagttactggtaaggtcacagagatctagtgggaggtaccataggtagatacctccaaagattctagatggcacggtggtcaagctagacaaaaagtcagagctggaagggccgtctcattgaaggcaggcaagcaagagaggacaagggatgtagccgcctgacagtgagctacagcactggccccaggatgcaaacccctctctcctcctcatgccactgcctctccccaagtgcaacacctatggccaggatcaggggtacagatggctcgttaccagccaacccttttgaattcttctacttctacctgaccccctctcctcactggcctggggtcaagaagtttgagtctgggagctggattgcctgcaaatagtgaaagcctgaaacataatggtttgccatgttttgaaaaaaaatgcatatttaatttcttcctcatgagataggacagttgctgttctttcttacctggcaatgaccctaaaatgtatatcctctttcctgaatatttagcagagacacacacacctgtccagagcgtttttggtatgcaaagtactttgacattggttgccaaagtcctccattttatagatgaaaaaactaaggctcaggaggcttgagacttgctaaaaggtcacacagcttggaagtgattcttcaaatcctctgctctttctgctgccacctgctgggtctcttggcaagcatggagggaggggctaactgtactttatagagctgggaagcccagtctctgagctgagcagatttgtatgaactgctttgggccaggacctgtaatgagccctggggagggacccagaggcacatctaactggcagcacaaggaggatgagaatttgcaactaaaggcctcacttggacaaaacactttggggtcacaatgcccaggaccgaagacatgttcaaggacagcacgaggcatctttctattgggagacccatgtccttggtaagcctgcacacctggcttcctaatccctgagagcctgcccactgtccagatccagtgagttggtacaaaacgtacagactgaagtccctgggcttgcttttcccatgggtgaggaccagaaccagactctgagcatccttacccctggccacccgaattgttccaagtttgaggtaccccgttcccagagatctgggggtccttctttggagggcttgctttgttctgatggccttcagaaaggaatcacatgaagtataaaaggacaggccccttggtcaccaagttttggctcctcatacagataggactcatccaggttcccagcgaggcactgactaagcgaggctcagagcttccatatcaaattcctcagctttgttctgtgcccagagggggtgggccccattctgggccctgtgaactttgtcttatatatcaccatctgtatcagaattcctcctcaattgcagttaagtgaaaatacgtggaagtctgcttttccatcctgtattctcccacatcactactggctgtgcggcccccgctgcttgccaagcttgggaatccagagaggggcagtagtagagtgggccagttgggacccacccgcagagctgaagaaacacgccagactaactgatgggattccacaccggagcctctgagcgcacaggcaggcatgccaagggggctgcagggtttgtcctttacttatctgcccctttcctagaaaactcctcgtttctgaaattaggcattatatggttccaggacccagccttcaaaattcctggcaggccagcttcaacattccatggccagccctgcctaagccagacttgggtcccagtccctcagtctctccagtggatatcttctgtggtgcatgctgttgagtccaacccaaaggccaaccgaggcacacaggagttgggactggctgccacaaagctagaaagggacaaaacagcacttgcttccctatggccacatggatagtccctggatatccttgctgtggtagaggtcctctacccattccagccactgatagcagggggattttccttcctaaggagaacagatgtaacagctttgcaaagtaccggcccataggaatcaaatgggtgagatcagctttgggcctgaccccagcaagaccagcatctccagaccccagcctttctcctcaggcctaagagagtcagggaaagagaggagactgtcccagagaccttctcctcgggtcagccagatagtctggatctatggtgtgactcaagctcctccttacccagggggggtaaggccaggcctctagctacttggagttgtctgtaataatcttgaaaggcccaagggcctgtccccatcctgacttaaaggcatctgcttccctgtttcatatcacatgacagagaaacctgttctcatggcatgtaacatccctgtgaagagagcgttgtatatgattttgtattttttaattcattttaatctacaggttggaatctaatttttaaattttattggaactcacattttaaaaagaaataaaatttaaaataataataataataataataataataataaacctttgaccagtgtcttccaagtagtttgatcaaagaatttataggtgttttcaaaacacagtccggagtgtaaagattggaaagccccatggccttgcctgtgtgtatgaagtgtaaatctggttttgttttgttgttttggattcttttgggtttttgttttgttttgaagatcagacagtgatcactctgaaagattgaagccaagaatttgtaactatggtatttactgtaagctgtagaacactcaataactattaaaaaaaaaaattcccccccaaaaaaaagtcttaggtgactagactgagtggttcttggggagggaggcacagaggactgtcctgggccagtgagtcccttgggcgtctccccaagttgatgctaaatttgttctcagtagtcaagaaaaacctatggtacatcttacagctgatctgacaggggtctgccctaagggtctcacagctgctggggagctttaagtggcaacttcagcacccaccctaagtgtgtgatgtgggagcacagtgaggccattcagagttgaaatccattgagccatccgcgcaataaagctgacatctattgtgtg

SEQ ID NO: 132175 - DNA, 1767 bp, Homo sapiens
  Payload ID: 5807
  Gene Symbol: FAM168A
  Gene Name: family with sequence similarity 168, member A
  Uniprot ID: Q92567
  ENST ID: ENST00000356467
  CDS Start-End: 280-987
gagcggtcccccgcctcctccctccgcctcctcctccctcgcccgcagccgagcgtcccctccccccacccgtcgggctcctcggcggctactgcagaggattcagagccgagtcgctgaggaggaggctccggtccccgcgcgccatccgccaccctactggacacgggcgagagcgtcgccgccgtagcctccggagaagacaagggcatcgccgcctcagccgccgccgccgccgttttcgcctgcagctgctcaccggatcctcagtcttccacaatgaaccctgtttacagccccgtgcagcctggggctccttatggcaaccctaagaacatggcctacacgggttaccccacagcctatccagcagctgcccctgcctacaatcccagcctgtaccccaccaatagtcccagttatgctccagcaactctgctgatgaaacaggcctggccacagaactcgtcttcctgtggcactgaaggcaccttccacctcccagtggacaccgggaccgagaaccgaacttaccaagcatcctctgcggctttcagatatactgcggggacaccatacaaggtcccaccgacccagagtaacactgctccacccccctactccccatcacccaacccctatcagacggccatgtatccaatcagaagtgcctacccccagcagaatctgtatgcccagggagcctactacacacagccggtgtatgctgcccagcctcatgtcatccaccataccacggtcgtccagcccaacagcattccctctgctatctacccagcacctgttgccgccccgaggaccaacggtgtggccatgggcatggtggcaggcaccaccatggcaatgtcagcaggtaccctgctgactacaccccagcacacggcgattggggcacaccctgtctccatgccaacatatagggcccaaggaacccctgcgtacagctacgtgcccccacactggtaaagcctgcagcccatccaaatctggagtcacacattgtatgcaactactcaagtcttacaccggtgctggagcagttccctagcagcaccacctctatttgcaagaagagacaacggaagtgcaagggtcactttatgcatctttaatggttttgatttttatttttggtttttgtaaaagctgctttttctaatctcctgcctctccccaactgtccccctcttagcccctgcccttccagctctatccccttcctcctacctgaccaggccatgtcctctctgctcttccctaagtgtcctgtccctggggatcccagtctagaggcaagcagagagtagggtttattgcagtggttcatctgaaggctggattccatttgaagagcataaacagatgtggtccagggtaggaactcagagctgttgagcaggctacatctctaggggagtgttctggttgttttttcttaagcaagattagttcaggacattcccatgtcccagacacaaatgaaatgtctcctgagaaccattgcaacagaccaagaacaaaaccacctgagtatgtaggcgtgttattagcagcttaataccccaggctgagaacctggggaaaaaagtctttagaatttgggggagggtggggggagggagggcattgtggggaaggagagggaagaagggaggagcggtgcttgcctcatggctttggtttgaaaggtctctggccaaagcatctggccctggaccttctgatttgcacagtgatgttaactga

SEQ ID NO: 132176 - DNA, 1364 bp, Homo sapiens
  Payload ID: 5807
  Gene Symbol: FAM168A
  Gene Name: family with sequence similarity 168, member A
  Uniprot ID: Q92567
  ENST ID: ENST00000450446
  CDS Start-End: 195-584
cggctactgcagaggattcagagccgagtcgctgaggaggaggctccggtccccgcgcgccatccgccaccctactggacacgggcgagagcgtcgccgccgtagcctccggagaagacaagggcatcgccgcctcagccgccgccgccgccgttttcgcctgcagctgctcaccggatcctcagtcttccacaatgaaccctgtttacagccccgtgcagcctggggctccttatggcaaccctaagaacatggcctacacgggttaccccacagcctatccagcagctgcccctgcctacaatcccagcctgtaccccaccaatagtcccagttatgctccagcaactctgctgatgaaacaggcctggccacagaactcgtcttcctgtggcactgaaggcaccttccacctcccagtggacaccgggaccgagaaccgaacttaccaagcatcctctgcggctttcagtaccctgctgactacaccccagcacacggcgattggggcacaccctgtctccatgccaacatatagggcccaaggaacccctgcgtacagctacgtgcccccacactggtaaagcctgcagcccatccaaatctggagtcacacattgtatgcaactactcaagtcttacaccggtgctggagcagttccctagcagcaccacctctatttgcaagaagagacaacggaagtgcaagggtcactttatgcatctttaatggttttgatttttatttttggtttttgtaaaagctgctttttctaatctcctgcctctccccaactgtccccctcttagcccctgcccttccagctctatccccttcctcctacctgaccaggccatgtcctctctgctcttccctaagtgtcctgtccctggggatcccagtctagaggcaagcagagagtagggtttattgcagtggttcatctgaaggctggattccatttgaagagcataaacagatgtggtccagggtaggaactcagagctgttgagcaggctacatctctaggggagtgttctggttgttttttcttaagcaagattagttcaggacattcccatgtcccagacacaaatgaaatgtctcctgagaaccattgcaacagaccaagaacaaaaccacctgagtatgtaggcgtgttattagcagcttaataccccaggctgagaacctggggaaaaaagtctttagaatttgggggagggtggggggagggagggcattgtggggaaggagagggaagaagggaggagcggtgcttgcctcatggctttggtttgaaaggtctctggccaaagcatctggccctggaccttctgatttgcacagtgatgttaactga

SEQ ID NO: 132177 - DNA, 944 bp, Homo sapiens
  Payload ID: 5808
  Gene Symbol: FAM168B
  Gene Name: family with sequence similarity 168, member B
  Uniprot ID: A1KXE4
  ENST ID: ENST00000389915
  CDS Start-End: 259-846
gtcggcggctccggtggctgcgcagcgtcggcggggagcgcgggctgcggagaggcgggccgggccaagcggagccgagcgagcgggagcgcggcgtccgggaggcggcggagacgcggggctcggagggtcagcctcttatcgtagcaggtctcctcggcacgccccccttgtttcgccccacggccaagcccgccgcgggccggcgtgcgctggtcactgaggcccaggtcgccgccgcggcgcgtttttgaaatcatgaatcctgtttatagtcctggatcttctggggttccctatgcaaatgccaaaggaattggttatccagctggttttcccatgggctatgcagcagcagctcctgcctattctcctaacatgtatcctggagcgaatcctaccttccaaacaggttacactcctggcacaccttacaaagtgtcctgttcccccaccagcggggctgtgccaccgtactcctcctccccgaacccctaccagactgccgtgtaccctgtgcgaagtgcctacccccagcagagcccgtatgcacagcaaggcacgtactacacacagccgctgtatgcagcacctcctcacgtcatccaccacaccacggtggtgcagcccaacggcatgcctgcaacggtgtaccctgctcccatcccccctcctagaggcaacggggtcaccatgggcatggtggctgggaccaccatggccatgtcagcaggtaccctgctgactgctcactccccaactcctgtcgccccccacccggtcactgtgcccacgtaccgggccccaggaacgcccacttacagctatgtgccccctcagtggtgatcacctgcaaatgtttgaggacggagctgtgcagtcacattattggggattccacagctggtgctgcaggccttgcgcctccaaccaggactttcttc

SEQ ID NO: 132178 - DNA, 5285 bp, Homo sapiens
  Payload ID: 5808
  Gene Symbol: FAM168B
  Gene Name: family with sequence similarity 168, member B
  Uniprot ID: A1KXE4
  ENST ID: ENST00000409185
  CDS Start-End: 109-696
ggggagcgcgggctgcggagaggcgggccgggccaagcggagccgagcgagcgggagcgcggcgtccgggaggcggcggagacgcggggctcggaggtttttgaaatcatgaatcctgtttatagtcctggatcttctggggttccctatgcaaatgccaaaggaattggttatccagctggttttcccatgggctatgcagcagcagctcctgcctattctcctaacatgtatcctggagcgaatcctaccttccaaacaggttacactcctggcacaccttacaaagtgtcctgttcccccaccagcggggctgtgccaccgtactcctcctccccgaacccctaccagactgccgtgtaccctgtgcgaagtgcctacccccagcagagcccgtatgcacagcaaggcacgtactacacacagccgctgtatgcagcacctcctcacgtcatccaccacaccacggtggtgcagcccaacggcatgcctgcaacggtgtaccctgctcccatcccccctcctagaggcaacggggtcaccatgggcatggtggctgggaccaccatggccatgtcagcaggtaccctgctgactgctcactccccaactcctgtcgccccccacccggtcactgtgcccacgtaccgggccccaggaacgcccacttacagctatgtgccccctcagtggtgatcacctgcaaatgtttgaggacggagctgtgcagtcacattattggggattccacagctggtgctgcaggccttgcgcctccaaccaggactttcttcttaatgctctcgacacttagctaaacacgactatatcccggcccagcaggccccagcgccgttagtctccagctgactctgtgggttggtcttaaagcaaattctgttttgtggactgcctggcaattttttagctaactgtaatgataaaaagggagtattaatctattctgaatcatatctagttgaatgcatgtttaaaaaaacaaacacaaaaagcttgctcaatctacctgcagtgactgatgcaaaaccatcatatgcaaaatccaaaggaatggaaacgtattttacaacttgtatcactaatgcactgttgtaatgtatgcaaagtcttacagttataagtgttaaagtgaatttcttcatagagcatctgaaatatcttagatgattcttcaaccttttggggttgatgtgggttgccagttagggatgtggacattttagttttcagcgacctgtttctttggcactgactgtcctgggagggagttgcgaggtttgggagagagtagggaagccacagctgcttgggtgcagctggttcatggacatccctttgagtttaggcttggtggagtcagtggaacagggacatgcttaaagctcatcatgaaagattatggtagtgtggccagtgaaatttggggcgaggggggtggtttatgtgtcagcaaagcagtttctctgctatctaaattttcattacagttctcttagagagatgatgtttttatatgtctttattggaaaagtcctatgtaaaactaaattattttcctgggatggaagaaatgtgaaagagaaacagccatgcttgcaggaggtattgtcctctgctttatttagcttagaaaatcattcctttttttttttttttcctggagaaatgtttgaatcagctgaaaacaggtaggcattgctgtttttccccaacaaagaagggcaaaggtttcagctgtatgttatgaagaaagtggtatatttaagaatgagttaaaagggaacaaaactttatttaaaattcctccaatttcttgtagaaaggcagggccgtggatatgtctggaaatgtagaaacctgtagctgcttctgggatcacccacctgatggtggtgacttgtctgctgaggccggctggaggggacgcttagagatggggcgagggggaggccagtgtctgttgtctgcgagcctctcctgccatctcttttgcagctgagggcacttggcacaaagcaagcacagacagcagagagggccaggcagtgctggagtgcgtttgctggcagggtttattgtgggagaggaatttgagtttaggatctgaatcttgtacataagaaatgaaaaggcttccctccaccccgcccccaaaatatgcccgtcctgtatccatgagagtgcatgtcggttctcagtgagggtcagagtgggggtgggggatgtaaggcctgggtccctttcagcggcctctagggcaggagcgtgcgtcttcttcccagtgcagtggtggtttgagtgctgtgggctctggtggggagggggctctgctcctcttcatttgctggtagctgggtcagggcactggcgcccagtgaggatgcccactagcattctgccccagttggttggtggggggacacctgaccactgagcctttggtaaccttattttttatagtaagtacttcttataattttctttttcacatcttattttataagaagtttaggaatatttttgcatggatcattgtaaacagcagattctttattcctgatgtctattaacatagaatgtttactgataagtactttaaattgcttcatgagcacttaatccatcttagtgtctatgtgtgggggcagacatttaccgcaggcacacagtttgtgcccctttcttcaagtctctgttggtaattccatctgtttagtggatggttggcaggattagtaggttctaacggttccaggggttcagctgaccaagtagcagagaagtcttttttcccaattgagtgctaatagattaggataaaatactcacaatgttagtgtatgcttttaaaaagccccacacaacaaaatggaaacatacatgtacaactcctgtgagggctggagtcttggggttcaggaggaggttagaagttacaggcatctcttcaggcttgcttggtacttggcacacacaggatggtgttttaaagagtgggctgcaccccccacacgccatttacatcagcttcataaacacttttcttcctccctgtaacttaaccttttttcccttttatgaagttgagaggctttatgaaataagtttgcattgcacatccgtgcagaaatctttctgactttgaaatttttaggacgtcagctgtcagatacgaaaggtagatatcaggtaagaatctggacttaggaaatagtcacaaaactgtcataggttgtaattttatcaacattcgcttctagtaaaattaaagtcaattaagaaatagaacttgggtcaaaattctgttacaaagcttcataatttgtcccgaagcatatggtggagcattctgagaaatttgctttttgtgtgtttgacattcctaatttgggagtccttcagctgaattactattcttttagaagttgagacagcaggtaagcaaaggacctagttcatgtaaacatggacatcatgatggctatttaaaaaatatttgttctacaccttctcccctgaggcttggggagtgtgttcagccgctgcagtttctctgctcatggaggtcttgtttggatctgtgctggcggctgagcatttagtgtgagccagtgacccatgaacttgccgctctgtgagggccagagtcagggccagtcatggtaatgggcctgaaggcacttccagaaccttttatgtctctcgtgagccatctgttaagaacgttcttcttggtgtggtttgtaggcctacctgtcgctattctgggaaaccttcttgagtgctatgcaaatgtgttcacaggcaatgggggtggtcctgagccttggggtgggcacctggtcagtgagtgtcttgcccttccccagctgggcatacagtaccttgctctttctggtggcatcatctggctgtgatgaatgaggtctaggaaataatttgcatgtgtcttgggggacacaacagtaacgagaggaaatacattattacagcaacttgcgacgtactaatacctgtcagtgttggcccccgtaaggtatgtaaggcacctgtgagtgccagtgagtgctggtgaaaggccaacatgtactagttatgtaagtattggtgtctgctttaaaaaaggagacccagacttcacctgtcctttttaaacatttgagaacagtgttactctgagcagttgggccaccttcaccttatccgacagctgactgttggatgtgtccattgtcgccagtttggctgttgcccggacaggacaggacctccattgggcgcagcagcaggtggcaggggtgtggcttgaggtgggtggcagcgtctggtcctcctctctggtgctttctgagagggtctctaaagcagagtgtggttggcctgggggaaggcagagcacgtatttctcccctctagtacctctgcatttgtgagtgttccctctggctttctgaagggcagcagactcttgagtatactgcagaggacatgctttatcagtaggtcctgagggctccaggggctcaactgaccaagtaacacagaagttggggtatgtggcctatttgggtcggaaactgcatgtttcagaaagtttgtctctttttcctactcattatttgaagaagagagagcctgtggggatagccttatcttggtccacaggactgaagtgaagtcacttgggaaggggagacagaggatgagcggcgtctgtgtagggacccccccccgggcctgcagaagggtggtgtgctcccaggactggcatgacaggtgtctcctcctcaccacaggctgtgcccatgagtccctgtgcagaccagtgggcaaggcagctgggccagatctcaggccagccgtttgtgctcctagcagggttgctgtgctggccacacggagaggccctagagagcctcatggattgtaactaaagaagaaacggttcctttttgtttttttaaaaatgatttttaaataccgttttttacaccgttctctcggtactttttttaagctaagtcagcattgtcttccagtgttaaaggcatccctcacctctgcattgaacttacgtatccatgccaaggaatggaatttccatcctgagccagttcagttaggtgtcaattgatactattttaattttttatgcaatctgatgagatgagctcagatttaaaaatctcaaaagcacgtttattgtaacaagaattgttatgtattaatactgcagttttcaataaagattgacttgtgttgca

SEQ ID NO: 132179 - DNA, 5990 bp, Homo sapiens
  Payload ID: 5809
  Gene Symbol: FAM169A
  Gene Name: family with sequence similarity 169, member A
  Uniprot ID: Q9Y6X4
  ENST ID: ENST00000389156
  CDS Start-End: 92-2104
atggccgcgcccactctgggtaaatttcaggagggcctacgcggggctggagaactccaccgggctatgcgaacagaatcctgcgaagaggatggcattccctgtggatatgctggaaaattgcagccatgaggaattggaaaattctgctgaagattacatgtcagatttaaggtgtggggaccctgaaaatccagagtgtttttctcttctcaatattacgattcctattagcctgtcaaatgtaggctttgtacctctttatggtggagatcagacccagaaaattcttgctctctttgcacctgaagattcactgacagctgtggcactttaccttgctgatcagtggtgggctattgatgatattgtgaaaacatctgttccttcaagagaggggcttaagcaggtgagcactcttggggagagagtggttctgtatgttctgaatcgaattatttatagaaaacaggaaatggagagaaatgagatcccattcctgtgtcatagcagtactgattatgctaagattctgtggaagaaaggagaggccattgggttttattcagttaagcctacaggaagcatatgtgcctcttttcttacccaaagttaccaattgccagttcttgatacaatgtttctaagaaagaaatacagaggtaaagattttgggcttcacatgctggaggactttgttgattcctttacagaagatgcgcttggcttgcggtatccactgtcttctctcatgtatacagcttgcaagcaatactttgagaagtatccaggagaccatgaactcctttgggaagttgaaggtgttggacactggtaccagcgaataccagtcaccagagcattacaaagagaagcacttaaaattctagcactttctcaaaatgaacctaaaagacctatgtctggagaatatggtcctgcatctgttccagaatacgaagcaagaactgaagacaatcagtctagtgagatgcagctaactattgattctctaaaagatgcctttgcaagcacttccgaaggtcatgataaaacatctgtttccactcatactcgaagtggtaatctaaagcggccaaagattggaaagcggtttcaggattctgaatttagcagttctcaaggtgaagatgaaaagacctcccagacttcacttacagcttcaataaacaaattggagtctactgcacgcccatcagagagctcagaagaattcctggaagaagaacctgaacagagagggattgaatttgaggatgaaagcagtgatagagatgcacggccagcactggaaacccagccacagcaagagaagcaagatggtgaaaaggaatctgaattagagcctatgaatggtgagataatggacgattctcttaagacctcacttataacagaagaggaagactccactagtgaagttttagatgaagaattaaaattgcagccttttaattccagtgaagactctacaaatcttgttccactggtggtagaatcttcaaaaccccctgaggtagatgcaccagataagaccccacgtatacctgactcagaaatgttgatggatgaaggcacatctgatgaaaaggggcacatggaagagaaattgtccctacttccaagaaagaaagcacatcttgggagttcagacaatgttgctactatgtcaaatgaagaacgatctgatggtggttttccaaactctgtgatagctgaattttccgaagaaccggtctctgagaatttgtctcctaatactacttcctcattggaagaccagggtgaggagggggtatctgagccccaggaaacatctactgctcttcctcagagttctttgatagaggttgaacttgaagacgtgccattttcacagaatgcaggacagaagaatcagtcagaggagcagtctgaagcatcttccgagcaactggatcagtttacacaatcggcagaaaaagctgtggatagcagctcagaggaaatagaagtggaagtgcctgtggtagacaggcggaatttaagaagaaaggccaaagggcataaaggacctgctaagaagaaagctaagctgacctgaaggaagaagaaagtggatgataaatcctcttctttgtaacatagttgttgtttttaaaatatggtaattaataaacagcatggggcacaggacaaaaatttccaaaatttcaatttgaacttacttactatgcagttttttgcttccctttagaacgtagaattcaccattgtttttaattttccaggctatttttggtaaatgcaattttttatttttattaaccatgtttcaattttgggaaaccagatcatattatattttctttatcaggtggtacatctgaccattatttcaaaaatataattaaaaagctgtgaaagtagtaggatttccattacttataaggatcacagaaatcttttatactaagggttttaatagtaaaacttggtgagggttctagaagttttaaatttcaaaactaatcaccaattttttaaaatgtaggcatgcctaaacaaaaataagtgtcaataaattagaaaaaatataacttcaagtaaatgagagcacaaaaacagaaacttacggtcaaaggttcatgaagatattttggttttggcctcttaatcctagatatagatgcagttttttcctttgacttcactatctatggaaaggtacacataaaatctgtttctgattcattctatcatctgatgttaacagtactgtcagggatttaactgtggcatgtggggactaattatttaaaatttcatttgaagtattagtttgctgtaattttttttgtctgcatatgtgcagacgcctagaagtttagactttcacctttaatcaggtaaaaatcacaactatactttggagacatggtttaatttggacttctggtcctgatcagatagataaattaagctggagattttacttttatcccaacccagttaacatctatatttcagaagtatgaggctccttcctaaggcatctccttaaatcttgccacctccctaattctacagtcttatttatattcccccacagctttcatctacttctgtaactcatggagtgattctccaatcaacagatcttcctgcctgccggcttatgcccttgatgtccatttttgggtaggtttggaggtgcaccccacaatgttagacctatatggcaggagtaaaactgcccccagtgttagacctatatggcaggggtaaactgcctttgggggagctgtggttacaagggcttcaatcatattggaggcttcaatcatcctttgatttgtactgagtactggttgcaagctggcctgttaagtatatattgtgttgccataacaaaggcctaggaaaatttgaagaaaaaaaacactgaactgttattttttgtaatttatttaaaaatggacaaaatggttattagaatccaaagataatctaaaaacagttctactctttggaaatattatgtgtactcaaatttgcacttaagttggagaatgttttgagaccatttaaattgttttaaaaatagcttgatcttgatccttatgcaaaagaaactaagactttgtgtcattatttgaggtagctaaggactgatgttgaaagtgtattcagtctatagtaagctgatgtcaggtcagtaaattttgtttggggatgttggtattttcgatcaagttaaaatcttaaagcagacaaaaatagtaaacgctcctatttgtgttagattttgaacaattgtattaccctatattttctttaattagtcaaaggtaagccagattatttcattctaaatgaaaattaaagcactttggccatttattttttcaacaaatgctaatactaagtaaaaaaaaaaaagtatgactactattagtgaatctaccaaacatttatgctgttttatacattttatgagaaacttctgtcaatatcacaaagggaaatactctgttaagattcagtaaattcttaatctttacatgtttcatttcttagatttgaaaacacttgtagatattttatttttacttggatttgtttaaaatactttcttttcaaattattttaaacatggaaacgcttcatgaatttgtgtcatccttgcacaggggccatgctaattttccctgtattgttctaattttagtatatgtgctgccgaagtgagcactaaaagactttctttagacaagtgtagttttttaaagattgagctcactggctcaactcttgatgtgtgaatatagttgagtttacaaaaaatgtttattaatcatatatgaccattgggggctaacagtataaacttattcttgttaaacttgtttgggttaaatagtaagtgaattgtaaacaatttagaagttttttgttcagcacacaagaacacttctgttacagattctctctgacagaaattgttattttggggtttatagattatagagggaaaagttagatcacttggaaaaacctaactctcatgttcagtaacttgagtatagaatttataccacaatttatcttcaataaggaacctacatgaacttaatcagttatctgtagtttttgcaaggcattagaaaaaatttcacaattacagaggactgaaaatgtgatttcaaccggctagtctagttgttgaatgtccagtcacattacacatagtcctttgtgaacttatttgtgaagggagttcactttttatgtacatacgtgtatatttccttgtgtaatataaagcagatggttattagtattttagttctttcaagtttaaattattcaattgctagacatcacagaaattagtatatttaagaatttattataaagctcctctacaacttttaaaggtgagagggtctattatgatttttttataaaatcaaacagcatgatttagaacgtcagtcttctacttaaaatgtgtctatattcatggtatttccattcagtgtagatggtaaggaaaacatctagtcattaaagatttacttatagcagactccagaacactacctacaatggggtttcagtgactagaaatcttgaaggtttatgattgcatcaaattgagcctgtactaatatctaaatatctgctcttatgttctgctttatcccttgggattaccttctaaggtttggtcacaccagcaaactgaaacagatcttaatgtacataaaaaatttatactaatattactcatctgtgttacagtattttgaaaaatgtttcaggtgtcatctagtcgtctttcatgggtgtgattagttacaaatgttatgcttatgttttcatacttaatatcaagctttctttgtaccttacaagatagtatttttggttctaaaaaaaacaagcaaacttcatttttgtagtatccagaaattacctggagtcagtatttttattcgccttctagaacttgtgatccacacatcacccatttatattagtggtaaaattatctgctaaaatctaattgtaagaaaggcttaccttctgtcatcaagtgattgtatcatcctggatcgtcatttccaaggaactagcctttcttttcctaagcgtctgtatgtgttctaaaacttccagtatatatttatagaacttagaaaaaatgttacattattcagagtagcaagtcttactggagtacctatgtttgttttcttggtttttatttttttttaagtttaaaagtagtaattaaacctatattttgtgattgtttcctggtctgtgtttttaaattcctttccttcagttttcctcatgaagatgtttcagatactgaatttgtttagacattgaatgactttgttaaaggcacaattaatcacattggttgtactctgaagacagacttctttaaaaaaaaaataaacaatttaaaacaa

SEQ ID NO: 132180 - DNA, 571 bp, Homo sapiens
  Payload ID: 5809
  Gene Symbol: FAM169A
  Gene Name: family with sequence similarity 169, member A
  ENST ID: ENST00000506954
  CDS Start-End: 314-571
attctccctcctctggaatgctggtcgttgcagttttgtcctaattgtgttctcagctctccattatgccatttttcaagaggcctgtgcctcaggaggtgaagccttgaaccctgggtggtttatggctcgggggtctggattacactgactcccatgactgtccttggggagaaaggatgaagcatctcactggcttttcagcgtctgggaagcggcgtgggtatcgtatcgggtggattcgaagataaccacctgatgcaggtcaccttcccccgctgggagagccgttcctaacgtaaattaaaacaggatggcattccctgtggatatgctggaaaattgcagccatgaggaattggaaaattctgctgaagattacatgtcagatttaaggtgtggggaccctgaaaatccagagtgtttttctcttctcaatattacgattcctattagcctgtcaaatgtaggctttgtacctctttatggtggagatcagacccagaaaattcttgctctctttgcacctgaagattcactgacagctgtggcactttaccttgctgatcag

SEQ ID NO: 132181 - DNA, 803 bp, Homo sapiens
  Payload ID: 5809
  Gene Symbol: FAM169A
  Gene Name: family with sequence similarity 169, member A
  ENST ID: ENST00000513277
  CDS Start-End: 136-803
cccacgattctaacttgcatgcacctaagtggcagtaggtttaggatgaaagtggtggggcggaggccggcggtcctcgcccgtgccctctgcacccctgtcccgaggccgggatggccgcgcccactctggaggatggcattccctgtggatatgctggaaaattgcagccatgaggaattggaaaattctgctgaagattacatgtcagatttaaggtgtggggaccctgaaaatccagagtgtttttctcttctcaatattacgattcctattagcctgtcaaatgtaggctttgtacctctttatggtggagatcagacccagaaaattcttgctctctttgcacctgaagattcactgacagctgtggcactttaccttgctgatcagtggtgggctattgatgatattgtgaaaacatctgttccttcaagagaggggcttaagcaggtgagcactcttggggagagagtggttctgtatgttctgaatcgaattatttatagaaaacaggaaatggagagaaatgagatcccattcctgtgtcatagcagtactgattatgctaagattctgtggaagaaaggagaggccattgggttttattcagttaagcctacaggaagcatatgtgcctcttttcttacccaaagttaccaattgccagttcttgatacaatgtttctaagaaagaaatacagaggtaaagattttgggcttcacatgctggaggactttgttgattcctttacagaagatgcgcttggcttgcggtatccactgtcttctctcatgtatac

SEQ ID NO: 132182 - DNA, 751 bp, Homo sapiens
  Payload ID: 5809
  Gene Symbol: FAM169A
  Gene Name: family with sequence similarity 169, member A
  ENST ID: ENST00000514200
  CDS Start-End: 227-751
agtgcgtcacgtcgtcggagggcacggtgggccgcggccgacccgcgacgaggagccgggcgtccggggcgagcgggaggcagccgcactcgccctggcagccgcgagctgtgcggcctgggaccggccggaggtcgccagcgagcagccgccggctccattcattcgcgcggctccgcctcctttcccgggctcttccagcggctcccggggcgcgtctgagaggatggcattccctgtggatatgctggaaaattgcagccatgaggaattggaaaattctgctgaagattacatgtcagatttaaggtgtggggaccctgaaaatccagagtgtttttctcttctcaatattacgattcctattagcctgtcaaatgtaggctttgtacctctttatggtggagatcagacccagaaaattcttgctctctttgcacctgaagattcactgacagctgtggcactttaccttgctgatcagtggtgggctattgatgatattgtgaaaacatctgttccttcaagagaggggcttaagcaggtgagcactcttggggagagagtggttctgtatgttctgaatcgaattatttatagaaaacaggaaatggagagaaatgagatcccattcctgtgtcatagcagtactgattatgctaagattctgtggaagaaaggagaggccattgggttttattcagttaagcctacaggaagcatatgtgcctcttttcttacccaaagttac

SEQ ID NO: 132183 - DNA, 5908 bp, Homo sapiens
  Payload ID: 5809
  Gene Symbol: FAM169A
  Gene Name: family with sequence similarity 169, member A
  Uniprot ID: Q9Y6X4
  ENST ID: ENST00000510609
  CDS Start-End: 184-567
cgcgacgaggagccgggcgtccggggcgagcgggaggcagccgcactcgccctggcagccgcgagctgtgcggcctgggaccggccggaggtcgccagcgagcagccgccggctccattcattcgcgcggctccgcctcctttcccgggctcttccagcggctcccggggcgcgtctgagaggatggcattccctgtggatatgctggaaaattgcagccatgaggaattggaaaattctgctgaagattacatgtcagatttaaggtgtggggaccctgaaaatccagagtgtttttctcttctcaatattacgattcctattagcctgtcaaatgtaggctttgtacctctttatggtggagatcagacccagaaaattcttgctctctttgcacctgaagattcactgacagctgtggcactttaccttgctgatcagtggtgggctattgatgatattgtgaaaacatctgttccttcaagagaggggcttaagcaggaagcatatgtgcctcttttcttacccaaagttaccaattgccagttcttgatacaatgtttctaagaaagaaatacagaggtaaagattttgggcttcacatgctggaggactttgttgattcctttacagaagatgcgcttggcttgcggtatccactgtcttctctcatgtatacagcttgcaagcaatactttgagaagtatccaggagaccatgaactcctttgggaagttgaaggtgttggacactggtaccagcgaataccagtcaccagagcattacaaagagaagcacttaaaattctagcactttctcaaaatgaacctaaaagacctatgtctggagaatatggtcctgcatctgttccagaatacgaagcaagaactgaagacaatcagtctagtgagatgcagctaactattgattctctaaaagatgcctttgcaagcacttccgaaggtcatgataaaacatctgtttccactcatactcgaagtggtaatctaaagcggccaaagattggaaagcggtttcaggattctgaatttagcagttctcaaggtgaagatgaaaagacctcccagacttcacttacagcttcaataaacaaattggagtctactgcacgcccatcagagagctcagaagaattcctggaagaagaacctgaacagagagggattgaatttgaggatgaaagcagtgatagagatgcacggccagcactggaaacccagccacagcaagagaagcaagatggtgaaaaggaatctgaattagagcctatgaatggtgagataatggacgattctcttaagacctcacttataacagaagaggaagactccactagtgaagttttagatgaagaattaaaattgcagccttttaattccagtgaagactctacaaatcttgttccactggtggtagaatcttcaaaaccccctgaggtagatgcaccagataagaccccacgtatacctgactcagaaatgttgatggatgaaggcacatctgatgaaaaggggcacatggaagagaaattgtccctacttccaagaaagaaagcacatcttgggagttcagacaatgttgctactatgtcaaatgaagaacgatctgatggtggttttccaaactctgtgatagctgaattttccgaagaaccggtctctgagaatttgtctcctaatactacttcctcattggaagaccagggtgaggagggggtatctgagccccaggaaacatctactgctcttcctcagagttctttgatagaggttgaacttgaagacgtgccattttcacagaatgcaggacagaagaatcagtcagaggagcagtctgaagcatcttccgagcaactggatcagtttacacaatcggcagaaaaagctgtggatagcagctcagaggaaatagaagtggaagtgcctgtggtagacaggcggaatttaagaagaaaggccaaagggcataaaggacctgctaagaagaaagctaagctgacctgaaggaagaagaaagtggatgataaatcctcttctttgtaacatagttgttgtttttaaaatatggtaattaataaacagcatggggcacaggacaaaaatttccaaaatttcaatttgaacttacttactatgcagttttttgcttccctttagaacgtagaattcaccattgtttttaattttccaggctatttttggtaaatgcaattttttatttttattaaccatgtttcaattttgggaaaccagatcatattatattttctttatcaggtggtacatctgaccattatttcaaaaatataattaaaaagctgtgaaagtagtaggatttccattacttataaggatcacagaaatcttttatactaagggttttaatagtaaaacttggtgagggttctagaagttttaaatttcaaaactaatcaccaattttttaaaatgtaggcatgcctaaacaaaaataagtgtcaataaattagaaaaaatataacttcaagtaaatgagagcacaaaaacagaaacttacggtcaaaggttcatgaagatattttggttttggcctcttaatcctagatatagatgcagttttttcctttgacttcactatctatggaaaggtacacataaaatctgtttctgattcattctatcatctgatgttaacagtactgtcagggatttaactgtggcatgtggggactaattatttaaaatttcatttgaagtattagtttgctgtaattttttttgtctgcatatgtgcagacgcctagaagtttagactttcacctttaatcaggtaaaaatcacaactatactttggagacatggtttaatttggacttctggtcctgatcagatagataaattaagctggagattttacttttatcccaacccagttaacatctatatttcagaagtatgaggctccttcctaaggcatctccttaaatcttgccacctccctaattctacagtcttatttatattcccccacagctttcatctacttctgtaactcatggagtgattctccaatcaacagatcttcctgcctgccggcttatgcccttgatgtccatttttgggtaggtttggaggtgcaccccacaatgttagacctatatggcaggagtaaaactgcccccagtgttagacctatatggcaggggtaaactgcctttgggggagctgtggttacaagggcttcaatcatattggaggcttcaatcatcctttgatttgtactgagtactggttgcaagctggcctgttaagtatatattgtgttgccataacaaaggcctaggaaaatttgaagaaaaaaaacactgaactgttattttttgtaatttatttaaaaatggacaaaatggttattagaatccaaagataatctaaaaacagttctactctttggaaatattatgtgtactcaaatttgcacttaagttggagaatgttttgagaccatttaaattgttttaaaaatagcttgatcttgatccttatgcaaaagaaactaagactttgtgtcattatttgaggtagctaaggactgatgttgaaagtgtattcagtctatagtaagctgatgtcaggtcagtaaattttgtttggggatgttggtattttcgatcaagttaaaatcttaaagcagacaaaaatagtaaacgctcctatttgtgttagattttgaacaattgtattaccctatattttctttaattagtcaaaggtaagccagattatttcattctaaatgaaaattaaagcactttggccatttattttttcaacaaatgctaatactaagtaaaaaaaaaaaagtatgactactattagtgaatctaccaaacatttatgctgttttatacattttatgagaaacttctgtcaatatcacaaagggaaatactctgttaagattcagtaaattcttaatctttacatgtttcatttcttagatttgaaaacacttgtagatattttatttttacttggatttgtttaaaatactttcttttcaaattattttaaacatggaaacgcttcatgaatttgtgtcatccttgcacaggggccatgctaattttccctgtattgttctaattttagtatatgtgctgccgaagtgagcactaaaagactttctttagacaagtgtagttttttaaagattgagctcactggctcaactcttgatgtgtgaatatagttgagtttacaaaaaatgtttattaatcatatatgaccattgggggctaacagtataaacttattcttgttaaacttgtttgggttaaatagtaagtgaattgtaaacaatttagaagttttttgttcagcacacaagaacacttctgttacagattctctctgacagaaattgttattttggggtttatagattatagagggaaaagttagatcacttggaaaaacctaactctcatgttcagtaacttgagtatagaatttataccacaatttatcttcaataaggaacctacatgaacttaatcagttatctgtagtttttgcaaggcattagaaaaaatttcacaattacagaggactgaaaatgtgatttcaaccggctagtctagttgttgaatgtccagtcacattacacatagtcctttgtgaacttatttgtgaagggagttcactttttatgtacatacgtgtatatttccttgtgtaatataaagcagatggttattagtattttagttctttcaagtttaaattattcaattgctagacatcacagaaattagtatatttaagaatttattataaagctcctctacaacttttaaaggtgagagggtctattatgatttttttataaaatcaaacagcatgatttagaacgtcagtcttctacttaaaatgtgtctatattcatggtatttccattcagtgtagatggtaaggaaaacatctagtcattaaagatttacttatagcagactccagaacactacctacaatggggtttcagtgactagaaatcttgaaggtttatgattgcatcaaattgagcctgtactaatatctaaatatctgctcttatgttctgctttatcccttgggattaccttctaaggtttggtcacaccagcaaactgaaacagatcttaatgtacataaaaaatttatactaatattactcatctgtgttacagtattttgaaaaatgtttcaggtgtcatctagtcgtctttcatgggtgtgattagttacaaatgttatgcttatgttttcatacttaatatcaagctttctttgtaccttacaagatagtatttttggttctaaaaaaaacaagcaaacttcatttttgtagtatccagaaattacctggagtcagtatttttattcgccttctagaacttgtgatccacacatcacccatttatattagtggtaaaattatctgctaaaatctaattgtaagaaaggcttaccttctgtcatcaagtgattgtatcatcctggatcgtcatttccaaggaactagcctttcttttcctaagcgtctgtatgtgttctaaaacttccagtatatatttatagaacttagaaaaaatgttacattattcagagtagcaagtcttactggagtacctatgtttgttttcttggtttttatttttttttaagtttaaaagtagtaattaaacctatattttgtgattgtttcctggtctgtgtttttaaattcctttccttcagttttcctcatgaagatgtttcagatactgaatttgtttagacattgaatgactttgttaaaggcacaattaatcacattggttgtactctgaagacagacttctttaaaaaaaaaataaacaatttaaaac

SEQ ID NO: 132184 - DNA, 5810 bp, Homo sapiens
  Payload ID: 5809
  Gene Symbol: FAM169A
  Gene Name: family with sequence similarity 169, member A
  ENST ID: ENST00000510496
  CDS Start-End: 92-1924
atggccgcgcccactctgggtaaatttcaggagggcctacgcggggctggagaactccaccgggctatgcgaacagaatcctgcgaagaggatggcattccctgtggatatgctggaaaattgcagccatgaggaattggaaaattctgctgaagattacatgtcagatttaaggtgtggggaccctgaaaatccagagtgtttttctcttctcaatattacgattcctattagcctgtcaaatgtaggctttgtacctctttatggtggagatcagacccagaaaattcttgctctctttgcacctgaagattcactgacagctgtggcactttaccttgctgatcagtggtgggctattgatgatattgtgaaaacatctgttccttcaagagaggggcttaagcaggtgagcactcttggggagagagtggttctgtatgttctgaatcgaattatttatagaaaacaggaaatggagagaaatgagatcccattcctgtgtcatagcagtactgattatgctaagattctgtggaagaaaggagaggccattgggttttattcagttaagcctacagcttgcaagcaatactttgagaagtatccaggagaccatgaactcctttgggaagttgaaggtgttggacactggtaccagcgaataccagtcaccagagcattacaaagagaagcacttaaaattctagcactttctcaaaatgaacctaaaagacctatgtctggagaatatggtcctgcatctgttccagaatacgaagcaagaactgaagacaatcagtctagtgagatgcagctaactattgattctctaaaagatgcctttgcaagcacttccgaaggtcatgataaaacatctgtttccactcatactcgaagtggtaatctaaagcggccaaagattggaaagcggtttcaggattctgaatttagcagttctcaaggtgaagatgaaaagacctcccagacttcacttacagcttcaataaacaaattggagtctactgcacgcccatcagagagctcagaagaattcctggaagaagaacctgaacagagagggattgaatttgaggatgaaagcagtgatagagatgcacggccagcactggaaacccagccacagcaagagaagcaagatggtgaaaaggaatctgaattagagcctatgaatggtgagataatggacgattctcttaagacctcacttataacagaagaggaagactccactagtgaagttttagatgaagaattaaaattgcagccttttaattccagtgaagactctacaaatcttgttccactggtggtagaatcttcaaaaccccctgaggtagatgcaccagataagaccccacgtatacctgactcagaaatgttgatggatgaaggcacatctgatgaaaaggggcacatggaagagaaattgtccctacttccaagaaagaaagcacatcttgggagttcagacaatgttgctactatgtcaaatgaagaacgatctgatggtggttttccaaactctgtgatagctgaattttccgaagaaccggtctctgagaatttgtctcctaatactacttcctcattggaagaccagggtgaggagggggtatctgagccccaggaaacatctactgctcttcctcagagttctttgatagaggttgaacttgaagacgtgccattttcacagaatgcaggacagaagaatcagtcagaggagcagtctgaagcatcttccgagcaactggatcagtttacacaatcggcagaaaaagctgtggatagcagctcagaggaaatagaagtggaagtgcctgtggtagacaggcggaatttaagaagaaaggccaaagggcataaaggacctgctaagaagaaagctaagctgacctgaaggaagaagaaagtggatgataaatcctcttctttgtaacatagttgttgtttttaaaatatggtaattaataaacagcatggggcacaggacaaaaatttccaaaatttcaatttgaacttacttactatgcagttttttgcttccctttagaacgtagaattcaccattgtttttaattttccaggctatttttggtaaatgcaattttttatttttattaaccatgtttcaattttgggaaaccagatcatattatattttctttatcaggtggtacatctgaccattatttcaaaaatataattaaaaagctgtgaaagtagtaggatttccattacttataaggatcacagaaatcttttatactaagggttttaatagtaaaacttggtgagggttctagaagttttaaatttcaaaactaatcaccaattttttaaaatgtaggcatgcctaaacaaaaataagtgtcaataaattagaaaaaatataacttcaagtaaatgagagcacaaaaacagaaacttacggtcaaaggttcatgaagatattttggttttggcctcttaatcctagatatagatgcagttttttcctttgacttcactatctatggaaaggtacacataaaatctgtttctgattcattctatcatctgatgttaacagtactgtcagggatttaactgtggcatgtggggactaattatttaaaatttcatttgaagtattagtttgctgtaattttttttgtctgcatatgtgcagacgcctagaagtttagactttcacctttaatcaggtaaaaatcacaactatactttggagacatggtttaatttggacttctggtcctgatcagatagataaattaagctggagattttacttttatcccaacccagttaacatctatatttcagaagtatgaggctccttcctaaggcatctccttaaatcttgccacctccctaattctacagtcttatttatattcccccacagctttcatctacttctgtaactcatggagtgattctccaatcaacagatcttcctgcctgccggcttatgcccttgatgtccatttttgggtaggtttggaggtgcaccccacaatgttagacctatatggcaggagtaaaactgcccccagtgttagacctatatggcaggggtaaactgcctttgggggagctgtggttacaagggcttcaatcatattggaggcttcaatcatcctttgatttgtactgagtactggttgcaagctggcctgttaagtatatattgtgttgccataacaaaggcctaggaaaatttgaagaaaaaaaacactgaactgttattttttgtaatttatttaaaaatggacaaaatggttattagaatccaaagataatctaaaaacagttctactctttggaaatattatgtgtactcaaatttgcacttaagttggagaatgttttgagaccatttaaattgttttaaaaatagcttgatcttgatccttatgcaaaagaaactaagactttgtgtcattatttgaggtagctaaggactgatgttgaaagtgtattcagtctatagtaagctgatgtcaggtcagtaaattttgtttggggatgttggtattttcgatcaagttaaaatcttaaagcagacaaaaatagtaaacgctcctatttgtgttagattttgaacaattgtattaccctatattttctttaattagtcaaaggtaagccagattatttcattctaaatgaaaattaaagcactttggccatttattttttcaacaaatgctaatactaagtaaaaaaaaaaaagtatgactactattagtgaatctaccaaacatttatgctgttttatacattttatgagaaacttctgtcaatatcacaaagggaaatactctgttaagattcagtaaattcttaatctttacatgtttcatttcttagatttgaaaacacttgtagatattttatttttacttggatttgtttaaaatactttcttttcaaattattttaaacatggaaacgcttcatgaatttgtgtcatccttgcacaggggccatgctaattttccctgtattgttctaattttagtatatgtgctgccgaagtgagcactaaaagactttctttagacaagtgtagttttttaaagattgagctcactggctcaactcttgatgtgtgaatatagttgagtttacaaaaaatgtttattaatcatatatgaccattgggggctaacagtataaacttattcttgttaaacttgtttgggttaaatagtaagtgaattgtaaacaatttagaagttttttgttcagcacacaagaacacttctgttacagattctctctgacagaaattgttattttggggtttatagattatagagggaaaagttagatcacttggaaaaacctaactctcatgttcagtaacttgagtatagaatttataccacaatttatcttcaataaggaacctacatgaacttaatcagttatctgtagtttttgcaaggcattagaaaaaatttcacaattacagaggactgaaaatgtgatttcaaccggctagtctagttgttgaatgtccagtcacattacacatagtcctttgtgaacttatttgtgaagggagttcactttttatgtacatacgtgtatatttccttgtgtaatataaagcagatggttattagtattttagttctttcaagtttaaattattcaattgctagacatcacagaaattagtatatttaagaatttattataaagctcctctacaacttttaaaggtgagagggtctattatgatttttttataaaatcaaacagcatgatttagaacgtcagtcttctacttaaaatgtgtctatattcatggtatttccattcagtgtagatggtaaggaaaacatctagtcattaaagatttacttatagcagactccagaacactacctacaatggggtttcagtgactagaaatcttgaaggtttatgattgcatcaaattgagcctgtactaatatctaaatatctgctcttatgttctgctttatcccttgggattaccttctaaggtttggtcacaccagcaaactgaaacagatcttaatgtacataaaaaatttatactaatattactcatctgtgttacagtattttgaaaaatgtttcaggtgtcatctagtcgtctttcatgggtgtgattagttacaaatgttatgcttatgttttcatacttaatatcaagctttctttgtaccttacaagatagtatttttggttctaaaaaaaacaagcaaacttcatttttgtagtatccagaaattacctggagtcagtatttttattcgccttctagaacttgtgatccacacatcacccatttatattagtggtaaaattatctgctaaaatctaattgtaagaaaggcttaccttctgtcatcaagtgattgtatcatcctggatcgtcatttccaaggaactagcctttcttttcctaagcgtctgtatgtgttctaaaacttccagtatatatttatagaacttagaaaaaatgttacattattcagagtagcaagtcttactggagtacctatgtttgttttcttggtttttatttttttttaagtttaaaagtagtaattaaacctatattttgtgattgtttcctggtctgtgtttttaaattcctttccttcagttttcctcatgaagatgtttcagatactgaatttgtttagacattgaatgactttgttaaaggcacaattaatcacattggttgtactctgaagacagacttctttaaaaaaaaaataaacaatttaaaacaa

SEQ ID NO: 132185 - DNA, 5954 bp, Homo sapiens
  Payload ID: 5809
  Gene Symbol: FAM169A
  Gene Name: family with sequence similarity 169, member A
  Uniprot ID: Q9Y6X4
  ENST ID: ENST00000514215
  CDS Start-End: 228-611
tagcaacctatatttctctctggaactttaccacccttccgctgcctctctaaactatagtagcagaaccactgttaggcttgcaatttacatagtcttaaattaaccaagactcaaaaacaaacaaaaaaaacaattccaagcatttagaggtgaaaaggtctttaggattatcctgtccagttgcatcacgttaccaatgagagtacagaagcctaaagaggaggatggcattccctgtggatatgctggaaaattgcagccatgaggaattggaaaattctgctgaagattacatgtcagatttaaggtgtggggaccctgaaaatccagagtgtttttctcttctcaatattacgattcctattagcctgtcaaatgtaggctttgtacctctttatggtggagatcagacccagaaaattcttgctctctttgcacctgaagattcactgacagctgtggcactttaccttgctgatcagtggtgggctattgatgatattgtgaaaacatctgttccttcaagagaggggcttaagcaggaagcatatgtgcctcttttcttacccaaagttaccaattgccagttcttgatacaatgtttctaagaaagaaatacagaggtaaagattttgggcttcacatgctggaggactttgttgattcctttacagaagatgcgcttggcttgcggtatccactgtcttctctcatgtatacagcttgcaagcaatactttgagaagtatccaggagaccatgaactcctttgggaagttgaaggtgttggacactggtaccagcgaataccagtcaccagagcattacaaagagaagcacttaaaattctagcactttctcaaaatgaacctaaaagacctatgtctggagaatatggtcctgcatctgttccagaatacgaagcaagaactgaagacaatcagtctagtgagatgcagctaactattgattctctaaaagatgcctttgcaagcacttccgaaggtcatgataaaacatctgtttccactcatactcgaagtggtaatctaaagcggccaaagattggaaagcggtttcaggattctgaatttagcagttctcaaggtgaagatgaaaagacctcccagacttcacttacagcttcaataaacaaattggagtctactgcacgcccatcagagagctcagaagaattcctggaagaagaacctgaacagagagggattgaatttgaggatgaaagcagtgatagagatgcacggccagcactggaaacccagccacagcaagagaagcaagatggtgaaaaggaatctgaattagagcctatgaatggtgagataatggacgattctcttaagacctcacttataacagaagaggaagactccactagtgaagttttagatgaagaattaaaattgcagccttttaattccagtgaagactctacaaatcttgttccactggtggtagaatcttcaaaaccccctgaggtagatgcaccagataagaccccacgtatacctgactcagaaatgttgatggatgaaggcacatctgatgaaaaggggcacatggaagagaaattgtccctacttccaagaaagaaagcacatcttgggagttcagacaatgttgctactatgtcaaatgaagaacgatctgatggtggttttccaaactctgtgatagctgaattttccgaagaaccggtctctgagaatttgtctcctaatactacttcctcattggaagaccagggtgaggagggggtatctgagccccaggaaacatctactgctcttcctcagagttctttgatagaggttgaacttgaagacgtgccattttcacagaatgcaggacagaagaatcagtcagaggagcagtctgaagcatcttccgagcaactggatcagtttacacaatcggcagaaaaagctgtggatagcagctcagaggaaatagaagtggaagtgcctgtggtagacaggcggaatttaagaagaaaggccaaagggcataaaggacctgctaagaagaaagctaagctgacctgaaggaagaagaaagtggatgataaatcctcttctttgtaacatagttgttgtttttaaaatatggtaattaataaacagcatggggcacaggacaaaaatttccaaaatttcaatttgaacttacttactatgcagttttttgcttccctttagaacgtagaattcaccattgtttttaattttccaggctatttttggtaaatgcaattttttatttttattaaccatgtttcaattttgggaaaccagatcatattatattttctttatcaggtggtacatctgaccattatttcaaaaatataattaaaaagctgtgaaagtagtaggatttccattacttataaggatcacagaaatcttttatactaagggttttaatagtaaaacttggtgagggttctagaagttttaaatttcaaaactaatcaccaattttttaaaatgtaggcatgcctaaacaaaaataagtgtcaataaattagaaaaaatataacttcaagtaaatgagagcacaaaaacagaaacttacggtcaaaggttcatgaagatattttggttttggcctcttaatcctagatatagatgcagttttttcctttgacttcactatctatggaaaggtacacataaaatctgtttctgattcattctatcatctgatgttaacagtactgtcagggatttaactgtggcatgtggggactaattatttaaaatttcatttgaagtattagtttgctgtaattttttttgtctgcatatgtgcagacgcctagaagtttagactttcacctttaatcaggtaaaaatcacaactatactttggagacatggtttaatttggacttctggtcctgatcagatagataaattaagctggagattttacttttatcccaacccagttaacatctatatttcagaagtatgaggctccttcctaaggcatctccttaaatcttgccacctccctaattctacagtcttatttatattcccccacagctttcatctacttctgtaactcatggagtgattctccaatcaacagatcttcctgcctgccggcttatgcccttgatgtccatttttgggtaggtttggaggtgcaccccacaatgttagacctatatggcaggagtaaaactgcccccagtgttagacctatatggcaggggtaaactgcctttgggggagctgtggttacaagggcttcaatcatattggaggcttcaatcatcctttgatttgtactgagtactggttgcaagctggcctgttaagtatatattgtgttgccataacaaaggcctaggaaaatttgaagaaaaaaaacactgaactgttattttttgtaatttatttaaaaatggacaaaatggttattagaatccaaagataatctaaaaacagttctactctttggaaatattatgtgtactcaaatttgcacttaagttggagaatgttttgagaccatttaaattgttttaaaaatagcttgatcttgatccttatgcaaaagaaactaagactttgtgtcattatttgaggtagctaaggactgatgttgaaagtgtattcagtctatagtaagctgatgtcaggtcagtaaattttgtttggggatgttggtattttcgatcaagttaaaatcttaaagcagacaaaaatagtaaacgctcctatttgtgttagattttgaacaattgtattaccctatattttctttaattagtcaaaggtaagccagattatttcattctaaatgaaaattaaagcactttggccatttattttttcaacaaatgctaatactaagtaaaaaaaaaaaagtatgactactattagtgaatctaccaaacatttatgctgttttatacattttatgagaaacttctgtcaatatcacaaagggaaatactctgttaagattcagtaaattcttaatctttacatgtttcatttcttagatttgaaaacacttgtagatattttatttttacttggatttgtttaaaatactttcttttcaaattattttaaacatggaaacgcttcatgaatttgtgtcatccttgcacaggggccatgctaattttccctgtattgttctaattttagtatatgtgctgccgaagtgagcactaaaagactttctttagacaagtgtagttttttaaagattgagctcactggctcaactcttgatgtgtgaatatagttgagtttacaaaaaatgtttattaatcatatatgaccattgggggctaacagtataaacttattcttgttaaacttgtttgggttaaatagtaagtgaattgtaaacaatttagaagttttttgttcagcacacaagaacacttctgttacagattctctctgacagaaattgttattttggggtttatagattatagagggaaaagttagatcacttggaaaaacctaactctcatgttcagtaacttgagtatagaatttataccacaatttatcttcaataaggaacctacatgaacttaatcagttatctgtagtttttgcaaggcattagaaaaaatttcacaattacagaggactgaaaatgtgatttcaaccggctagtctagttgttgaatgtccagtcacattacacatagtcctttgtgaacttatttgtgaagggagttcactttttatgtacatacgtgtatatttccttgtgtaatataaagcagatggttattagtattttagttctttcaagtttaaattattcaattgctagacatcacagaaattagtatatttaagaatttattataaagctcctctacaacttttaaaggtgagagggtctattatgatttttttataaaatcaaacagcatgatttagaacgtcagtcttctacttaaaatgtgtctatattcatggtatttccattcagtgtagatggtaaggaaaacatctagtcattaaagatttacttatagcagactccagaacactacctacaatggggtttcagtgactagaaatcttgaaggtttatgattgcatcaaattgagcctgtactaatatctaaatatctgctcttatgttctgctttatcccttgggattaccttctaaggtttggtcacaccagcaaactgaaacagatcttaatgtacataaaaaatttatactaatattactcatctgtgttacagtattttgaaaaatgtttcaggtgtcatctagtcgtctttcatgggtgtgattagttacaaatgttatgcttatgttttcatacttaatatcaagctttctttgtaccttacaagatagtatttttggttctaaaaaaaacaagcaaacttcatttttgtagtatccagaaattacctggagtcagtatttttattcgccttctagaacttgtgatccacacatcacccatttatattagtggtaaaattatctgctaaaatctaattgtaagaaaggcttaccttctgtcatcaagtgattgtatcatcctggatcgtcatttccaaggaactagcctttcttttcctaagcgtctgtatgtgttctaaaacttccagtatatatttatagaacttagaaaaaatgttacattattcagagtagcaagtcttactggagtacctatgtttgttttcttggtttttatttttttttaagtttaaaagtagtaattaaacctatattttgtgattgtttcctggtctgtgtttttaaattcctttccttcagttttcctcatgaagatgtttcagatactgaatttgtttagacattgaatgactttgttaaaggcacaattaatcacattggttgtactctgaagacagacttctttaaaaaaaaaataaacaatttaaaacaa

SEQ ID NO: 132186 - DNA, 576 bp, Homo sapiens
  Payload ID: 5810
  Gene Symbol: FAM169B
  Gene Name: family with sequence similarity 169, member B
  ENST ID: ENST00000332908
  CDS Start-End: 1-576
aaggttcagtcgtttggggaaagggttgtgcttttcattctaaacgccattatttttggaagattggagagaaatttggatgatgatgacatgttttttctacctcactctgtgaaggaacaagctaaaatcctgtggagacgtggagcggctgttgggttttacacaaccaagatgaaaggcagactgtgtggtgatggcaccggtgcatgctacctgctgcctgtctttgacaccgtgttcatcaggaggaaacactggcaccgaggcttgggaacagccatgctgcgggacttctgtgagacattcccagaggacgaggccctgggggttagctgctcgatgtctcctgccatgtaccaagcacacccaggaaattccgaggacgtgagccgtcatgcgaggacttctcagaatgacagacccagacagcctgcccctggagacggcagcaaggagaggatgtgtggagaagaactggaagacacaaaggatgatccagagtgtggagtggaagaggaggatgccgggctggcagggcagccaccaggcaagcttacaaggtccagtccctga

SEQ ID NO: 132187 - DNA, 3298 bp, Homo sapiens
  Payload ID: 5810
  Gene Symbol: FAM169B
  Gene Name: family with sequence similarity 169, member B
  Uniprot ID: Q8N8A8
  ENST ID: ENST00000558256
  CDS Start-End: 251-829
aactccgcaagcaaatgaaaaacatcctggaattgtgaattcccctgtggcaagtggttatcgttcgtggtggcagtctgctgttacgagcataataggatgaatatggactttgacgtcagatggagctgacttggaatcctggctctgccagctgactggcagaggggttgtggctgtttacataaaggaatcctggtgctccacggaagatgcactaagaacctctgatcctgcaagagaagggttgatgaaggttcagtcgtttggggaaagggttgtgcttttcattctaaacgccattatttttggaagattggagagaaatttggatgatgatgacatgttttttctacctcactctgtgaaggaacaagctaaaatcctgtggagacgtggagcggctgttgggttttacacaaccaagatgaaaggcagactgtgtggtgatggcaccggtgcatgctacctgctgcctgtctttgacaccgtgttcatcaggaggaaacactggcaccgaggcttgggaacagccatgctgcgggacttctgtgagacattcccagaggacgaggccctgggggttagctgctcgatgtctcctgccatgtaccaagcacacccaggaaattccgaggacgtgagccgtcatgcgaggacttctcagaatgacagacccagacagcctgcccctggagacggcagcaaggagaggatgtgtggagaagaactggaagacacaaaggatgatccagagtgtggagtggaagaggaggatgccgggctggcagggcagccaccaggcaagcttacaaggtccagtccctgacgtctccagacgcccatctgggccaggtccagaggcctgcctgggctcccaggattcgggtctgagacttgtgtgtctgggagtgtaccttccctggggatctttgaggggccagtgaccccacgggccccacctacctctgaggtgggctcaggctctagagtacctgagaacgtgctgcgctcagcatgcgacaccgtgccacagtgaggaagtatttccctaagttaattgttgacagttcctaaacgtttcagaagcttactcgttaaaactaatgtggtttctgtttctcaggataaattggtgggactttaccggaaccacagggatgttttactgaatgtacctctttccttatagaagtttaaagatgctcaggaaggggccacacccgttccatctgggctgtagaaacccattgcaggtttgtgcatgccagccctgctgttgccgtgagaccacggacaccaaagaggtttgcaggggtacacgtgtcctttccggacaccaaagaggtttgcaggggtacacgtgtcctttcccgggaggcttcagccacatcagtgctgatgtgcctcaaggcacatgagtgccttgagggcaggggcagtggctggatggtgcctactgtaggcctggagctctcttctggcctggtatacagaaggcactcagagagctcatatgggaagtactgggtaggaatttgggcagatggtgcttctagaatattggtggccttgagtggaaagtcttgtggtagtaaaagtaactgaaaatgatagcctggctcgaatgtgacattggcttcccccttctcaaatactgatggagccctgtttggtcgctatagtgtatggccgctcttgggatgcagagacaaggacctgctcttaggccccaggtccaatgggctaggcagagttgtcccagggccgcctgccctcctcaagggtggggcgcaaatccaggctgctttagggagcccaaagcctgctccccgagaggtggggtggtgctttctctgctattgggcccagccttgctgatttcagtaggatttttcccagagaaagctggtcaggccctcttgaggcagacgacccaagttcttgcccctgcttttgggaaaatgcaaatccaatcccattgccgaggacatcccaaacccctctgtgctcatcactgactttggagaagccaggggccctgctgcctctgctccttgccattggagttcagctgcaggatcagccctgggctgcctggttactttgttgacagaagaagagggttttacctttttaggatgtaataaagcccctcctgtggcctgatgaggagactaccaacagtcccaagttctgggaatatatcgtctgttcccttgagcagtcaaaggacacacatggtgggacctgttatttattcatccatgcacccagctgtccatctctctgtccatccatccgtctatccatccatcatccatccatccacctaaccatccatctattcaatccattcatcatccatctatccatccctccatccatccattcatccatctatccatccatcatccgtccatcctccatccatcatccatccatccatcctccatccatcatccatccatccatccatccatccatcctccatccatcttccatccatccatcctccatccatccatctatccatccatccacccatccatccatccatccacccatccatcatccatccatccatcctccatcttccatccatccatccatccatccatccttcatccagccatccatctatccatacatttatcatccatccatccatcatccatccgtccatcctccatccatccattcatcctctatccatccatcatccatccatccatccatccacccatcctccatccatccatccatcctccatccgtcatccatccgtccatccatccatccatccattctgttgtacaacagatattcagcatgctttctcagggacatgctctgtgctggggacaggggatataagtgaggtatggatactggcctcaggaaactctcttctctttggaggaatctcttctggagtgttccactggagttttcatctctcttgcacccattacaaagatggaagggtccaattgactagaaatatagtttagagattcatatggagacatcatgaagcctgcctcccccctgccccttatacttgggctctctgtgcaggtggcacagaccataaaaggagagtgaagtctacagcctagagggtgccctgtgtgtggtgtcagatgtaacctttcacatgggatgtgtgtgctgtgagcattgtgctatttgagatgaatggttagtattttgtgtttacatgaaaataaatgtttaaaaatgtctcaggggtttgatgaagttactattcaataaaagaaacctctcagggaag

SEQ ID NO: 132188 - DNA, 1336 bp, Homo sapiens
  Payload ID: 5811
  Gene Symbol: FAM170A
  Gene Name: family with sequence similarity 170, member A
  Uniprot ID: A1A519
  ENST ID: ENST00000335286
  CDS Start-End: 172-1161
gctgctccttcactaagcggtctgagttctttagctatctcggagattcaactacgtttactcgtactgaatctttttaatgaatttcctgagagccaagaagggccaatctacaggaaaaagtgggaggtggacattaagcatcttctagaaactcttctagctgatatcatgaaacgacgacaaaagaggaaacatttggaaaatgaagagtcccaggaaaccgctgagaagggaggaggaatgtcaaagtcccaagaggatgccctgcagcctggatccactagagtggccaaaggctggagccaaggggtgggagaagttacttctacctccgaatactgctcctgcgtttcttcttcacgcaagctcatccacagtggaatccagagaatacatcgagacagcccccagcctcaatcacccctggcccaggttcaggaacgaggagagactcctccccgctcacaacatgtctccttgtcgtcctattcatcctataagacttgtgtgtcctctctgtgtgtaaacaaagaggaaaggggcatgaaaatatactacatgcaggtacaaatgaacaaaggtgtggctgtctcctgggagacagaggaaactttggagtccttagaaaagcagccaaggatggaagaagtgaccctttctgaggttgtgagggtaggtactcccccctctgatgtgtccaccagaaacctcctgtctgacagtgagcccagtggggaggagaaagagcatgaggaaaggacagaatcagacagcctgccaggctcacccaccgttgaggacacacccagagccaagactcctgactggctggtgaccatggagaacggcttcaggtgcatggcctgctgccgggtgttcaccaccatggaagccctccaggagcatgtgcagtttgggatcagagagggcttcagctgccacgtctttcatctcaccatggctcagctgacaggcaacatggaatcagagagcacccaagatgagcaggaggaggaaaatggaaatgagaaggaggaggaagagaaaccagaagcaaaggaggaggaggggcagcccacagaagaagaccttggcctgaggagatcctggagccaatgtccaggctgtgtgtttcattctccaaaggacaggaactgagacttatgggccagaagatactggaagatggtgtggccttctcttgcaagagggagaagaaagagccatggagatagtagcagacaggctgcccaaggtatgaagcagatgagggaccagcactcagtctaacatgtaaacatcatacgtaataaaggttgtgtttcaaacctta

SEQ ID NO: 132189 - DNA, 1234 bp, Homo sapiens
  Payload ID: 5811
  Gene Symbol: FAM170A
  Gene Name: family with sequence similarity 170, member A
  Uniprot ID: A1A519
  ENST ID: ENST00000379555
  CDS Start-End: 211-1059
aaccttaacagccctgcagtgtagtgggcactgggcagtgctgctccttcactaagcggtctgagttctttagctatctcggagattcaactacgtttactcgtactgaatctttttaatgaatttcctgagagccaagaagggccaatctacaggaaaaagtgggaggtggacattaagcatcttctagaaactcttctagctgatatcatgaaacgacgacaaaagaggaaacatttggaaaatgaagagtcccaggaaaccgctgagaagggaggaggaatccagagaatacatcgagacagcccccagcctcaatcacccctggcccaggttcaggaacgaggagagactcctccccgctcacaacatgtctccttgtcgtcctattcatcctataagacttgtgtgtcctctctgtgtgtaaacaaagaggaaaggggcatgaaaatatactacatgcaggtacaaatgaacaaaggtgtggctgtctcctgggagacagaggaaactttggagtccttagaaaagcagccaaggatggaagaagtgaccctttctgaggttgtgagggtaggtactcccccctctgatgtgtccaccagaaacctcctgtctgacagtgagcccagtggggaggagaaagagcatgaggaaaggacagaatcagacagcctgccaggctcacccaccgttgaggacacacccagagccaagactcctgactggctggtgaccatggagaacggcttcaggtgcatggcctgctgccgggtgttcaccaccatggaagccctccaggagcatgtgcagtttgggatcagagagggcttcagctgccacgtctttcatctcaccatggctcagctgacaggcaacatggaatcagagagcacccaagatgagcaggaggaggaaaatggaaatgagaaggaggaggaagagaaaccagaagcaaaggaggaggaggggcagcccacagaagaagaccttggcctgaggagatcctggagccaatgtccaggctgtgtgtttcattctccaaaggacaggaactgagacttatgggccagaagatactggaagatggtgtggccttctcttgcaagagggagaagaaagagccatggagatagtagcagacaggctgcccaaggtatgaagcagatgagggaccagcactcagtctaacatgtaaacatcatacgtaataaaggttgtgtttcaaacctta

SEQ ID NO: 132190 - DNA, 1213 bp, Homo sapiens
  Payload ID: 5811
  Gene Symbol: FAM170A
  Gene Name: family with sequence similarity 170, member A
  Uniprot ID: A1A519
  ENST ID: ENST00000515256
  CDS Start-End: 173-1165
tgctgctccttcactaagcggtctgagttctttagctatctcggagattcaactacgtttactcgtactgaatctttttaatgaatttcctgagagccaagaagggccaatctacaggaaaaagtgggaggtggacattaagcatcttctagaaactcttctagctgatatcatgaaacgacgacaaaagaggaaacatttggaaaatgaagagtcccaggaaaccgctgagaagggaggaggaatgtcaaagtcccaagaggatgccctgcagcctggatccactagagtggccaaaggctggagccaaggggtgggagaagttacttctacctccgaatactgctcctgcgtttcttcttcacgcaagctcatccacagtggaatccagagaatacatcgagacagcccccagcctcaatcacccctggcccaggttcaggaacgaggagagactcctccccgctcacaacatgtctccttgtcgtcctattcatcctataagacttgtgtgtcctctctgtgtgtaaacaaagaggaaaggggcatgaaaatatactacatgcaggtacaaatgaacaaaggtgtggctgtctcctgggagacagaggaaactttggagtccttagaaaagcagccaaggatggaagaagtgaccctttctgaggttgtgagggtaggtactcccccctctgatgtgtccaccagaaacctcctgtctgacagtgagcccagtggggaggagaaagagcatgaggaaaggacagaatcagacagcctgccaggctcacccaccgttgaggacacacccagagccaagactcctgactggctggtgaccatggagaacggcttcaggtgcatggcctgctgccgggtgttcaccaccatggaagccctccaggagcatgtgcagtttgggatcagagagggcttcagctgccacgtctttcatctcaccatggctcagctgacaggcaacatggaatcagagagcacccaagatgagcaggaggaggaaaatggaaatgagaaggaggaggaagagaaaccagaagcaaaggaggaggaggggcagcccacagaagaagaccttggcctgaggagatcctggagccaatgtccaggctgtgtgtttcattctccaaaggacaggaacagctgagacttatgggccagaagatactggaagatggtgtggccttctcttgca

SEQ ID NO: 132191 - DNA, 642 bp, Homo sapiens
  Payload ID: 5811
  Gene Symbol: FAM170A
  Gene Name: family with sequence similarity 170, member A
  ENST ID: ENST00000509264
  CDS Start-End: 84-642
ctgagagccaagaagggccaatctacaggaaaaagtgggaggtggacattaagcatcttctagaaactcttctagctgatatcatgaaacgacgacaaaagaggaaacatttggaaaatgaagagtcccaggaaaccgctgagaagggaggaggaatgtcaaagtcccaagaggatgccctgcagcctggatccactagagtggccaaaggctggagccaaggggtgggagaagttacttctacctccgaatactgctcctgcgtttcttcttcacgcaagctcatccacagtggaatccagagaatacatcgagacagcccccagcctcaatcacccctggcccaggttcaggaacgaggagagactcctccccgctcacaacatgtctccttgtcgtcctattcatcctataagacttgtgtgtcctctctgtgtgtaaacaaagaggaaaggggcatgaaaatatactacatgcaggtacaaatgaacaaaggtgtggctgtctcctgggagacagaggaaactttggagtccttagaaaagcagccaaggatggaagaagtgaccctttctgaggttgtgaggcagctgagacttatgggccagaagatactggaagatggtgtggccttctcttgca

SEQ ID NO: 132192 - DNA, 1237 bp, Homo sapiens
  Payload ID: 5811
  Gene Symbol: FAM170A
  Gene Name: family with sequence similarity 170, member A
  ENST ID: ENST00000504819
  CDS Start-End: 211-1062
aaccttaacagccctgcagtgtagtgggcactgggcagtgctgctccttcactaagcggtctgagttctttagctatctcggagattcaactacgtttactcgtactgaatctttttaatgaatttcctgagagccaagaagggccaatctacaggaaaaagtgggaggtggacattaagcatcttctagaaactcttctagctgatatcatgaaacgacgacaaaagaggaaacatttggaaaatgaagagtcccaggaaaccgctgagaagggaggaggaatccagagaatacatcgagacagcccccagcctcaatcacccctggcccaggttcaggaacgaggagagactcctccccgctcacaacatgtctccttgtcgtcctattcatcctataagacttgtgtgtcctctctgtgtgtaaacaaagaggaaaggggcatgaaaatatactacatgcaggtacaaatgaacaaaggtgtggctgtctcctgggagacagaggaaactttggagtccttagaaaagcagccaaggatggaagaagtgaccctttctgaggttgtgagggtaggtactcccccctctgatgtgtccaccagaaacctcctgtctgacagtgagcccagtggggaggagaaagagcatgaggaaaggacagaatcagacagcctgccaggctcacccaccgttgaggacacacccagagccaagactcctgactggctggtgaccatggagaacggcttcaggtgcatggcctgctgccgggtgttcaccaccatggaagccctccaggagcatgtgcagtttgggatcagagagggcttcagctgccacgtctttcatctcaccatggctcagctgacaggcaacatggaatcagagagcacccaagatgagcaggaggaggaaaatggaaatgagaaggaggaggaagagaaaccagaagcaaaggaggaggaggggcagcccacagaagaagaccttggcctgaggagatcctggagccaatgtccaggctgtgtgtttcattctccaaaggacaggaacagctgagacttatgggccagaagatactggaagatggtgtggccttctcttgcaagagggagaagaaagagccatggagatagtagcagacaggctgcccaaggtatgaagcagatgagggaccagcactcagtctaacatgtaaacatcatacgtaataaaggttgtgtttcaaacctta

SEQ ID NO: 132193 - DNA, 1374 bp, Homo sapiens
  Payload ID: 5811
  Gene Symbol: FAM170A
  Gene Name: family with sequence similarity 170, member A
  Uniprot ID: A1A519
  ENST ID: ENST00000613773
  CDS Start-End: 211-1200
aaccttaacagccctgcagtgtagtgggcactgggcagtgctgctccttcactaagcggtctgagttctttagctatctcggagattcaactacgtttactcgtactgaatctttttaatgaatttcctgagagccaagaagggccaatctacaggaaaaagtgggaggtggacattaagcatcttctagaaactcttctagctgatatcatgaaacgacgacaaaagaggaaacatttggaaaatgaagagtcccaggaaaccgctgagaagggaggaggaatgtcaaagtcccaagaggatgccctgcagcctggatccactagagtggccaaaggctggagccaaggggtgggagaagttacttctacctccgaatactgctcctgcgtttcttcttcacgcaagctcatccacagtggaatccagagaatacatcgagacagcccccagcctcaatcacccctggcccaggttcaggaacgaggagagactcctccccgctcacaacatgtctccttgtcgtcctattcatcctataagacttgtgtgtcctctctgtgtgtaaacaaagaggaaaggggcatgaaaatatactacatgcaggtacaaatgaacaaaggtgtggctgtctcctgggagacagaggaaactttggagtccttagaaaagcagccaaggatggaagaagtgaccctttctgaggttgtgagggtaggtactcccccctctgatgtgtccaccagaaacctcctgtctgacagtgagcccagtggggaggagaaagagcatgaggaaaggacagaatcagacagcctgccaggctcacccaccgttgaggacacacccagagccaagactcctgactggctggtgaccatggagaacggcttcaggtgcatggcctgctgccgggtgttcaccaccatggaagccctccaggagcatgtgcagtttgggatcagagagggcttcagctgccacgtctttcatctcaccatggctcagctgacaggcaacatggaatcagagagcacccaagatgagcaggaggaggaaaatggaaatgagaaggaggaggaagagaaaccagaagcaaaggaggaggaggggcagcccacagaagaagaccttggcctgaggagatcctggagccaatgtccaggctgtgtgtttcattctccaaaggacaggaactgagacttatgggccagaagatactggaagatggtgtggccttctcttgcaagagggagaagaaagagccatggagatagtagcagacaggctgcccaaggtatgaagcagatgagggaccagcactcagtctaacatgtaaacatcatacgtaataaaggttgtgtttcaaacctt

SEQ ID NO: 132194 - DNA, 1233 bp, Homo sapiens
  Payload ID: 5811
  Gene Symbol: FAM170A
  Gene Name: family with sequence similarity 170, member A
  Uniprot ID: A1A519
  ENST ID: ENST00000620555
  CDS Start-End: 211-1059
aaccttaacagccctgcagtgtagtgggcactgggcagtgctgctccttcactaagcggtctgagttctttagctatctcggagattcaactacgtttactcgtactgaatctttttaatgaatttcctgagagccaagaagggccaatctacaggaaaaagtgggaggtggacattaagcatcttctagaaactcttctagctgatatcatgaaacgacgacaaaagaggaaacatttggaaaatgaagagtcccaggaaaccgctgagaagggaggaggaatccagagaatacatcgagacagcccccagcctcaatcacccctggcccaggttcaggaacgaggagagactcctccccgctcacaacatgtctccttgtcgtcctattcatcctataagacttgtgtgtcctctctgtgtgtaaacaaagaggaaaggggcatgaaaatatactacatgcaggtacaaatgaacaaaggtgtggctgtctcctgggagacagaggaaactttggagtccttagaaaagcagccaaggatggaagaagtgaccctttctgaggttgtgagggtaggtactcccccctctgatgtgtccaccagaaacctcctgtctgacagtgagcccagtggggaggagaaagagcatgaggaaaggacagaatcagacagcctgccaggctcacccaccgttgaggacacacccagagccaagactcctgactggctggtgaccatggagaacggcttcaggtgcatggcctgctgccgggtgttcaccaccatggaagccctccaggagcatgtgcagtttgggatcagagagggcttcagctgccacgtctttcatctcaccatggctcagctgacaggcaacatggaatcagagagcacccaagatgagcaggaggaggaaaatggaaatgagaaggaggaggaagagaaaccagaagcaaaggaggaggaggggcagcccacagaagaagaccttggcctgaggagatcctggagccaatgtccaggctgtgtgtttcattctccaaaggacaggaactgagacttatgggccagaagatactggaagatggtgtggccttctcttgcaagagggagaagaaagagccatggagatagtagcagacaggctgcccaaggtatgaagcagatgagggaccagcactcagtctaacatgtaaacatcatacgtaataaaggttgtgtttcaaacctt

SEQ ID NO: 132195 - DNA, 1401 bp, Homo sapiens
  Payload ID: 5812
  Gene Symbol: FAM170B
  Gene Name: family with sequence similarity 170, member B
  Uniprot ID: A6NMN3
  ENST ID: ENST00000311787
  CDS Start-End: 91-942
gctggggccagctggaggccttcagtacagccccagccaactctcactgaacagctggagcaccgacaccctgggcactcatttcaaatcatgaaatgctacttcacagatcacaggggagaacagtcacccaccgatgggaccaccctcagcttgaccagccctgagtccactgaggagagtgtggaagtgttctggccagggactatacagagagaagggtcgtccccacggccggggcctgccattccccgggaggagggcctctacttcgctgccagggaccgggggatgcgggactggagcagctccccatcctcagagtcctccgagtaccagtcctactcccagtaccagtcgtgctgctcctgcatgtgcgatgaggacaatgctgctccgcagagtgtgtgtgccttctacacgcacgtgcagactgtgcggggtgtggctgtggcctgggagacggaggccggcttcgagccggtcaccaggaagccccgcatccatgaagcccagttcatcaagaggcagaggtggaacggctcctccttcgaaatggcttccaacaccgatatgcgctgggacctggaagcctgcaagagcaactgcagccccgagcccgaggacatagacctgctggagtgctgcctgcaggagctgcgggagccgccggactggctggtcaccaccaactacggggtgcgctgcgtggcctgctgcagggtcttgccctccctggacgctctgctggagcacgcccagcatggcatccgggagggcttcagctgtcagatcttttttgaggagatgctggagagaaggcgggctcagggccaagcacatgaccaacagctggaggaggagcagagtccttcagacaacagcgaatgttcccggccccagggtgaggtgctctcagcacagcagcaggagaagcagtgagccagaggggagatacccaaccctgccctcacctccagggcctgggactgctccttccccagccagcagtatcagagccactagggcagggagagaggaccagggtcagggggaaggaaaggcatggagtgtagagcaaggagggccaggagactggaaggaacccccttcctgccctaggcacagcatctccaccagagtccatttcaaaacccaaacgagagggctttgagtgtttctgatggcaggcacaacatctgaaacccacaaacgcatggccagagggatttctatttttgccggtggatcaggcaggtccacacttgctaagtatatgtgggtcacaggacagccaactgcaaattactctccagccctatttttttcactattacaaatctgtcatatgccctagttctatgtcttatgttattgggattaaacttgaataacacaaaa

SEQ ID NO: 132196 - DNA, 3952 bp, Homo sapiens
  Payload ID: 5813
  Gene Symbol: FAM171A1
  Gene Name: family with sequence similarity 171, member A1
  Uniprot ID: Q5VUB5
  ENST ID: ENST00000378116
  CDS Start-End: 8-2680
ggcggagatgagcaggtccgcgacgctgctgctgtgcctgctgggctgccacgtctggaaggcggtgaccaagacgctgcgggagcccggcgccggagcccaagaggtgacgttaaaggtgcacatcagcgacgccagcacccaccagcccgtagcagatgcgctcatcgagatcttcaccaaccaggcctccatagcctctggcacctcggggactgatggcgtcgcctttatcaagttccagtataagctgggcagtcagttgattgtcaccgcctcgaagcatgcctacgtgccaaactctgccccatggaagccaatccggttacctgtattttcctctctgagccttggcctgcttccagaacgctctgccactctaatggtatatgaagatgtcgtccaaatagtatcaggattccaaggtgcccggccacagcctcgcgttcatttccagagaagggctctgaggttgcctgagaacaccagctacagtgacctgaccgcgtttctcacggccgccagctccccttcggaggtggacagttttccttatttgcgaggattagacggaaatggaacaggaaacagcaccaggcatgacctgaccccagtcacagccgtcagcgtccacttgctgagcagtaatggaacgccggtgctggtggatggtcccatctatgtcactgtgcccctggccacgcagagcagcctgaggcacaatgcctatgtcgcggcgtggcggtttgaccagaagctgggaacgtggctgaagagcggtctgggtcttgtgcaccaggaaggcagccagctgacgtggacatacattgccccccagttggggtactgggtggccgccatgtcccctcccatcccaggtcccgttgtaacacaggacattaccacgtatcacacggtgtttcttttggccattttaggaggaatggctttcatacttttggttttgctgtgtctccttttatattattgcaggaggaagtgcttgaaacctcgtcagcaccacagaaaactgcagctccctgcaggactggagagttccaaaagagaccagtccacgtccatgtcacacattaacttgctgttttcacgccgagcgtcagaattccctggcccgctgtccgtcaccagccacggccgccccgaggcccccggcacgaaggaactgatgagtggagtccatttggaaatgatgtctccgggcggcgaaggggacctgcacacccccatgctcaagctctcctacagcacctcccaggaatttagctcccgggaggagctcctctcttgcaaggaagaggataaaagccagatctcctttgataacctcactccaagtgggacgctggggaaagactaccataagtcagtggaggtttttcccttaaaggcaagaaaatctatggaaagagaaggctacgagtcctcgggcaatgatgactacaggggtagttacaacaccgtgctctcacagcctttatttgaaaagcaggacagagaaggtccagcctccacgggaagcaaactcaccattcaggaacatctgtaccccgcgccttcatcacctgagaaagaacagctgctggaccgcagacccactgaatgtatgatgtcgcgatcagtagatcacctcgagagacctacgtccttcccacggcccggccagttaatctgctgcagttctgtcgaccaggtcaatgacagcgtttacaggaaagtactgcctgccttggtcatcccggctcattatatgaaactccccggggaccactcctatgtcagccagcccctcgtcgtcccggctgatcagcagcttgagatagaaagactacaggctgagctgtccaatccccatgccgggatcttcccacacccgtcctcacagatccagccccagcccctgtcttcccaggccatctctcagcagcacctgcaggatgcgggcacccgggagtggagccctcagaacgcatccatgtcggagtctctctccatcccagcttccctgaacgacgcggctttggctcagatgaacagtgaggtgcagctcctgactgaaaaggccctgatggagcttgggggtgggaagccgcttccgcacccccgggcgtggttcgtctccttggatggcaggtccaacgctcacgttagacattcatacattgatctccaaagagctggaaggaacggaagtaatgatgccagtttggactctggcgtagatatgaatgaaccaaaatcagcccggaagggaaggggagatgctttgtctctgcagcagaactacccgcccgtccaagagcaccagcagaaagagcctcgagccccagacagcacggcctacacgcagctcgtgtacctggatgacgtggaacagagtggtagcgaatgtgggaccacggtctgtacccccgaggacagtgccctgcgatgcttgttggaggggtcgagtcggagaagtggtggccagctgcccagcctgcaggaggagacgaccagacggactgcggatgccccctcggagccagcagccagcccccaccagagaagatctgcccacgaggaagaggaagacgatgatgatgatgaccaaggagaagacaagaaaagcccctggcagaaacgggaggagaggcccctgatggcgtttaacattaaatgagctatcgcagacccacctgactgtggaatataaaattgccaaatatcctttctcatggaagcgcgtacccgttcgtggaggaaacggaacggcagcccagccgtgggacggacgtggacgtttactgcattcctgtttgccgtgtaaatgttagaaaggaattaaagttattactcggaataaaggatgactttggcggatgtcgcccctgcaaggaggtggctgaaagtggtgtccagatgtccttccgaggactcggcgtatccgccaccagggacattaagaaaccgcacgtgatgtcgctatgctctaacgatcacctcagttctccctcggattctgggaacagatgaaactttttgcatcgcttgagtcatttttatcacaataatcctactgtgaagctgtcgttgagaacttaggttggcacgtagcgtctcaaggtatgcgttctctcaaaggaaagctatgcatcgctgcttcgttgtctgattttgcttagattttgctttggttaggttgcgttttggggtttgcctttttttgttgtcgcttaaatgcaatttggttgtaaagatttgattcctttgtgttcatctgttccgcttctcagcggtccatctcagcgtctcccttcaggaaccgctgagtgtcctctcttaacatccaagccttttaatgaaatcgtactgaaatctgtatcagctaagagtcctccaatcctggtcccattaactccaagtgcctttttgacagtgacaacagacagtccctcgctttttgttgttgttggttttcttaacccctttaatggaactgcctggattttatacagttattaaaggatgtctcttttgctttaaactgcatgctgccaagtgccatttggggtcagcatcctcgtttcaacacagtgtgctctctagttatcatgtgtaacgtgggttctgtttagcgaagatagactagaggacacgttagagatgcccttccctgctccatccctgtggcaccattatggttttttggctgtttgtatatacggttacgtattaactctggaatcctatgggctcatcttgctcacccaatgtgggagtctggtttgagcaagcgagctgaatgtgactattaaaaaaaatttaaaaaaaaaaaagaaaatcttatgtactatccaaaagtgccagaatgactcttctgtgcattcttcttaaagagctgcttggttatccaaaaatgaaaattcaaaataaactctgaagaaaaggaaaa

SEQ ID NO: 132197 - DNA, 605 bp, Homo sapiens
  Payload ID: 5813
  Gene Symbol: FAM171A1
  Gene Name: family with sequence similarity 171, member A1
  ENST ID: ENST00000455654
  CDS Start-End: 11-605
cgcggcggagatgagcaggtccgcgacgctgctgctgtgcctgctgggctgccacgtctggaaggcggtgaccaagacgctgcgggagcccggcgccggagcccaagaggtgacgttaaaggtgcacatcagcgacgccagcacccaccagcccgtagcagatgcgctcatcgagatcttcaccaaccaggcctccatagcctctggcacctcggggactgatggcgtcgcctttatcaagttccagtataagctgggcagtcagttgattgtcaccgcctcgaagcatgcctacgtgccaaactctgccccatggaagccaatccggttacctgtattttcctctctgagccttggcctgcttccagaacgctctgccactctaatggtatatgaagatgtcgtccaaatagtatcaggattccaaggaaacagcaccaggcatgacctgaccccagtcacagccgtcagcgtccacttgctgagcagtaatggaacgccggtgctggtggatggtcccatctatgtcactgtgcccctggccacgcagagcagcctgaggcacaatgcctatgtcgcggcgtggcggtttgaccagaagctgg

SEQ ID NO: 132198 - DNA, 3160 bp, Homo sapiens
  Payload ID: 5814
  Gene Symbol: FAM171A2
  Gene Name: family with sequence similarity 171, member A2
  Uniprot ID: A8MVW0
  ENST ID: ENST00000293443
  CDS Start-End: 162-2642
gcttgcggcggctccggtcggagacaatcgcgctgagcgggcgccgcagcgggagcgggagccggagctgcgaggcgcggcgcagagctggggctgcgcggggccgggcgagcgggaccaggcgggagccatggaccgctagggcccggcctagccccgcgatgccgccggcgagtggccccagcgtcctcgcgcggctgttgccgctgctggggctgctgctcggcagcgcctcccgggctcccggcaagtcgccgccggagccccccagcccgcaggagatcctgatcaaggtgcaggtgtatgtgagcggggagctggtgcccctggcccgggcctcagtggatgtgtttgggaaccggactctgctggcagctggcaccacagactcagagggtgtggccaccctgcccctcagttatcgcttgggcacctgggtgctggtcactgctgcccgccctggcttcctcaccaactctgtgccctggcgtgttgacaagctgcccttgtatgcgtctgtcagcctctacctgctccctgagcggccggccacgctcatcctctatgaggacctggtgcacattctcctaggctctcccggtgcccgctcccagcccttggtgcagttccagcgccgggctgcccgcctgcctgtcagctccacctacagccagctctgggcgtcacttacgcctgccagcacccagcaggaaatgcgggctttccctgccttcctgggcactgaggcctccagctcaggcaatggctcctggctggagctgatgcccctgactgctgtgagcgtgcacctgctgacaggtaatgggacagaggtgccgctctcaggccccattcacctgtccctgcccgtgccctccgagactcgtgccctcaccgtgggcaccagcattccagcctggagatttgaccccaagagtgggctgtgggtgcgcaatggcactggtgtaatccggaaggaaggccggcagctctactggaccttcgtctccccccagctggggtactgggtggccgccatggcctcccccacggctgggctggtcaccatcacgtcgggcatccaggacatcggcacctaccacaccatcttcttgctcaccatcctggcagccctggccctgctggtgcttatcctgctgtgtctgctcatctactactgccggaggcgctgcctgaagccgaggcaacagcaccgcaagctgcagctctcggggccctctgacggtaacaaacgagaccaggccacctcgatgtcccagctccacctcatctgtgggggacccctggaacccgccccgtcgggggaccccgaggctccgcctccaggccccctccactcggccttctccagctcccgggacttggcctcctcccgggatgacttcttccgcaccaagccgcgctctgccagccgcccggccgccgagccttcgggtgcccgcgggggcgagagcgccgggctcaagggcgctcgctcggccgagggccccggcgggctggagcccggcctagaggagcaccggcgggggccctcgggggctgcggccttcctgcacgagccgccctcgccgccgccgcccttcgaccactacctgggccacaagggggcggccgagggcaagacccccgacttcctgctgtcgcagtcggtggaccagctggcgcggccgccgtcgctgggccaggcggggcagctcatcttctgcggctccatcgaccacctcaaggacaacgtctaccgcaacgtcatgcccaccctggtgatccccgcgcactacgtgcgcctcggcggcgaggcgggcgccgccggcgtgggcgacgagccggccccgccggagggcacggcacccggcccggcgcgcgcttttccccagcccgacccccagcgcccgcagatgccgggccactcgggcccggggggcgagggcggcgggggcggcggcgagggctggggggccgggcgcgcggcgcccgtcagtggctcagtcaccatccctgtgctattcaacgagtccaccatggcgcagctcaacggggagctgcaggccctgaccgagaagaagctgctggaactgggcgtgaagccgcacccgcgcgcctggttcgtgtccctcgacgggcgctccaactcgcaagtgcgccactcttacatcgacctgcaggcgggcggcggggcacgcagcaccgacgccagcctggactcgggcgtagatgtccacgaggcgcggcccgcgcgccgccggcccgcgagggaggagcgggagcgcgccccgcctgccgcgccgccgccgccgcccgcgcccccgcgcctggcgctcagcgaggacacggagcccagcagcagcgagagccgcacgggcctctgctctccggaggacaactcgctgacgccgctgctggacgaggtggcggcgcccgagggccgggcggccacggtaccccgggggcggggccgcagccgcggggacagctcccgcagcagcgccagcgagctgcggcgcgactcgctcaccagcccggaggacgagctgggggcggaggtgggcgacgaggcgggagacaagaagagcccgtggcagcggcgggaggagcggccgctgatggtgttcaacgtcaagtagcgcccgcgcagggcctggcaccgcccctcccgcgcgggcccgcacccagggtgcgcgccccgggggcccgcgggggccctcgcgcgtagctcccagccccaggccggagaggggcccaggggccttggagctgttccgtggttggtgctgggtcgtgtcttgcaagggaccctgtgtctgcctccaagccggggaggagggggggtccagacccccacggggaggtgccggggaggagggctggggggaagcagtgcctgtgtagacgtggctgtacatagaaagctctattgtgggaaagcaggaggggtgacccagcctcagctgctagtgtgagggctgggaagggagggggcgttctttgtggacccctgggaggggagggggtgctgcttgctgactagcccatctctgggctacgatgtcacagggctggtggctgggacagctctggggactagggggtaatgtgatacagccgatgtgggcagcagcaaatataaaactggtgaggttaa

SEQ ID NO: 132199 - DNA, 1066 bp, Homo sapiens
  Payload ID: 5814
  Gene Symbol: FAM171A2
  Gene Name: family with sequence similarity 171, member A2
  ENST ID: ENST00000589407
  CDS Start-End: 99-578
ggagctgcgaggcgcggcgcagagctggggctgcgcggggccgggcgagcgggaccaggcgggagccatggaccgctagggcccggcctagccccgcgatgccgccggcgagtggccccagcgtcctcgcgcggctgttgccgctgctggggctgctgctcggcagcgcctcccgggctcccggcaagtcgccgccggagccccccagcccgcaggagatcctgatcaaggtgcaggtgtatgtgagcggggagctggtgcccctggcccgggcctcagtggatgtgtttgggaaccggactctgctggcagctggcaccacagactcagagggtgtggccaccctgcccctcagttatcgcttgggcacctgggtgctggtcactgctgcccgccctggcttcctcaccaactctgtgccctggcgtgttgacaagctgcccttgtatgcgtctgtcagcctctacctgctccctgagcggccggccacgctcatcctctatgaggacctggtgcacattctcctaggctctcccggctgtgccaggcattgtggctggtgctgggaaccacggtgaggaagaagacccgctctttgcctttggacgttcacagacaagtgcccgctcccagcccttggtgcagttccagcgccgggctgcccgcctgcctgtcagctccacctacagccagctctgggcgtcacttacgcctgccagcacccagcaggaaatgcgggctttccctgccttcctgggcactgaggcctccagctcaggcaatggctcctggctggagctgatgcccctgactgctgtgagcgtgcacctgctgacaggtaatgggacagaggtgccgctctcaggccccattcacctgtccctgcccgtgccctccgagactcgtgccctcaccgtgggcaccagcattccagcctggagatttgaccccaagagtgggctgtgggtgcgcaatggcactggtgtaatccggaaggaaggccggcagctctactggaccttcgtctccccccagctggggtactgggtggccgccatggcctccc

SEQ ID NO: 132200 - DNA, 964 bp, Homo sapiens
  Payload ID: 5814
  Gene Symbol: FAM171A2
  Gene Name: family with sequence similarity 171, member A2
  ENST ID: ENST00000588067
  CDS Start-End: 121-600
cgccgcagcgggagcgggagccggagctgcgaggcgcggcgcagagctggggctgcgcggggccgggcgagcgggaccaggcgggagccatggaccgctagggcccggcctagccccgcgatgccgccggcgagtggccccagcgtcctcgcgcggctgttgccgctgctggggctgctgctcggcagcgcctcccgggctcccggcaagtcgccgccggagccccccagcccgcaggagatcctgatcaaggtgcaggtgtatgtgagcggggagctggtgcccctggcccgggcctcagtggatgtgtttgggaaccggactctgctggcagctggcaccacagactcagagggtgtggccaccctgcccctcagttatcgcttgggcacctgggtgctggtcactgctgcccgccctggcttcctcaccaactctgtgccctggcgtgttgacaagctgcccttgtatgcgtctgtcagcctctacctgctccctgagcggccggccacgctcatcctctatgaggacctggtgcacattctcctaggctctcccggctgtgccaggcattgtggctggtgctgggaaccacggtgaggaagaagacccgctctttgcctttggacgttcacagacaagtaggaagacagatcattgcaagccctgaaatagttccagagcaggcagggcagtggagtggagggcagctgctttcagtgctgagacggccctaacctgcgaggggacctggctgggtgcccgctcccagcccttggtgcagttccagcgccgggctgcccgcctgcctgtcagctccacctacagccagctctgggcgtcacttacgcctgccagcacccagcaggaaatgcgggctttccctgccttcctgggcactgaggcctccagctcaggcaatggctcctggctggagctgatgcccctgactgctgtgagcgtg

SEQ ID NO: 132201 - DNA, 5826 bp, Homo sapiens
  Payload ID: 5815
  Gene Symbol: FAM171B
  Gene Name: family with sequence similarity 171, member B
  Uniprot ID: Q6P995
  ENST ID: ENST00000304698
  CDS Start-End: 204-2684
acatgcgcgaggatgcgaactccccttccctcctcctccgccccctccgcctcccgggcctcttcctcctgccggtgagggagtgcttggcagattgcgcgagggggagcgagcgagcgggcgctgccaggagcccgcagccctggcgcccgccgccgcccggagccccgcaatatgccgccgcggccctctggctctaggccatggcgaggctctgccggcgtgtcccctgcaccctgcttctcggcctggccgtggtgctgctgaaagcgcggctggtccccgcggccgccagagcggaactcagccgctccgacctcagcctcatccaacagcagcagcagcagcagcaacaacaacaacaacagcaaaagcagctggaggaggctgaggaggagaggacagaggtgcctggggcaacctccaccttgacggttccagtgtctgtatttatgttgaaagtccaggtgaatgacatcatcagtcgtcagtacctgagccaagcagttgtagaagtgtttgtaaactacacgaagacaaattccacagtaactaaaagcaatggagcagtgctgataaaagtaccctacaaattaggacttagtttaactattattgcttacaaagatggctacgtgttgacccctctgccttggaaaaccagaagaatgccaatatattcatcagttacactttcactgttcccgcaaagccaagcaaatatatggctatttgaagacactgttttaattactggaaaattagctgatgccaagtctcaaccaagtgttcagttttcaaaagccttaattaaacttcctgacaaccatcatattagcaacgttactggctatcttacagttctacaacagtttttgaaagtggacaattttctgcatacaactggaattactctcaataaaccaggttttgaaaacattgaattgactcctcttgctgcaatatgtgtgaaaatatattctggaggaaaagaactaaaggtcaatggctctattcaagtttctcttcctcttctacgtctgaatgatataagtgcaggggatcgcatacctgcttggacatttgatatgaacacaggtgcttgggtaaatcatggtcggggaatggtcaaggaacataacaatcatttaatctggacatatgatgcaccacatttggggtactggatagcagctccacttccaggaactagaggttcaggtataaatgaagattccaaggacataactgcctaccacacagtgtttcttacagccatattaggaggaacaatagtcattgtcattggattttttgctgtactactttgttattgcagggacaagtgtggtactccacagaaaagagaaagaaatatcactaaacttgaggtcctcaagagagaccagacaacttcaacaacacacataaatcatatcagtacagttaaagttgcattaaaagctgaggacaagtcgcagttattcaatgccaaaaactcctcatatagtcctcagaaaaaggaaccatcaaaggcagaaacagaagaaagagtttccatggtaaaaactcgggacgattttaaaatctacaatgaagatgtttcatttctatcagtcaatcaaaataattactcaagaaacccaacacagtctttggagcccaatgtagggtccaaacaacctaaacatattaacaacaatctatcttcatctctaggtgatgctcaagatgaaaagaggtatctcacaggtaatgaggaggcgtatgggcgttcccatattcctgaacagcttatgcatatttacagccaacccattgccatccttcaaacatctgaccttttctccacaccggaacaattacatactgctaagtcagctactttgccaagaaagggacagttagtctatggccaattgatggaaccagtaaatcgagagaactttacgcagaccttgcccaaaatgccaattcattctcatgcacagcccccagatgccagggaagaggatatcatacttgaaggtcaacagagcctgccatcccaggcttcagattggagccgatactcaagcagcttactggaatccgtctctgttcctggaacactaaatgaggctgttgtaatgactccattttcatcggaacttcaaggaatttcagaacagaccctcctggagctgtccaaaggaaagccctccccgcatcccagagcctggtttgtgtctcttgatggaaagccagttgcacaagtgaggcactcctttatagacctgaaaaagggcaagagaacccagagcaatgacaccagtctggactctggggtggacatgaatgagcttcactcaagtagaaagctcgagagggagaaaacattcatcaaaagcatgcatcagcccaagatcctttacttagaagatttagacctaagcagcagtgagagtggaaccaccgtctgttcccctgaggacccagctttaaggcacatcctagatggagggagtggagtgatcatggagcaccctggagaagagtcgccaggaaggaaaagcactgttgaagattttgaagctaatacatcccccactaaaagaaggggcagaccaccactagccaaaagagatagcaagactaacatctggaagaagcgagaggaacgcccactgattcccataaattaactccaatggggattgtgtgtctgctgtctcgtgctgtttattcttgcttcttgttgtaaattgcagtacgaacttaagaaaatgagactgagcaatctcatggttcttggacatgtctcaagcagagtaaatggtaattcagtaatcagagagaaagataccaaggaatgctttttctggcctattcatttatttttgggtgatgaatttacagtatctaagttttcaaaatgtaaaatagcttcaagatgttagttatctgaaaatgttgctcagccagccagtttggccttgactctcttaagaataacagtgaaatatatactcctcaagttgcctccaaaaatgttgcctctaccatggtgactaccccatggaacatttagaaacaaaactgacttcaggcatcatattattttaaatgttactattacgtcttcttctgcctatacttaaaaataacttgataaatgacttggactgatgttactctggagttatcacaaagaaaatgttgtttggtctttaaagagcatgtgtattgtatcatcccaaacgtaaatcctacatttatataagatgggcaagaagctacttggtcattagagagggagacaccagctctttggttgtttttggatataactttacaaaataagtaagatgttaatttagaaatttgagaaattaatgctctaatactgagtttttatttaaaaattattttttcttcccctcaacaatgaagcaagcttagctgtcaagggaaactttttacaaatctgaaaaaaacaatctatgactttggtttaaggctcactgatacttttaggctaaattggttttaatatatttcttctattctaaaaacctgaactcagtcacttaaaggctatgaaatttaaaaaaaaagtcgatgtgaaagtttcttttgaacactaaaataaaatatgtgcagataaaatatacattgatttgtttttcttaaatgttgatgagaagaaaaagagatgccattttcctgaggctcaaaaataccttcaggatagttgtatatccagttattgattttcttaaaagatgtgtaaggaaaacagtttcaatttcaggggaaaagtaaaagtttttccctaagtcacttaaagcctttgcaacttcttttttcagttttgtaagtaatatatctatgttcttttcattatagcaagcattcaatgtgaacaactttttaattaactctgaattaccattcatacatcctaaaaataaaagctcgttattcattaaaatcaactgatcccatttttcttaaaatttccctgaaggcaaatgtctgaagcacctttcccttgtgggggtaaaaatcctaaattgctttatttttcattccctcctattcaacatgggagcagcatagagacccaaaccatgtaaacaagttcagtgaaccaaaacagccacattagcttcagtaaaattatagctagatgtgcaattttttcctccaacttctaacgtgtcaaataaccttcctactgttctgtgttaactgaaagaacataaagaccctaggcaaatatttgctatatattaccccaatccatagaagaaataatgttttgggtaatacctaggcttcctttttttttttttttttttttttttagtgataaggctcataacaattaattagagaaggcttcttattggtcttacacagaaagatacatcaaaagcagcatgactcaaaatgatttggaaaaggttaaagttagtgctctgctgaagtgcctttgatatagacttgcattattagaaggatataacatcttttttaagtgtgcattttctttcagttaaccaaattaaacagatgtgcagttttattaaaaatatagacctagtgtttcatgttggaacaataaatattgcatgtgagtagtatttcttgttttttgaatacagtatatattgataaattgtttatgttggaatgaagttagaaactatatagcaaaacattatattttaagtgtttatttttcccacctttaaataaaaatgtttcatctcagcttggtaatgaaatacacatattggtataagggtataccattcaggtatgccacttattttattcatttttgtgtaagggaaatgagatgatgtatcccaagggcttttctagaactacttgtttgctttcagaataaaaccttattattttttacactgcacatgctgttctcaattggtaattataggcaatttatcttttctaatgatcaaaagagtgtgacttctcatttgtgagtagttcacaaatttcctgttaaaaagctgaaaccatctactttttcttaacccaagtgataataaacaatattcacaactttcttaaatttttaaattgaaaaccaaggttttttcaaatataaacctagatgattttggtcacaaattgttaacatttgtcgatcctttgtatatactttggatatatattaaaggcaaaactatctcttgactaactgatggattcatttactaaagcacagctgtatgtatttttgaatacatattatgatcttgagactttataaatcaatttttatgactttatgcagttgtatagggattatgccctttcagttctatagggattatgcccttttataatacataatataccacagagattacaaatgttgaggaatgaaagcacttctttgctttggcaatcattttcagaccactatgtgtttgaatcctctggtatcaatacgtattatagggttttagagatctgtgggtcaaatgatgtccctcaaaacttcctaaaaaggtgaagctcaaagtcacacattcttataaggcgcatgagtttctcattttcccatgtacgagcattgtaaaggaattcagctgtattaatttctatttcagatctagaattgacattttgccttcttgtttccaggtgtttctattttttgtattctttcagagaaatctcatatttcggtgtatttattgctgttactactatatttactgctgaaaactgtaacaacctgaagatttgtaaaatgttaaacatagttcattaaaaataataaaataaatctaaaatgtacttgga

SEQ ID NO: 132202 - DNA, 940 bp, Homo sapiens
  Payload ID: 5815
  Gene Symbol: FAM171B
  Gene Name: family with sequence similarity 171, member B
  ENST ID: ENST00000612606
  CDS Start-End: 95-811
cgagcgagcgggcgctgccaggagcccgcagccctggcgcccgccgccgcccggagccccgcaatatgccgccgcggccctctggctctaggccatggcgaggctctgccggcgtgtcccctgcaccctgcttctcggcctggccgtggtgctgctgaaagcgcggctggtccccgcggccgccagagcggaactcagccgctccgacctcagcctcatccaacagcagcagcagcagcagcaacaacaacaacaacagcaaaagcagctggaggaggctgaggaggagaggacagaggtgcctggggcaacctccaccttgacggttccagtgtctgtatttatgttgaaagtccaggtgaatgacatcatcagtcgtcagtacctgagccaagcagttgtagaagtgtttgtaaactacacgaagacaaattccacagtaactaaaagcaatggagcagtgctgataaaagtaccctacaaattaggacttagtttaactattattgcttacaaagatggctacgtgttgacccctctgccttggaaaaccagaagaatgccaatatattcatcagttacactttcactgttcccgcaaagccaagcaaatatatggctatttgaagacactgttttaattactggaaaattagctgatgccaagtctcaaccaagtgttcagttttcaaaagccttaattaaacttcctgacaaccatcatattagcaacgttactggctatcttacagttctacaacagtttttgaaagtggacaattttctgcatacaactggaattactcaataaaccaggttttgaaaacattgaattgactcctcttgctgcaatatgtgtgaaaatatattctggaggaaaagaactaaaggtcaatggctctattcaagtttctcttcctcttctacgtctgaatgatat

SEQ ID NO: 132203 - DNA, 4312 bp, Homo sapiens
  Payload ID: 5816
  Gene Symbol: FAM172A
  Gene Name: family with sequence similarity 172, member A
  Uniprot ID: Q8WUF8
  ENST ID: ENST00000395965
  CDS Start-End: 144-1394
ggtcggggcgcggatcccgagagggaaagtcataacaaccgcacgagggagttcgactggcgaactggaaggccacgcctcctcccgcctgccccctcagccctgtggctgggggcagagctcagactgtcttctgaagattgatgtctatttccttgagctctttaattttgttgccaatttggataaacatggcacaaatccagcagggaggtccagatgaaaaagaaaagactaccgcactgaaagatttattatctaggatagatttggatgaactaatgaaaaaagatgaaccgcctcttgattttcctgataccctggaaggatttgaatatgcttttaatgaaaagggacagttaagacacataaaaactggggaaccatttgtttttaactaccgggaagatttacacagatggaaccagaaaagatacgaggctctaggagagatcatcacgaagtatgtatatgagctcctggaaaaggattgtaatttgaaaaaagtatctattccagtagatgccactgagagtgaaccaaagagttttatctttatgagtgaggatgctttgacaaatccacagaaactgatggttttaattcatggtagtggtgttgtcagggcagggcagtgggctagaagacttattataaatgaagatctggacagtggcacacagataccgtttattaaaagagctgtggctgaaggatatggagtaatagtactaaatcccaatgaaaactatattgaagtagaaaagccgaagatacacgtacagtcatcatctgatagttcagatgaaccagcagaaaaacgggaaagaaaagataaagtttctaaagaaacaaagaagcgacgtgatttctatgagaagtatcgtaacccccaaagagaaaaagaaatgatgcaattgtatatcagagaaaatggttctcctgaagaacatgcaatctatgtttgggatcatttcatagctcaggctgctgctgagaatgtgtttttcgttgctcacagctatggaggacttgcttttgttgaactgatgattcaacgagaagccgatgtaaaaaataaggtaactgctgtggcattgacagactctgttcacaatgtgtggcatcaagaagctggcaaaacgattcgagaatggatgagagagaactgttgtaattgggtctctagctcagaaccattagacacatcagtggagtccatgctacctgattgcccccgggtctcagcaggcaccgaccgtcacgagctaacttcctggaagagctttccgtctattttcaaattctttaccgaagcctcagaggccaagaccagctccctgaagccggctgtgacgcgccgctcccaccgcatcaagcacgaagagctgtaagaggagcgagcgcgacgggggaggccgccctggcgcacccacccgcacgcctcctcactgcttgtgtcgagcggactcccagcccctcattagattgttttcttcccagagcccagggtcgtgatatatacatctaaatagcgttttgcattatttctagatgagtgcaactgtcaaagcaatatgggttcactggtcgtgcttcctgcgggctgagcgcgggctgagcgctgccagtcagcgctcacattaaggctgacagcgccctgcctggctcggccggcgaagctctaattgccctgaaggagaccgcgcgggcgctgcgggtccggcggcgtcggcgcggtcctagcgcccgccgtagcggagccgctgctgcttccccctccttaatcatgtccatctttccccgctctcaactggagcaaacttctattccagacttcagatttccattttcactaggtttttccctgagggcatcttattacccacctctttttttttttttttaaggaagttccacacacactccaaagccgatttcaaattcagaacctgaatgccatgatgtaccatgtagtttggggaatgcaaattgttctctccctgttttcatttcgggaccagaaaaaaaaacaactctgcataaaaatctataaagtactgaatccgcattactgctgaaaatccttttgccagctaattgtgagagtttacacaagtctctgatttcagaagagactgttaaaaccaaaacaatgatgggcagctcttttaagtgtaggtgtgaaggtcccattttcaatggaatttccaactgttatcactgggattgactttactttttaaacacataatgtgtactgtgtggcattgtaatttagatataacacacttaagttttgctttttaaatctctctgtggagaaaggttgttgttaatcctttccagaatgatctattctgagctttcctggagttaggcccttctagggagagaatttttttattgtcatcaggaaacgaaacctttgtgctctgcagcctttttcttctgaaaggctaagtggggctaaaattatccttttagttttctgctttaacaagaagagaaggacttggtgtgaaagaatttcttctctcagtccaatggtataatttttagcactccgcttcctctgtagggtttagccctacagtttgaacaattattttaatccagctaagatgtggccaacactgtgaaatacaggagatgttaaggttttgctgacttttagattaaaatcttaaaatttcacattatattttaattacttgaaaagtttaattacctagtaaagattgtttctaatagatgagaacataaatttaatagttttcatccttttttaaagtgtgtgcaacaattaatatgcctgccttatttgaggacatgataaaatgtacccaaaatgacttcgaactgtctaatgcctcagaaaagtaacttaaaatcaaccacttcgtgcttaaatgtttttatattatgaaccgatttcaacaagttttaaagctgttaatatctcattgctgtgtttgacatacaagtacattcattggttctatagtcttaatgatgacaaattaaagatgttttttcagtgctcaggtatgcatatattttcgtgttacttaagcaaaatcaactatataggaggaaaaatcaaaatggcattttattcagctaccagatggcttaaaatgagtaaaccccaacaacatcaagcacatttgtctgtgatattgaccctttttatccaatcattactattttagaagtagtggtgaactgtgtaaaataatggtatcttcagcagtgttccggaatcttagttgagggacaaacattccttccagtgagagattcaagaattgatgtgaattgaatatatttttcaaggtattataaattgtgttgtgttttcagtataagaaaatgttgacaggaaacaattttatagcatttataaaaaaccaacacttgtgcaatgctaaattggcgaagcttctgcacctgaattagagcacaataaatatgctgtttataaaccaaatcactgctattccttctctgaaatcatctctcctctttttaaacctttacttatagctagaataaatcactatttaattgcctctaatactttaaaactactggatggttaggcctggtttaactatttatggagagctatttgcaaacttaagttgtgtaaatgtaatttctacttgtgaatctgagctgtagcagcccagagggagctaggcaaactattccagaccaccaactgataagtgatcagattctttgtaatgtaggattttttaacctgttgattatgggtttgttgatataaatgtaataatgttcacctcgattttcctggagtaacaaccagcgttggtagtagcccacctgcatgaggacggccagtgttaacaatatttttgttctgatcttcttccccatttttgtttcctcaaacaggtttttaggagagtggagatttaaagtcaggatgtggcctttttattttaattatatacttaattcttagaacaagtagaatgggaaaggagtgactgataaatctaagattcaaaatagtcccgtcgaaacttaaaggccagattattgctttggagctttctataggtactagccatcccgtcgttaaatgttttcatggatatttgaaaagaagaccatgtacctttaataactgttcttttctcgagtttctgcctcgtgctttgacctggattgcattattattgtttatgcgaagtaaaaaaaaaaaaggaaagcacaagcttttcctgtatattatatttccatttccattttaaaataaaaacaattttcccaacaa

SEQ ID NO: 132204 - DNA, 1031 bp, Homo sapiens
  Payload ID: 5816
  Gene Symbol: FAM172A
  Gene Name: family with sequence similarity 172, member A
  ENST ID: ENST00000509739
  CDS Start-End: 118-927
tgccaatttggataaacatggcacaaatccagcagggaggtccagatgaaaaagaaaagactaccgcactgaaagatttattatctaggatagatttggatgaactaatgaaaaaagatgaaccgcctcttgattttcctgataccctggaaggatttgaatatgcttttaatgaaaatcatcacgaagtatgtatatgagctcctggaaaaggattgtaatttgaaaaaagtatctattccagaaggatatggagtaatagtactaaatcccaatgaaaactatattgaagtagaaaagccgaagatacacgtacagtcatcatctgatagttcagatgaaccagcagaaaaacgggaaagaaaagataaagtttctaaagaaacaaagaagcgacgtgatttctatgagaagtatcgtaacccccaaagagaaaaagaaatgatgcaattgtatatcagagaaaatggttctcctgaagaacatgcaatctatgtttgggatcatttcatagctcaggctgctgctgagaatgtgtttttcgttgctcacagctatggaggacttgcttttgttgaactgatgattcaacgagaagccgatgtaaaaaataaggtaactgctgtggcattgacagactctgttcacaatgtgtggcatcaagaagctggcaaaacgattcgagaatggatgagagagaactgttgtaattgggtctctagctcagaaccattagacacatcagtggagtccatgctacctgattgcccccgggtctcagcaggcaccgaccgtcacgagctaacttcctggaagagctttccgtctattttcaaattctttaccgaagcctcagaggccaagaccagctccctgaagccggctgtgacgcgccgctcccaccgcatcaagcacgaagagctgtaagaggagcgagcgcgacgggggaggccgccctggcgcacccacccgcacgcctcctcactgcttgtgtcgagcggactcccagcccctcattagattgttttctt

SEQ ID NO: 132205 - DNA, 1369 bp, Homo sapiens
  Payload ID: 5816
  Gene Symbol: FAM172A
  Gene Name: family with sequence similarity 172, member A
  Uniprot ID: Q8WUF8
  ENST ID: ENST00000509163
  CDS Start-End: 199-1311
gtatcaatctcctgaagaccccggaagtgcaactcgaacttggtcggggcgcggatcccgagagggaaagtcataacaaccgcacgagggagttcgactggcgaactggaaggccacgcctcctcccgcctgccccctcagccctgtggctgggggcagagctcagatttattatctaggatagatttggatgaactaatgaaaaaagatgaaccgcctcttgattttcctgataccctggaaggatttgaatatgcttttaatgaaaagggacagttaagacacataaaaactggggaaccatttgtttttaactaccgggaagatttacacagatggaaccagaaaagatacgaggctctaggagagatcatcacgaagtatgtatatgagctcctggaaaaggattgtaatttgaaaaaagtatctattccagtagatgccactgagagtgaaccaaagagttttatctttatgagtgaggatgctttgacaaatccacagaaactgatggttttaattcatggtagtggtgttgtcagggcagggcagtgggctagaagacttattataaatgaagatctggacagtggcacacagataccgtttattaaaagagctgtggctgaaggatatggagtaatagtactaaatcccaatgaaaactatattgaagtagaaaagccgaagatacacgtacagtcatcatctgatagttcagatgaaccagcagaaaaacgggaaagaaaagataaagtttctaaagaaacaaagaagcgacgtgatttctatgagaagtatcgtaacccccaaagagaaaaagaaatgatgcaattgtatatcagagaaaatggttctcctgaagaacatgcaatctatgtttgggatcatttcatagctcaggctgctgctgagaatgtgtttttcgttgctcacagctatggaggacttgcttttgttgaactgatgattcaacgagaagccgatgtaaaaaataaggtaactgctgtggcattgacagactctgttcacaatgtgtggcatcaagaagctggcaaaacgattcgagaatggatgagagagaactgttgtaattgggtctctagctcagaaccattagacacatcagtggagtccatgctacctgattgcccccgggtctcagcaggcaccgaccgtcacgagctaacttcctggaagagctttccgtctattttcaaattctttaccgaagcctcagaggccaagaccagctccctgaagccggctgtgacgcgccgctcccaccgcatcaagcacgaagagctgtaagaggagcgagcgcgacgggggaggccgccctggcgcacccacccgcacgcctcctcac

SEQ ID NO: 132206 - DNA, 1392 bp, Homo sapiens
  Payload ID: 5816
  Gene Symbol: FAM172A
  Gene Name: family with sequence similarity 172, member A
  ENST ID: ENST00000502503
  CDS Start-End: 356-1273
gctgccgtcaagtgcgtaatgacgtatcaatctcctgaagaccccggaagtgcaactcgaacttggtcggggcgcggatcccgagagggaaagtcataacaaccgcacgagggagttcgactggcgaactggaaggccacgcctcctcccgcctgccccctcagccctgtggctgggggcagagctcagactgtcttctgaagattgatgtctatttccttgagctctttaattttgttgccaatttggataaacatggcacaaatccagcagggaggtccagatgaaaaagaaaagactaccgcactgaaagatttattatctaggatagatttggatgaactaatgaaaaaagatgaaccgcctcttgattttcctgataccctggaaggatttgaatatgcttttaatgaaaatcatcacgaagtatgtatatgagctcctggaaaaggattgtaatttgaaaaaagtatctattccagtagatgccactgagagtgaaccaaagagttttatctttatgagtgaggatgctttgacaaatccacagaaactgatggttttaattcatggtagtggtgttgtcagggcagggcagtgggctagaagacttattataaatgaagatctggacagtggcacacagataccgtttattaaaagagctgtggctgaaggatatggagtaatagtactaaatcccaatgaaaactatattgaagtagaaaagccgaagatacacgtacagtcatcatctgatagttcagatgaaccagcagaaaaacgggaaagaaaagataaagtttctaaagaaacaaagaagcgacgtgatttctatgagaagtatcgtaacccccaaagagaaaaagaaatgatgcaattgtatatcagagaaaatggttctcctgaagaacatgcaatctatgtttgggatcatttcatagctcaggctgctgctgagaatgtgtttttcgttgctcacagctatggaggacttgcttttgttgaactgatgattcaacgagaagccgatgtaaaaaataaggtaactgctgtggcattgacagactctgttcacaatgtgtggcatcaagaagctggcaaaacgattcgagaatggatgagagagaactgttgtaattgggtctctagctcagaaccattagacacatcagtggagtccatgctacctgattgcccccgggtctcagcaggcttttcatgttgccaaatgcaaagtcatgaagatttgctcctgtgttttcttctatgaattttacagttttatttattaaatttaggactttgatccatttcaagttaatttttgtatacggtatgaggcaccgaccgtcacgagctaacttcctggaagagctttccgtctatttt

SEQ ID NO: 132207 - DNA, 1387 bp, Homo sapiens
  Payload ID: 5816
  Gene Symbol: FAM172A
  Gene Name: family with sequence similarity 172, member A
  Uniprot ID: Q8WUF8
  ENST ID: ENST00000505869
  CDS Start-End: 171-1091
gcaactcgaacttggtcggggcgcggatcccgagagggaaagtcataacaaccgcacgagggagttcgactggcgaactggaaggccacgcctcctcccgcctgccccctcagccctgtggctgggggcagagctcagatttattatctaggatagatttggatgaactaatgaaaaaagatgaaccgcctcttgattttcctgataccctggaaggatttgaatatgcttttaatgaaaagggacagttaagacacataaaaactggggaaccatttgtttttaactaccgggaagatttacacagatggaaccagaaaagatacgaggctctaggagagatcatcacgaagtatgtatatgagctcctggaaaaggattgtaatttgaaaaaagtatctattccagaaggatatggagtaatagtactaaatcccaatgaaaactatattgaagtagaaaagccgaagatacacgtacagtcatcatctgatagttcagatgaaccagcagaaaaacgggaaagaaaagataaagtttctaaagaaacaaagaagcgacgtgatttctatgagaagtatcgtaacccccaaagagaaaaagaaatgatgcaattgtatatcagagaaaatggttctcctgaagaacatgcaatctatgtttgggatcatttcatagctcaggctgctgctgagaatgtgtttttcgttgctcacagctatggaggacttgcttttgttgaactgatgattcaacgagaagccgatgtaaaaaataaggtaactgctgtggcattgacagactctgttcacaatgtgtggcatcaagaagctggcaaaacgattcgagaatggatgagagagaactgttgtaattgggtctctagctcagaaccattagacacatcagtggagtccatgctacctgattgcccccgggtctcagcaggcaccgaccgtcacgagctaacttcctggaagagctttccgtctattttcaaattctttaccgaagcctcagaggccaagaccagctccctgaagccggctgtgacgcgccgctcccaccgcatcaagcacgaagagctgtaagaggagcgagcgcgacgggggaggccgccctggcgcacccacccgcacgcctcctcactgcttgtgtcgagcggactcccagcccctcattagattgttttcttcccagagcccagggtcgtgatatatacatctaaatagcgttttgcattatttctagatgagtgcaactgtcaaagcaatatgggttcactggtcgtgcttcctgcgggctgagcgcgggctgagcgctgccagtcagcgctcacattaaggctgacagcgccctgcctggctcggccggcgaagctctaatt

SEQ ID NO: 132208 - DNA, 806 bp, Homo sapiens
  Payload ID: 5817
  Gene Symbol: FAM173A
  Gene Name: family with sequence similarity 173, member A
  ENST ID: ENST00000219535
  CDS Start-End: 134-790
ggccacttccggtgtcgcgcggcggctcccggcaggaggcagagggcacaccgccagccccaggccaggctgcgagggccgcggacccgagccgggaaggaccttgggcggacgagccgcgcgtcccgcagccatggagcaggacgacccggtcgaggcgctgacggagctgcgcgagcggcggctgggcgcgctggagctgctgcaggcggcggccggctcgggcttggcagcctacgcggtgtgggcgctgctgctccagcccggcttccggcgcgtgccgctgcggctgcaggtgccctacgtcggcgcgagcgcgcggcaggtggagcacgtgttgtcgctgctgcgaggacgccccggaaaaacggtggatctgggctctggcgacggcaggatcgtgctggcggcccacaggtgcggcctccgcccggccgtgggctacgagctgaacccctggctggtggcgctggcgcggctgcacgcctggagggccggctgtgccggcagcgtctgctatcgccgcaaggatctctggaagctcccgctgctggaggacaagctgcggacagagctgcctgctggggcccgcgtggtgtctgggcgcttcccactccccacctggcagcctgtgaccgcggttggcgagggcctggaccgagtatgggcttatgatgttcctgagggtgggcaggctggggaggccgcctcctcgcggatacccatccaggctgcccccggacctagttctgcccccatcccggggggccttatttctcaggccagctgagtattagacacgataa

SEQ ID NO: 132209 - DNA, 1052 bp, Homo sapiens
  Payload ID: 5817
  Gene Symbol: FAM173A
  Gene Name: family with sequence similarity 173, member A
  Uniprot ID: Q9BQD7
  ENST ID: ENST00000569529
  CDS Start-End: 301-1008
ccgcaaacggcggtccgcagagcggaccaacggagccgaccctcgcaggcttggagccggacgcggcggggcagagcccccgaggctgcagctcgccggaacccgcgggagggcagccgggctgggcggagcgcacagcgccacggaccgaccgcgcaggctctgccggccacttccggtgtcgcgcggcggctcccggcaggaggcagagggcacaccgccagccccaggccaggctgcgagggccgcggacccgagccgggaaggaccttgggcggacgagccgcgcgtcccgcagccatggagcaggacgacccggtcgaggcgctgacggagctgcgcgagcggcggctgggcgcgctggagctgctgcaggcggcggccggctcgggcttggcagcctacgcggtgtgggcgctgctgctccagcccggcttccggcgcgtgccgctgcggctgcaggtgccctacgtcggcgcgagcgcgcggcaggtggagcacgtgttgtcgctgctgcgaggacgccccggaaaaacggtggatctgggctctggcgacggcaggatcgtgctggcggcccacaggtgcggcctccgcccggccgtgggctacgagctgaacccctggctggtggcgctggcgcggctgcacgcctggagggccggctgtgccggcagcgtctgctatcgccgcaaggatctctggaaggtgagcctgagggactgccgcaacgtgtctgtgttcctggcccctagcgtgctcccgctgctggaggacaagctgcggacagagctgcctgctggggcccgcgtggtgtctgggcgcttcccactccccacctggcagcctgtgaccgcggttggcgagggcctggaccgagtatgggcttatgatgttcctgagggtgggcaggctggggaggccgcctcctcgcggatacccatccaggctgcccccggacctagttctgcccccatcccggggggccttatttctcaggccagctgagtattagacacgataaagactctgtgggttctatcctgactcat

SEQ ID NO: 132210 - DNA, 1088 bp, Homo sapiens
  Payload ID: 5817
  Gene Symbol: FAM173A
  Gene Name: family with sequence similarity 173, member A
  ENST ID: ENST00000564000
  CDS Start-End: 179-703
tgggcggagcgcacagcgccacggaccgaccgcgcaggctctgccggccacttccggtgtcgcgcggcggctcccggcaggaggcagagggcacaccgccagccccaggccaggctgcgagggccgcggacccgagccgggaaggaccttgggcggacgagccgcgcgtcccgcagccatggagcaggacgacccggtcgaggcgctgacggagctgcgcgagcggcggctgggcgcgctggagctgctgcaggcggcggccggctcgggcttggcagcctacgcggtgtgggcgctgctgctccagcccggcttccggcgcgtgccgctgcggctgcaggtgccctacgtcggcgcgagcgcgcggcaggtggagcacgtgttgtcgctgctgcgaggacgccccggaaaaacggtggatctgggctctggcgacggcaggatcgtgctggcggcccacaggtgcggcctccgcccggccgtgggctacgagctgaacccctggctggtggcgctggcgcggctgcacgcctggagggccggctgtgccggcagcgtctgctatcgccgcaaggatctctggaaggtgagcctgagggactgccgcaacgtgtctgtgttcctggcccctagcgtggtaggtgcggggttgccagccccgctgggaagccccagccacaccccagggtgtttgctgctctgaggcctgggcctgcctggtgggtgctaggcttggggctaggggggtgagcgcggctgttttctaccggccccgcccccgccccctctactctgctgttctctccctcagctcccgctgctggaggacaagctgcggacagagctgcctgctggggcccgcgtggtgtctgggcgcttcccactccccacctggcagcctgtgaccgcggttggcgagggcctggaccgagtatgggcttatgatgttcctgagggtgggcaggctggggaggccgcctcctcgcggatacccatccaggctgcccccggacctagttctgcccccatcccggggggccttatttctcaggccagctgagtattagacacgataaagactctgtggg

SEQ ID NO: 132211 - DNA, 454 bp, Homo sapiens
  Payload ID: 5817
  Gene Symbol: FAM173A
  Gene Name: family with sequence similarity 173, member A
  ENST ID: ENST00000568916
  CDS Start-End: 1-421
ggtggatctgggctctggcgacggcaggatcgtgctggcggcccacaggtgcggcctccgcccggccgtgggctacgagctgaacccctggctggtggcgctggcgcggctgcacgcctggagggccggctgtgccggcagcgtctgctatcgccgcaaggatctctggaagctcccgctgctggaggacaagctgcggacagagctgcctgctggggcccgcgtggtgtctgggcgcttcccactccccacctggcagcctgtgaccgcggttggcgagggcctggaccgagtatgggcttatgatgttcctgagggtgggcaggctggggaggccgcctcctcgcggatacccatccaggctgcccccggacctagttctgcccccatcccggggggccttatttctcaggccagctgagtattagacacgataaagactctgtgggttcta

SEQ ID NO: 132212 - DNA, 1928 bp, Homo sapiens
  Payload ID: 5818
  Gene Symbol: FAM173B
  Gene Name: family with sequence similarity 173, member B
  ENST ID: ENST00000280330
  CDS Start-End: 608-817
aaaacgctgttggaaatctcgcgatggagggaggaggaggctggtctcaaattcccgggctcaagcgatcttctggcctcagcctcctgagtagctgagattacaggtatacccctagaaacacttaaagaagaaagtcagtcaagacatgttctacctgcaagttttgaagtcaacagtttgcagaaaagcaactgggggttcttacttactgggcttgtgggtggcaccctggtggctgtgtacgctgtagccacgccgtttgtaacgccagcccttcgaaaagtctgtttgccgtttgtacctgcaactacgaagcagattgaaaatgttgtgaaaatgttgcgatgccgaagaggatcccttgtggacatcggtagtggggacggacgcattgtgagttctgctaaaacattttaaggtcatagcggctgcgaagaaagggttcacagcagttggttatgaattaaacccatggctagtttggtattccagataccgcgcttggcgagaaggtgtgcatggatctgccaaattttatatttcagatttgtggaaggttactttttcgcagtactcgaacgttgttattttcggtgtgcctcagatgatgctgcagttggagaagaaacttgaacgtgaacttgaggatgatgcacgagttattgcttgccggttccctttcccacattggactccagaccacgtcacgggggaggggatagacacagtgtgggcatatgatgcaagcacttttagaggccgtgaaaagaggccctgtacatcgatgcatttccagctgcccattcaagcataaacttgactgggagtgtttttctgaaatattgtagtcttccctgatcttgtagagacttacagctgtgtccttagcaaaggagcataattgtctttggtttggaatgagaaattactattactttccttaactgttggagaaaacaaacgaagaaaaacaggtagatttaaaatctgcttttgatgctattttcttaaaaattgtacttactgcctttccatgcacctggatgcatgaaaagatgaataagtgatggtcatggttatgggtaggaaaataagatgccaatagctcttcacattataaacaatatggcttaatgcctcgataaggagaaatgatttttaaagacagtatatattaccaactgtttgtagtatcctataactttgttcatacttaagttgtatctctttcctttttgtacttcatggcaaaattaattttctaaaggattcagagaggcgtttatattttataacatttattagaaataatttgttccaccactagattactgtattttatggaatctaagctgtatatgtgtacatttgtatacatgtatgtgtaaatgtaagcctgacgtgggttcagattccagttttgtcatcagcaagaggcctcggacccatgacttactgcctctgagccttggctttctgtgtatctctgccactgggataatggtacacataacagtggagtggggaccaatttctaaaactcatggcacctagtctttggtccataaatggtgtttgttattttagacactgagaaaaatcttattcacagaagttgcagattatttctgctagtcacttttttatttcttgagagctgccactcatttaatatttctcatttatgagaagagacttgactgatttagataaaagacgaattaaggaaaacctttgaacgtgagtagacaagcttcatatatctgtaaagtgaatattgaatggtagcttgagtcattcgtacttatcacagaaaagaattgaactcccagtcatacacctgtaactgaaataccaaactgtcttaatggagatgtaatgaagtaagatggtcacatctttaactaaacttataaaaattggtc

SEQ ID NO: 132213 - DNA, 1160 bp, Homo sapiens
  Payload ID: 5818
  Gene Symbol: FAM173B
  Gene Name: family with sequence similarity 173, member B
  Uniprot ID: Q6P4H8
  ENST ID: ENST00000510047
  CDS Start-End: 25-675
aaaaacgctgttggaaatctcgcgatggagggaggaggaggtatacccctagaaacacttaaagaagaaagtcagtcaagacatgttctacctgcaagttttgaagtcaacagtttgcagaaaagcaactgggggttcttacttactgggcttgtgggtggcaccctggtggctgtgtacgctgtagccacgccgtttgtaacgccagcccttcgaaaagtctgtttgccgtttgtacctgcaactacgaagcagattgaaaatgttgtgaaaatgttgcgatgccgaagaggatcccttgtggacatcggtagtggggacggacgcattgtcatagcggctgcgaagaaagggttcacagcagttggttatgaattaaacccatggctagtttggtattccagataccgcgcttggcgagaaggtgtgcatggatctgccaaattttatatttcagatttgtggaagatgctgcagttggagaagaaacttgaacgtgaacttgaggatgatgcacgagttattgcttgccggttccctttcccacattggactccagaccacgtcacgggggaggggatagacacagtgtgggcatatgatgcaagcacttttagaggccgtgaaaagaggccctgtacatcgatgcatttccagctgcccattcaagcataaacttgactgggagtgtttttctgaaatattgtagtcttccctgatcttgtagagacttacagctgtgtccttagcaaaggagcataattgtctttggtttggaatgagaaattactattactttccttaactgttggagaaaacaaacgaagaaaaacaggtagatttaaaatctgcttttgatgctattttcttaaaaattgtacttactgcctttccatgcacctggatgcatgaaaagatgaataagtgatggtcatggttatgggtaggaaaataagatgccaatagctcttcacattataaacaatatggcttaatgcctcgataaggagaaatgatttttaaagacagtatatattaccaactgtttgtagtatcctataactttgttcatacttaagttgtatctctttcctttttgtacttcatggcaaaattaattttctaaaggattcagagaggcgtttatattttataacatt

SEQ ID NO: 132214 - DNA, 1423 bp, Homo sapiens
  Payload ID: 5818
  Gene Symbol: FAM173B
  Gene Name: family with sequence similarity 173, member B
  Uniprot ID: Q6P4H8
  ENST ID: ENST00000511437
  CDS Start-End: 14-715
tggaaatctcgcgatggagggaggaggaggtatacccctagaaacacttaaagaagaaagtcagtcaagacatgttctacctgcaagttttgaagtcaacagtttgcagaaaagcaactgggggttcttacttactgggcttgtgggtggcaccctggtggctgtgtacgctgtagccacgccgtttgtaacgccagcccttcgaaaagtctgtttgccgtttgtacctgcaactacgaagcagattgaaaatgttgtgaaaatgttgcgatgccgaagaggatcccttgtggacatcggtagtggggacggacgcattgtcatagcggctgcgaagaaagggttcacagcagttggttatgaattaaacccatggctagtttggtattccagataccgcgcttggcgagaaggtgtgcatggatctgccaaattttatatttcagatttgtggaaggttactttttcgcagtactcgaacgttgttattttcggtgtgcctcagatgatgctgcagttggagaagaaacttgaacgtgaacttgaggatgatgcacgagttattgcttgccggttccctttcccacattggactccagaccacgtcacgggggaggggatagacacagtgtgggcatatgatgcaagcacttttagaggccgtgaaaagaggccctgtacatcgatgcatttccagctgcccattcaagcataaacttgactgggagtgtttttctgaaatattgtagtcttccctgatcttgtagagacttacagctgtgtccttagcaaaggagcataattgtctttggtttggaatgagaaattactattactttccttaactgttggagaaaacaaacgaagaaaaacaggtagatttaaaatctgcttttgatgctattttcttaaaaattgtacttactgcctttccatgcacctggatgcatgaaaagatgaataagtgatggtcatggttatgggtaggaaaataagatgccaatagctcttcacattataaacaatatggcttaatgcctcgataaggagaaatgatttttaaagacagtatatattaccaactgtttgtagtatcctataactttgttcatacttaagttgtatctctttcctttttgtacttcatggcaaaattaattttctaaaggattcagagaggcgtttatattttataacatttattagaaataatttgttccaccactagattactgtattttatggaatctaagctgtatatgtgtacatttgtatacatgtatgtgtaaatgtaagcctgacgtgggttcagattccagttttgtcatcagcaagaggcctcggacccatgacttactgcctctgagccttggctttctgtgtatctctgccactgggataatggtacacataacagtggagt

SEQ ID NO: 132215 - DNA, 571 bp, Homo sapiens
  Payload ID: 5818
  Gene Symbol: FAM173B
  Gene Name: family with sequence similarity 173, member B
  ENST ID: ENST00000504390
  CDS Start-End: 13-342
ggaaatctcgcgatggagggaggaggaggtatacccctagaaacacttaaagaagaaagtcagtcaagacatgttctacctgcaagttttgaagtcaacagtttgcagaaaagcaactgggggttcttacttactgggcttgtgggtggcaccctggtggctgtgtacgctgtagccacgccgtttgtaacgccagcccttcgaaaagtctgtttgccgtttgtacctgcaactacgaagcagattgaaaatgttgtgaaaatgttgcgatgccgaagaggatcccttgtggacatcggtagtggggacggacgcattgtgagttctgctaaaacattttaaggtcatagcggctgcgaagaaagggttcacagcagttggttatgaattaaacccatggctagtttggtattccagataccgcgcttggcgagaaggtgtgcatggatctgccaaattttatatttcagatttgtggaagatgctgcagttggagaagaaacttgaacgtgaacttgaggatgatgcacgagttattgcttgccggttccctttcccacattggactcca

SEQ ID NO: 132216 - DNA, 751 bp, Homo sapiens
  Payload ID: 5818
  Gene Symbol: FAM173B
  Gene Name: family with sequence similarity 173, member B
  ENST ID: ENST00000506108
  CDS Start-End: 16-465
gttggaaatctcgcgatggagggaggaggaggtatacccctagaaacacttaaagaagaaagtcagtcaagacatgttctacctgcaagttttgaagtcaacagtttgcagaaaagcaactgggggttcttacttactgggcttgtgggtggcaccctggtggctgtgtacgctgtagccacgccgtttgtaacgccagcccttcgaaaagtctgtttgccgtttgtacctgcaactacgaagcagattgaaaatgttgtgaaaatgttgcgatgccgaagaggatcccttgtggacatcggtagtggggacggacgcattgttatttttattgcatattattacttgttcacaaaaccatcctcccagacactttcatttcactgctgctgtgctagcccactgatggagagatgcagtggattttcagcaatgttttgttcgacctccccgggggttggctgacctagaatcaattatggaggtgttccaagtgaacctgaatgtctattctgatacttgaggtcatagcggctgcgaagaaagggttcacagcagttggttatgaattaaacccatggctagtttggtattccagataccgcgcttggcgagaaggtgtgcatggatctgccaaattttatatttcagatttgtggaaggttactttttcgcagtactcgaacgttgttattttcggtgtgcctcagatgatgctgcagttggagaagaaacttgaacgtgaacttga

SEQ ID NO: 132217 - DNA, 1356 bp, Homo sapiens
  Payload ID: 5819
  Gene Symbol: FAM174A
  Gene Name: family with sequence similarity 174, member A
  Uniprot ID: Q8TBP5
  ENST ID: ENST00000312637
  CDS Start-End: 227-799
aagttagcaaccgaaggcgtccttagcagcagtggccgctgagatgtacgaacttccggttctccgggcagctgccactgctgtagcttctgccacctgccacgaccgggcctctccctggcgtttggtcacctctgcttcattctccaccgcgcctatggtccctcttggagccagcgtggcgggcctggcggctcccgggtggtgagagagcggtccgggaacgatgaaggcctcgcagtgctgctgctgtctcagccacctcttggcttccgtcctcctcctgctgttgctgcctgaactaagcgggcccctggcagtcctgctgcaggcagccgaggccgcgccaggtcttgggcctcctgaccctagaccacggacattaccgccgctgccaccgggccctacccctgcccagcagccgggccgtggtctggctgaagctgcggggccgcggggctccgagggaggcaatggcagcaaccctgtggccgggcttgagacggacgatcacggagggaaggccggggaaggctcggtgggtggcggccttgctgtgagccccaaccctggcgacaagcccatgacccagcgggccctgaccgtgttgatggtggtgagcggcgcggtgctggtgtacttcgtggtcaggacggtcaggatgagaagaagaaaccgaaagactaggagatatggagttttggacactaacatagaaaatatggaattgacacctttagaacaggatgatgaggatgatgacaacacgttgtttgatgccaatcatcctcgaagataagaatgtgccttttgatgaaagaactttatctttctacaatgaagagtggaatttctatgtttaaggaataagaagccactatatcaatgttgggggggtatttaagttacatatattttaacaacctttaatttgctgttgcaataaataccgtatccttttattatatctttatatgtatagaagtactctgttaatgggctcagagatgttggggataaagtatactgtaataatttatctgtttgaaaattactataaaacggtgttttctgatcggtttttgtttcctgcttaccatatgattgtaaattgttttatgtattaatcagttaatgctaattatttttgctgatgtcatatgttaaagagctataaattccaacaaccaactggtgtgtaaaaataatttaaaatttcctttactgaaaggtatttcccatttttgtggggaaaagaagccaaatttattactttgtgttggggtttttaaaatattaagaaatgtctaagttattgtttgcaaaacaataaatatgattttaaattctcttaaa

SEQ ID NO: 132218 - DNA, 2792 bp, Homo sapiens
  Payload ID: 5820
  Gene Symbol: FAM174B
  Gene Name: family with sequence similarity 174, member B
  Uniprot ID: Q3ZCQ3
  ENST ID: ENST00000327355
  CDS Start-End: 300-779
ttcaccacggggtctcaagtcccgaggaattggggtcgcgggcgagcggagcgcagccgggacccaggccgggtggcctgccccgcccacgtggggccgcggcccgtcgaatgactccttgcaacgtgttggtggtggcggcggcggtggcgcgggctcttccgggcgccgcagcttcctgccaagcaccgcgcagccgcctccgccgcaggatcccccggtgcaggcctccgtgctggtgcggatcctggagctcagccgcgcgcgccctgcccgatcctgtgccgacccaccgcactatgcgcgccgtgccgctgcccgccccgctcctgccgctgctgctgctcgcgctcctggccgctcccgccgcccgcgccagcagagccgagtccgtctccgcgccgtggcccgaacccgagcgcgagtcgcggccaccgcccggcccggggcccgggaacaccacccggtttgggtctggggcggcgggcggcagcggcagctccagctccaacagcagtggcgacgccttggtgacccgcatttccatcctcctccgcgacctacccaccctcaaggcagccgtgatcgtggcgttcgcctttaccaccctcctcatcgcctgcctgctgctgcgcgtcttcaggtcgggaaagaggttaaagaagacacgcaagtatgatatcatcaccactccagcagagcgagtggaaatggcgccactaaatgaagaggatgatgaagatgaggactccacagtattcgacatcaaatacaggtaaaacctgtttcccagcctggtggcatcctgtggaaagttggtcagctgcaacctggggtgtgaaggactggacctggaagccctcttgcgtcggaggtgttgaaaccaaaacgaacgttatgtataaaaccccagctccatcgtgcgtgtcaggcatctgctcagactgtcactggcaagctcgtttccacgtcaccacaatggagttgcttctgccaccctttgggcatccctttaaagtgccccctacttctactccccatgtaagaggctttgtgccttgctaaggagcaaagggtagaaacatgttgattttaaagaagtttttttaagacaattgttgacaatagtaaaagagatcaggaggatcaagaatctaaaacaagcctgaaggatgtccaactgtgtatttagaatttccgacattcttctctactggatctacacattggaccccatctgatcctttgctgcttttttggcttggtcaggtcctggcctcattttggcgttacctgtgtcagagttcaaggtggatgtgcttagagctggtcagccccttccagacctggacacgtctgtggctccttttctttcttcctttttttttttttttaaaaaaaaaaaaggttcagcagaaatcagcgtggctagttcacaaagaatttccagtatcagggaaaaactgtgcgtgtgtgtgtgtgtgtgtgtgcacgtgtgtgcgtgtgcacgtgtgtgatacctataaaacagtttctccttctctgaagggaaaggaaagtgctaggcagcctgtgattagcaacattctttgtgcttttttgttgttcctctgctctgtcacagttctacgttgtttgccttagaaatgtaatttttaaaaaccattttaaaaatgaacggtgatttggctggctggaaaaaatcacactgtcaggggactatatttgaagtcagtctagacggggctggactaggaacccacctggacccaggagaccccacaggacccaggaggtccctgccggaaggcagaggttcaggtgagagtggctcacctctgagctggtgaagtgaggacttgcctgtgacatgacccagggatctgctgctggcttctggagacagggccttgggctgacttctcaggttgattgaggcctcctgactagcggtgttcccaggctagaggtgattggctgcaacaaagatgcttctattagtctattagcagtgccttcgggaccctgggattttgctctctctagaaaggtgttttttatttttttattttttatctcccccttttttcctggctttgctccagggtttgtgtatttgcctgtttattgtcctgctctttttttttttggatgaaaactccagcctttcctgactcacctccatcttcggttcttcagttttctgagaagagttgggatatgtgggaaggggcatgggagctcggcagcctccgcctgccaggaaggcagtttcgcctctgcaggaaagagcagagcccgtgggaagccctgggtgagggtggcgcagccggcccagcacgcatggtattgccagccacggggggcctgcgtgtagtctctgctccctgcatttcaccttctttgttgactttccttctctgttttcccccatctgtttgccagaggggtgggactggcaacagaacagccgtggctgctttatctctcctctccacggtgtactcaggcctgagtggtgactcacgggagcctggccacctcgcagctgttcgccccctcaacctttgaactggaactgctggctcacacagggttttcgacaactgcagctgaatctcatggaaaagctggattcctctgccttacgcagaaacacccgggctccatctgccaggtgcttgccactggtcctggcagaaatggcggctgctgaaagtgaccttccaaatccttggtggcacttcagcgccacaggctctccaataaaaaccctttacacacaaaccatg

SEQ ID NO: 132219 - DNA, 866 bp, Homo sapiens
  Payload ID: 5820
  Gene Symbol: FAM174B
  Gene Name: family with sequence similarity 174, member B
  ENST ID: ENST00000555748
  CDS Start-End: 355-696
cgcgacctacccaccctcaaggcagccgtgatcgtggcgttcgcctttaccaccctcctcatcgcctgcctgctgctgcgcgtcttcaggtgggccctcccgccctcttccttcccccgccggccgacagggcggcatcgccaacctgctgtcgccgcgcgcccgccccacctgcacgcacaggtgccctggtgcgccccagccagccgtgtgcctcctgccctgcccgggagagtgggtggggggccggggtgtgctcgtctggattttcctggtcgggaaagaggttaaagaagacacgcaagtatgatatcatcaccactccagcagagcgagtggaaatggcgccactaaatgaagaggatgatgaagatgaggactccacagtattcgacatcaaatacaggtaaaacctgtttcccagcctggtggcatcctgtggaaagttggtcagctgcaacctggggtgtgaaggactggacctggaagccctcttgcgtcggaggtgttgaaaccaaaacgaacgttatgtataaaaccccagctccatcgtgcgtgtcaggcatctgctcagactgtcactggcaagctcgtttccacgtcaccacaatggagttgcttctgccaccctttgggcatccctttaaagtgccccctacttctactccccatgtaagaggctttgtgccttgctaaggagcaaagggtagaaacatgttgattttaaagaagtttttttaagacaattgttgacaatagtaaaagagatcaggaggatcaagaatctaaaacaagcctgaaggatgtccaactgtgtatttagaatttccgacattcttctctactggatctacacattggacccc

SEQ ID NO: 132220 - DNA, 555 bp, Homo sapiens
  Payload ID: 5820
  Gene Symbol: FAM174B
  Gene Name: family with sequence similarity 174, member B
  ENST ID: ENST00000557480
  CDS Start-End: 227-555
ccttccttccttcccctctcctcttcccctctctctctctttctctctccctctctccctcttggtttctcttttcttttctttctcagtgagaaaccagaatgggaaatatctactggagggtgaagatacaggaggaagcagaggtcgggaaagaggttaaagaagacacgcaagtatgatatcatcaccactccagcagagcgagtggaaatggcgccactaaatgaagaggatgatgaagatgaggactccacagtattcgacatcaaatacaggtaaaacctgtttcccagcctggtggcatcctgtggaaagttggtcagctgcaacctggggtgtgaaggactggacctggaagccctcttgcgtcggaggtgttgaaaccaaaacgaacgttatgtataaaaccccagctccatcgtgcgtgtcaggcatctgctcagactgtcactggcaagctcgtttccacgtcaccacaatggagttgcttctgccaccctttgggcatccctttaaagtgccccctacttctactccccatgtaagaggctt

SEQ ID NO: 132221 - DNA, 464 bp, Homo sapiens
  Payload ID: 5820
  Gene Symbol: FAM174B
  Gene Name: family with sequence similarity 174, member B
  ENST ID: ENST00000556824
  CDS Start-End: 191-464
tgtcatgtgtatttaactgtttacccaccaccgaaaagcttcctgccaggacccatctgcagtgtaaaaggggaaccctgaagccctgggaatggctcctagtacttcaggtcgggaaagaggttaaagaagacacgcaagtatgatatcatcaccactccagcagagcgagtggaaatggcgccactaaatgaagaggatgatgaagatgaggactccacagtattcgacatcaaatacaggtaaaacctgtttcccagcctggtggcatcctgtggaaagttggtcagctgcaacctggggtgtgaaggactggacctggaagccctcttgcgtcggaggtgttgaaaccaaaacgaacgttatgtataaaaccccagctccatcgtgcgtgtcaggcatctgctcagactgtcactggcaagctcgtttccacgtcaccacaatggagttgcttctgccac

SEQ ID NO: 132222 - DNA, 621 bp, Homo sapiens
  Payload ID: 5820
  Gene Symbol: FAM174B
  Gene Name: family with sequence similarity 174, member B
  ENST ID: ENST00000555064
  CDS Start-End: 168-509
aaaagaacttgcaggggcacctctgggtcctgagaagtgtctgttgaatgccgagtcgtagggttggggcacatccagaggtccgaggtcgggaaagaggttaaagaagacacgcaagtatgatatcatcaccactccagcagagcgagtggaaatggcgccactaaatgaagaggatgatgaagatgaggactccacagtattcgacatcaaatacaggtaaaacctgtttcccagcctggtggcatcctgtggaaagttggtcagctgcaacctggggtgtgaaggactggacctggaagccctcttgcgtcggaggtgttgaaaccaaaacgaacgttatgtataaaaccccagctccatcgtgcgtgtcaggcatctgctcagactgtcactggcaagctcgtttccacgtcaccacaatggagttgcttctgccaccctttgggcatccctttaaagtgccccctacttctactccccatgtaagaggctttgtgccttgctaaggagcaaagggtagaaacatgttgattttaaagaagtttttttaagacaattgttgacaatagtaaaagagatcaggaggatcaagaatctaaaacaagcctgaaggatgtc

SEQ ID NO: 132223 - DNA, 567 bp, Homo sapiens
  Payload ID: 5820
  Gene Symbol: FAM174B
  Gene Name: family with sequence similarity 174, member B
  ENST ID: ENST00000557398
  CDS Start-End: 367-567
aatgcattaattcgatccaagaggactcgcctcgttggatttgcagcaacctaatctctcgctcaggaagaaaacgccacgataaagagttttctgtcctccttgtttgcacggagcagcaaacgcagagacaaaagaaacgggccccgactggtggtggcagaagtgggatccaaagtagagcttctcgtaacccccagaagcactgagtgaccaagtgtgacaccagctggactcattgtgtccattgctctcttgcagcacctggggctcatgggtcgggaaagaggttaaagaagacacgcaagtatgatatcatcaccactccagcagagcgagtggaaatggcgccactaaatgaagaggatgatgaagatgaggactccacagtattcgacatcaaatacaggtaaaacctgtttcccagcctggtggcatcctgtggaaagttggtcagctgcaacctggggtgtgaaggactggacctggaagccctcttgcgtcggaggtgttgaaaccaaaacgaacgttatgtataaaaccccagctccatcgtgcgtgtcaggc

SEQ ID NO: 132224 - DNA, 548 bp, Homo sapiens
  Payload ID: 5820
  Gene Symbol: FAM174B
  Gene Name: family with sequence similarity 174, member B
  ENST ID: ENST00000555696
  CDS Start-End: 156-497
aagtttacgacttcataggagaagctggttatggacatgatctgcgtctcttcccaggaaggcaatcttgttagggtcgggaaagaggttaaagaagacacgcaagtatgatatcatcaccactccagcagagcgagtggaaatggcgccactaaatgaagaggatgatgaagatgaggactccacagtattcgacatcaaatacaggtaaaacctgtttcccagcctggtggcatcctgtggaaagttggtcagctgcaacctggggtgtgaaggactggacctggaagccctcttgcgtcggaggtgttgaaaccaaaacgaacgttatgtataaaaccccagctccatcgtgcgtgtcaggcatctgctcagactgtcactggcaagctcgtttccacgtcaccacaatggagttgcttctgccaccctttgggcatccctttaaagtgccccctacttctactccccatgtaagaggctttgtgccttgctaaggagcaaagggtagaaacatgttgattttaaagaagtttttttaagacaat

SEQ ID NO: 132225 - DNA, 495 bp, Homo sapiens
  Payload ID: 5820
  Gene Symbol: FAM174B
  Gene Name: family with sequence similarity 174, member B
  ENST ID: ENST00000553393
  CDS Start-End: 166-279
gcaaacacacccgagagctggaggaacaggtcttggggcatttgctgttgccggatttactgtgtgctgcttttgtcttggaagagtcgggaaagaggttaaagaagacacgcaagtatgatatcatcaccactccagcagagcgagtggaaatggcgccactaaatgaagaggatgatgaagatgaggactccacagtattcgacatcaaatacaggcctgagtggtgactcacgggagcctggccacctcgcagctgttcgccccctcaacctttgaactggaactgctggctcacacagggttttcgacaactgcagctgaatctcatggaaaagctggattcctctgccttacgcagaaacacccgggctccatctgccaggtgcttgccactggtcctggcagaaatggcggctgctgaaagtgaccttccaaatccttggtggcacttcagcgccacaggctctccaataaaaaccctttacacacaaa

SEQ ID NO: 132226 - DNA, 4291 bp, Homo sapiens
  Payload ID: 5821
  Gene Symbol: FAM175A
  Gene Name: family with sequence similarity 175, member A
  Uniprot ID: Q6UWZ7
  ENST ID: ENST00000321945
  CDS Start-End: 110-1339
gccggcgcaggccccgcctcctcgctgggccccgcctcgctgccaccacagggtcttgcctccgcgcgccccgccctcgtcctcttgtgtagcctgaggcggcggtagcatggagggggagagtacgtcggcggtgctctcgggctttgtgctcggcgcactcgctttccagcacctcaacacggactcggacacggaaggttttcttcttggggaagtaaaaggtgaagccaagaacagcattactgattcccaaatggatgatgttgaagttgtttatacaattgacattcagaaatatattccatgctatcagctttttagcttttataattcttcaggcgaagtaaatgagcaagcactgaagaaaatattatcaaatgtcaaaaagaatgtggtaggttggtacaaattccgtcgtcattcagatcagatcatgacgtttagagagaggctgcttcacaaaaacttgcaggagcatttttcaaaccaagaccttgtttttctgctattaacaccaagtataataacagaaagctgctctactcatcgactggaacattccttatataaacctcaaaaaggactttttcacagggtacctttagtggttgccaatctgggcatgtctgaacaactgggttataaaactgtatcaggttcctgtatgtccactggttttagccgagcagtacaaacacacagctctaaattttttgaagaagatggatccttaaaggaggtacataagataaatgaaatgtatgcttcattacaagaggaattaaagagtatatgcaaaaaagtggaagacagtgaacaagcagtagataaactagtaaaggatgtaaacagattaaaacgagaaattgagaaaaggagaggagcacagattcaggcagcaagagagaagaacatccaaaaagaccctcaggagaacatttttctttgtcaggcattacggaccttttttccaaattctgaatttcttcattcatgtgttatgtctttaaaaaatagacatgtttctaaaagtagctgtaactacaaccaccatctcgatgtagtagacaatctgaccttaatggtagaacacactgacattcctgaagctagtccagctagtacaccacaaatcattaagcataaagccttagacttagatgacagatggcaattcaagagatctcggttgttagatacacaagacaaacgatctaaagcagatactggtagtagtaaccaagataaagcatccaaaatgagcagcccagaaacagatgaagaaattgaaaagatgaagggttttggtgaatattcacggtctcctacattttgatccttttaaccttacaaggagatttttttatttggctgatgggtaaagccaaacatttctattgtttttactatgttgagctacttgcagtaagttcatttgtttttactatgttcacctgtttgcagtaatacacagataactcttagtgcatttacttcacaaagtactttttcaaacatcagatgcttttatttccaaacctttttttcacctttcactaagttgttgaggggaaggcttacacagacacattctttagaattggaaaagtgagaccaggcacagtggctcacacctgtaatcccagcacttagggaagacaagtcaggaggattgattgaagttaggagttagagaccagcctgggcaacgtattgagaccatgtctattaaaaaataaaatggaaaagcaagaatagccttattttcaaaatatggaaagaaatttatatgaaaatttatctgagtcattaaaattctccttaagtgatacttttttagaagtacattatggctagagttgccagataaaatgctggatatcatgcaataaatttgcaaaacatcatctaaaatttaaatttgtcctacatttgtacttgctaaatctggcagccttaattattacacaactataacacaacacaaacagtaatctctcccctagtttagagtcctttgcatgaaatttagcaaatctatcattttgaatacagtacaagcctggtaatccagtgtatttgggataggccagtggaactcagaactgatacatatatacatgtatgtctatcatattcaatgtctattaggtgtaaatcatctcttcatgtaaaagacactactggtttgagggtagactcgtctaggaatattttgtccttctgtgacagcaccactatccatcccaatgtaacatttctacaaagggaagatatcttaaccaggcatacttatatttgctagttggaaaatcattctgaacagttttaattccattctattgaatggattattgtatgagctatttggggatcagatataaatgacaatcacacagaaccacttttattcaacatagataaaatgtgatgagtgttaacattttaaataagcaatctgcttaatggacattggtatgaaggggaagtgtcattctttacctcactcctcaaacacttttctatccaaaggttggtttgagtcagtattggcatcatacaaccacttactgtaaaataagtttattagtggtaacgtgatagaatttattcccgatatctgatgttacaaactttagggtccttgagatatgcaggatccttgtatgtaactggcataaaccctgtaaagagataattaaagttcttgacaaaacataatgagcaaaatttcagctagctcaattcagttgttgaggtattctttcttacccattatttgagctctcttaattgcttttgtgatttctttctgtttcttcccacaaagacctgtaaaataaaaagctttcttattcataaaaaatgtcaatatttaaagtttgcaatttttttttttgagatggagtctccctgtgtcacccaggctggagtacagtggtgctctctcgcctcactgcaacctccgccacccaggctcaatcgattatcttgcctcagcctccttagtaactggaattacaggcatgcaccgccacacccggataatttttttgtatttgtagtagaaacggggtttcaccatattggccaggctggtcctgaactcctggcctcaggtgatctgcccacctcagcctcccaaagtgctgggattacaggtgtgagccaacatgcccagcctcaacaagtttttaagtcaaggattggtaaatcatttttgtcaagggccacaataataatctaggttttgtgggccatacagtctccatcactgccactcaactctgctgttgtagctcgaaaacaaccatatggcactacgtaaacaaaactacaaaaacaagtggggttgggtgcagtggctcacacctgtaatcccagcactttgggaggcctaggcaggtggatcacctgaggtcaggaattcaagaccagcctggccaacatggagaaacccaatctctaaaaatacaaaaattagccaggcgtggtggtgcatgcctgtaatcccagctattcgggaggctgaagcatgagaatcacttgaacccaggaggcagaggttgcagtgagccgagattgtgccacagcactccagcctgggtgacagtgagattccatctcaaaaaaaaaaaaaagtggcatttgtatatgatgaacctaatcaagataaaaagggagcaggtcgaatttggcctatgggccatagtttgctgacaccaagtttaagtatcaatctaggaatgattatagtatattccaaaacatcaacaacagttttttaaagcccagtttttctatatagttaactctgcataagacagcaaaataataatcctcttggcctaagagactttttcatagtaactagctctagtccctgtagtatctgatctagtagtaatttatagcacaatttgaaaatttgagttttcttaaatgatagaaatagattgatataattcgtatctacatttatattcccataataaaaaagaacatacctgtaatgtgccttccataaatgcatccagtaaatggagaaacaaactgggacaaaagctgttttggagttttatgtggaggggaaaaaaaagtatctgttatttatttctgaatgtgtaaatttcaaaaaacaaccttcaggttatataaagctttactaaatttcagacacatttcataaaatataagaaaaaaatattgttatcctcctgttaccttttaaatattttctatccagtgtgtcaagtctatatataattaaacagcagattaatcagca

SEQ ID NO: 132227 - DNA, 1732 bp, Homo sapiens
  Payload ID: 5821
  Gene Symbol: FAM175A
  Gene Name: family with sequence similarity 175, member A
  ENST ID: ENST00000515303
  CDS Start-End: 145-393
gggagagtacgtcggcggtgctctcgggctttgtgctcggcgcactcgctttccagcacctcaacacggactcggacacggaaggttttcttcttggggaagtaaaaggtgaagccaagaacagcattactgattcccaaatggatgatgttgaagttgtttatacaattgatggagtctcattctgtcgcccagactggagtgaagtggcatgatctcggctcactgcaacctctgcctctcgaggtcaagcgattctcctgcctcggcctccggagtagctgggattacaggcacacgcaaccatgcccggctaattttttttgtatttttagtagagatggggtttcaccatgttggccaggctggtctcgaactcctgacctcaagtgatcctctcacctcggcctcccaaagtgctgggattgcaggcgtgagccaccatgcccggccaaatgtgtatactttttatttacacaaatgggatcttactatatgtgcctaatatctcccaagatatcacaagtacagaatagtatctgtgtgtataattcatcactctttgttttttttttttttgagatgaggtcttgctctttcagccaggctggagtgtagtggcacaaacactggtcactgcagccttgacctcctgggcttaagcaatcctcctgcctcagcctcctgtattgctgggaccataggtatgcaccaccacgcctggctaattttttattgtttgtagagacaggttctcactttgttgcccaggctggtctcaaactcctaggctcaagcaatcctcctgtcattacaaagtgtttggattacaggggtgagccaccatactcggcccatcattctttctgctggctgcatatatcctgttgtatagacgtaccataatttttttaaccatctaagaatgattttctgggtttttttgttaacataaacagtattaccatgaacatttagtattgtacatttctttgtgctgttgagtgtatatttgaaagtcacactcctggaggtagactagctgattgccttttggaaaacttatgccattttaggcttctccacagtatataaaagtgcctaggtccccatactctttttttttttttttttttgaaacagagtctcactctgtcacccaggctggagtgcagtggtgggattccggctcactgcaacctctgcttcccgggttcaagtgattatccctgtctcagcctcccgagtagctgggattaccggcgactgccaccacacccagccaatatttgtatttttagtagagatggggctttgccatcttggccaagctggtctcaaacacctgacctcaggtgatctgcccgccctggcctcccaaagtgctaggattacaggcgtgagtcaccatgcccggcccccatgctcttgccaacactaggtattatcaaatcttttaatctttgccaatttgataagtgaaaaaaatagcattttaatttgcatttcttaattacaaaagaggttaagtatttttttgatactttttactttttttcttggccattttctctgaaaaggataggcctattctttggctgcatttgtactgttttgcttttagtgatttgtaatcacattacttaaggaaactgggcttttgtcatgttttatacatatgctaatacagtttataattttttttctgtcaataaacactttaatgagaacc

SEQ ID NO: 132228 - DNA, 682 bp, Homo sapiens
  Payload ID: 5821
  Gene Symbol: FAM175A
  Gene Name: family with sequence similarity 175, member A
  ENST ID: ENST00000511801
  CDS Start-End: 32-145
gtcctcttgtgtagcctgaggcggcggtagcatggagggggagagtacgtcggcggtgctctcgggctttgtgctcggcgcactcgctttccagcacctcaacacggactcggacacggtcgggcgcggtggctcacgcctgtaattccagccctttgggaagccgaggcgggtgaatcacctgagcccacgagttcgagaccatcggggacaacgtagtgagacccggtctctacaaaatctaaacattacaaaattgctctttggcacaatcctaataaaggttggaattggaaggttttcttcttggggaagtaaaaggtgaagccaagaacagcattactgattcccaaatggatgatgttgaagttgtttatacaattgacattcagaaatatattccatgctatcagctttttagcttttataattcttcaggcgaagtaaatgagcaagcactgaagaaaatattatcaaatgtcaaaaagaatgtggtaggttggtacaaattccgtcgtcattcagatcagatcatgacgtttagagagaggctgcttcacaaaaacttgcaggagcatttttcaaaccaagaccttgtttttctgctattaacaccaagtataataacagaaagctgctctactcatcgactggaacattccttatataaacctcaaaaagg

SEQ ID NO: 132229 - DNA, 2718 bp, Homo sapiens
  Payload ID: 5821
  Gene Symbol: FAM175A
  Gene Name: family with sequence similarity 175, member A
  ENST ID: ENST00000475656
  CDS Start-End: 32-256
gtcctcttgtgtagcctgaggcggcggtagcatggagggggagagtacgtcggcggtgctctcgggctttgtgctcggcgcactcgctttccagcacctcaacacggactcggacacggaaggttttcttcttggggaagtaaaaggtgaagccaagaacagcattactgattcccaaatggatgatgttgaagttgtttatacaattgacattcagaaatatattccatgctatcagctttttagaatgtggtaggttggtacaaattccgtcgtcattcagatcagatcatgacgtttagagagaggctgcttcacaaaaacttgcaggagcatttttcaaaccaagaccttgtttttctgctattaacaccaagtataataacagaaagctgctctactcatcgactggaacattccttatataaacctcaaaaaggactttttcacagggtacctttagtggttgccaatctgggcatgtctgaacaactgggttataaaactgtatcaggttcctgtatgtccactggttttagccgagcagtacaaacacacagctctaaattttttgaagaagatggatccttaaaggaggtacataagataaatgaaatgtatgcttcattacaagaggaattaaagagtatatgcaaaaaagtggaagacagtgaacaagcagtagataaactagtaaaggatgtaaacagattaaaacgagaaattgagaaaaggagaggagcacagattcaggcagcaagagagaagaacatccaaaaagaccctcaggagaacatttttctttgtcaggcattacggaccttttttccaaattctgaatttcttcattcatgtgttatgtctttaaaaaatagacatgtttctaaaagtagctgtaactacaaccaccatctcgatgtagtagacaatctgaccttaatggtagaacacactgacattcctgaagctagtccagctagtacaccacaaatcattaagcataaagccttagacttagatgacagatggcaattcaagagatctcggttgttagatacacaagacaaacgatctaaagcagatactggtagtagtaaccaagataaagcatccaaaatgagcagcccagaaacagatgaagaaattgaaaagatgaagggttttggtgaatattcacggtctcctacattttgatccttttaaccttacaaggagatttttttatttggctgatgggtaaagccaaacatttctattgtttttactatgttgagctacttgcagtaagttcatttgtttttactatgttcacctgtttgcagtaatacacagataactcttagtgcatttacttcacaaagtactttttcaaacatcagatgcttttatttccaaacctttttttcacctttcactaagttgttgaggggaaggcttacacagacacattctttagaattggaaaagtgagaccaggcacagtggctcacacctgtaatcccagcacttagggaagacaagtcaggaggattgattgaagttaggagttagagaccagcctgggcaacgtattgagaccatgtctattaaaaaataaaatggaaaagcaagaatagccttattttcaaaatatggaaagaaatttatatgaaaatttatctgagtcattaaaattctccttaagtgatacttttttagaagtacattatggctagagttgccagataaaatgctggatatcatgcaataaatttgcaaaacatcatctaaaatttaaatttgtcctacatttgtacttgctaaatctggcagccttaattattacacaactataacacaacacaaacagtaatctctcccctagtttagagtcctttgcatgaaatttagcaaatctatcattttgaatacagtacaagcctggtaatccagtgtatttgggataggccagtggaactcagaactgatacatatatacatgtatgtctatcatattcaatgtctattaggtgtaaatcatctcttcatgtaaaagacactactggtttgagggtagactcgtctaggaatattttgtccttctgtgacagcaccactatccatcccaatgtaacatttctacaaagggaagatatcttaaccaggcatacttatatttgctagttggaaaatcattctgaacagttttaattccattctattgaatggattattgtatgagctatttggggatcagatataaatgacaatcacacagaaccacttttattcaacatagataaaatgtgatgagtgttaacattttaaataagcaatctgcttaatggacattggtatgaaggggaagtgtcattctttacctcactcctcaaacacttttctatccaaaggttggtttgagtcagtattggcatcatacaaccacttactgtaaaataagtttattagtggtaacgtgatagaatttattcccgatatctgatgttacaaactttagggtccttgagatatgcaggatccttgtatgtaactggcataaaccctgtaaagagataattaaagttcttgacaaaacataatgagcaaaatttcagctagctcaattcagttgttgaggtattctttcttacccattatttgagctctcttaattgcttttgtgatttctttctgtttcttcccacaaagacctgtaaaataaaaagctttcttattcat

SEQ ID NO: 132230 - DNA, 1869 bp, Homo sapiens
  Payload ID: 5821
  Gene Symbol: FAM175A
  Gene Name: family with sequence similarity 175, member A
  ENST ID: ENST00000506553
  CDS Start-End: 327-1409
attagtattctgtaagtttcagtgagtgaagggtgctaaaatgcagcttgaaaaccaaaaccgtggcatatccactgtggcatcgtaatgttgctactcaactcttttattcttgtaatcattgcttgtcttaaaatgaccctgtcaaccgtgttcattttgatagctttgcatgtttgtgacaggtcgctcagcaggcgcaggccaccaaaagcaattcgcagccctctgcagtggtaccgacatgcagcggccttccgggagaggaaggttttcttcttggggaagtaaaaggtgaagccaagaacagcattactgattcccaaatggatgatgttgaagttgtttatacaattgacattcagaaatatattccatgctatcagctttttagcttttataattcttcaggcgaagtaaatgagcaagcactgaagaaaatattatcaaatgtcaaaaagaatgtggtaggttggtacaaattccgtcgtcattcagatcagatcatgacgtttagagagaggctgcttcacaaaaacttgcaggagcatttttcaaaccaagaccttgtttttctgctattaacaccaagtataataacagaaagctgctctactcatcgactggaacattccttatataaacctcaaaaaggactttttcacagggtacctttagtggttgccaatctgggcatgtctgaacaactgggttataaaactgtatcaggttcctgtatgtccactggttttagccgagcagtacaaacacacagctctaaattttttgaagaagatggatccttaaaggaggtacataagataaatgaaatgtatgcttcattacaagaggaattaaagagtatatgcaaaaaagtggaagacagtgaacaagcagtagataaactagtaaaggatgtaaacagattaaaacgagaaattgagaaaaggagaggagcacagattcaggcagcaagagagaagaacatccaaaaagaccctcaggagaacatttttctttgtcaggcattacggaccttttttccaaattctgaatttcttcattcatgtgttatgtctttaaaaaatagacatgtttctaaaagtagctgtaactacaaccaccatctcgatgtagtagacaatctgaccttaatggtagaacacactgacattcctgaagctagtccagctagtacaccacaaatcattaagcataaagccttagacttagatgacagatggcaattcaagagatctcggttgttagatacacaagacaaacgatctaaagcagatactggtagtagtaaccaagataaagcatccaaaatgagcagcccagaaacagatgaagaaattgaaaagatgaagggttttggtgaatattcacggtctcctacattttgatccttttaaccttacaaggagatttttttatttggctgatgggtaaagccaaacatttctattgtttttactatgttgagctacttgcagtaagttcatttgtttttactatgttcacctgtttgcagtaatacacagataactcttagtgcatttacttcacaaagtactttttcaaacatcagatgcttttatttccaaacctttttttcacctttcactaagttgttgaggggaaggcttacacagacacattctttagaattggaaaagtgagaccaggcacagtggctcacacctgtaatcccagcacttagggaagacaagtcaggaggattgattgaagttaggagttagagaccagcctgggcaacgtattgagaccatgtctattaaaaaataaaatggaaaagcaagaatagccttattttcaaaatatggaaagaaatttatatgaaaa

SEQ ID NO: 132231 - DNA, 847 bp, Homo sapiens
  Payload ID: 5821
  Gene Symbol: FAM175A
  Gene Name: family with sequence similarity 175, member A
  ENST ID: ENST00000505489
  CDS Start-End: 188-847
gggacttctaataccccaacactacaaagctttagattttcagtattcgtaaggaaaggtgtgatacctttcctcactcatcaccagggtcacagccaacagccctataacaaaagacaggttaacaagagaaaagaacgacaaatttatttaatcaaagtttaacacgacataggcgccttcagaaatgaagacctcaagccccaaggaaaactgtctatttttatgcttcacttcgatgaagaatggacaggaaggttttcttcttggggaagtaaaaggtgaagccaagaacagcattactgattcccaaatggatgatgttgaagttgtttatacaattgacattcagaaatatattccatgctatcagctttttagcttttataattcttcaggcgaagtaaatgagcaagcactgaagaaaatattatcaaatgtcaaaaagaatgtggtaggttggtacaaattccgtcgtcattcagatcagatcatgacgtttagagagaggctgcttcacaaaaacttgcaggagcatttttcaaaccaagaccttgtttttctgctattaacaccaagtataataacagaaagctgctctactcatcgactggaacattccttatataaacctcaaaaaggactttttcacagggtacctttagtggttgccaatctgggcatgtctgaacaactgggttataaaactgtatcaggttcctgtatgtccactggttttagccgagcagtacaaacacacagctctaaattttttgaagaagatggatccttaaaggaggtacataagataaatgaaatgtatgcttcattacaagaggaattaaag

SEQ ID NO: 132232 - DNA, 595 bp, Homo sapiens
  Payload ID: 5821
  Gene Symbol: FAM175A
  Gene Name: family with sequence similarity 175, member A
  ENST ID: ENST00000503217
  CDS Start-End: 29-595
ctcttgtgtagcctgaggcggcggtagcatggagggggagagtacgtcggcggtgctctcgggctttgtgctcggcgcactcgctttccagcacctcaacacggactcggacacggtgagccgagggacggggcggggtccggcgtcgcctgggaagagccctgcgcgcggcctgcctccccgctgttgctccggtccccgcccgctcccccgacgccgccgcgcctcctccctgcggtcgcggctctgccttctctccccctcagcggtccctgaggaaggttttcttcttggggaagtaaaaggtgaagccaagaacagcattactgattcccaaatggatgatgttgaagttgtttatacaattgacattcagaaatatattccatgctatcagctttttagcttttataattcttcaggcgaagtaaatgagcaagcactgaagaaaatattatcaaatgtcaaaaagaatgtggtaggttggtacaaattccgtcgtcattcagatcagatcatgacgtttagagagaggctgcttcacaaaaacttgcaggagcatttttcaaaccaagaccttgtttttctgctatta

SEQ ID NO: 132233 - DNA, 655 bp, Homo sapiens
  Payload ID: 5821
  Gene Symbol: FAM175A
  Gene Name: family with sequence similarity 175, member A
  ENST ID: ENST00000611288
  CDS Start-End: 1-597
ctgcttcacaaaaacttgcaggagcatttttcaaaccaagaccttgtttttctgctattaacaccaagtataataacagaaagctgctctactcatcgactggaacattccttatataaacctcaaaaaggactttttcacagggtacctttagtggttgccaatctgggcatgtctgaacaactgggttataaaactgtatcaggttcctgtatgtccactggttttagccgagcagtacaaacacacagctctaaattttttgaagaagatggatccttaaaggaggtacataagataaatgaaatgtatgcttcattacaagaggaattaaagctctactccttttctgaatgtcatcttcatccaggatccaggctgaaggagcagcccttatttgggacatgtcctcatggcataaggcaaagagcaagaaagctagtggattacaggcgtgagccaccgcagctggcccatgagttaatatttcagtttatttctgtatattttcagcgaactaactggcatgataaaagctgtataaatgagaagttacatgtgaaaaagcattttacaacctataaggcttatttataacctacaagtgcttgttactgacatcctccagaaaataaataaaatttatataaaaggc

SEQ ID NO: 132234 - DNA, 2992 bp, Homo sapiens
  Payload ID: 5822
  Gene Symbol: FAM175B
  Gene Name: family with sequence similarity 175, member B
  Uniprot ID: Q15018
  ENST ID: ENST00000298492
  CDS Start-End: 46-1293
gtgtgccctccgcggggcatgatggggtagctggagatttccatcatggcggcgtccatttcgggctacaccttcagtgctgtgtgtttccacagcgccaacagcaacgcggaccacgaaggatttttactgggagaggtaagacaagaggaaacgtttagcatcagtgactcacaaatcagcaacacagaatttctgcaagtaattgaaatccataaccatcagccttgttcaaaactttttagtttttatgactacgcaagcaaagtgaatgaggagagtttggacaggattcttaaagatcggagaaagaaagtcattgggtggtacagattccggcgcaatacgcagcagcagatgtcctacagagagcaggttcttcacaagcagctcacccgcatcctcggcgtgcccgacctcgtctttcttctcttcagcttcatctccactgccaacaattccactcacgctttagaatatgtgctcttcagaccaaatagaaggtataatcagaggatatcactcgctattcccaatctaggaaatactagccagcaagagtacaaagtgtcttcagtgccaaatacttctcagagttatgccaaagtgattaaagaacatggtactgacttttttgacaaggatggagtgatgaaagacatcagggcgatttatcaggtttataatgcacttcaggagaaagttcaggcagtgtgtgcagatgttgaaaagagtgagcgagttgttgaatcttgtcaggcagaagtgaacaaattaagaagacaaatcactcagaggaaaaatgaaaaggaacaagaaagaagattgcagcaggcagtgttaagcagacagatgccgtctgaaagcttggacccagcgttcagtcctcggatgccgtcctctgggtttgcagctgaaggcagaagtacacttggagatgcagaggcctcggatcctcctcccccttactctgattttcacccaaacaatcaagaaagtactttgagccactctcgcatggaaaggagtgtctttatgcctcgacctcaagctgtgggctcttccaattatgcttccaccagtgccggactgaagtatcctggaagtggggctgaccttcctcctccccaaagagcagctggagacagtggtgaggattcagacgacagtgattatgaaaatttgattgaccctacagagccttctaatagtgaatactcacattcaaaggattctcgacccatggcacatcccgacgaggaccccaggaacactcagacctcccagatttaactaaacaaaagaaactctccacctagcactgtttttcttcattgcttactgagagggtttttgagaacttaatctggggggagaactgctttctcagataccttaactcccgagaagagagtccttgtgcacagaacttgtgggagcctccatccgctgctctttacctttggatacagtgtgcaagtttcatgacagaatcattaagataatcaaattgtcctaattctggtgcgattcatggatatactggtaaatttaggcaaagtgaaacttatcagcgtagtttctgttctttaaaataaattggaaattagagactaagcacaattagtctataaatgttctataaatcaaaaacttacctcttgcactatcatgccttgaaatttactttttcaaagggaaacaagtttagcagcagccttcaaagaacttctttctatgatgagccaaattcatctttgccagaaaagaaattttgataattccaagaagcctgattagaacaaatcagatataccttctcttgtctgcatgactttgtgagataaaagagagggcttccaacttttttctactagcttgatatgtattatcacttaaaatggttgcctttaaaaaaaaaaagtagagatactaattaccagtaagtaatcatccaaataaatacgtcataaaataaattaattattttttctttgatggattacagtgactactgtgttgcactggcacatttatggtctctgttctggaatcttggaggacacacagcagtggagaacagaaggagtgagttttataatgaacagattccagacacggtaggtttagctgagttcatacagaggagatataactcatttagatcttctgacaaatcctagtgttagttttatctgtggaggaaagacatttaataataaactgtttgggaatcttggtgaataaagattcattttcaagctgaataaccatacttattttattttaagttgccatttggggaataattgcagtatgtgtagagactctcttgggatgcacttatatttttatttaatgactacttgttttctagttttgcccacaacgtctgaaaccactaagacattcaggagcatgttgagcttctggtttggaaacagcaagacccaccatttatgacaaggacagccatgaggttaatacttggagtttaactgccttccctttgaactagttaaaatctgtaagaataaggaagttgttgaaggcttaaaatctgggttctgaaaaagtagtttcagtttataggatacacatttactcactgagctccagttccaatactaaattagacagtatcatatagacggaaaatgaaatgctagaactgccgttctttggatcgccactctatgggggtctgtcttttaactactctcctggttatgttggccttacaccactgccatttgatttaaaacgctgcagaccactttatctgcaaatgtgttccagttgttatcagctacctactacgcagcttcagcgccagtgtgaatttatttttttttaagtgccattaccgtctcctctgttcagattttgacattcaggaaaatatttttattttgatgccatactgaaatctacaatgtatatctgacaaagcagttaaatgtgacaataaaaaacttatttaatcatggta

SEQ ID NO: 132235 - DNA, 2927 bp, Homo sapiens
  Payload ID: 5823
  Gene Symbol: FAM177A1
  Gene Name: family with sequence similarity 177, member A1
  Uniprot ID: Q8N128
  ENST ID: ENST00000280987
  CDS Start-End: 62-772
gcgggtgagtcccacttcccgacagcctggctcggccagcgactgggcggggagaccaaggatggaagtgggcttaccggccattaccctctttctcaccagcgccagcagccctgtggtggcgacgacgatggaccaggagccagtgggcggtgtggaacgaggagaagccgtcgcagcctcgggagctgcggccgccgcggcattcggggaatctgcagggcagatgagtaacgaaagaggctttgaaaatgtagaactgggagtcataggaaaaaagaagaaagtcccaaggagagtcatccactttgttagtggtgaaacaatggaagaatatagcacagatgaagacgaagttgatggcctggagaagaaagatgttttgcctactgttgatccgacaaaacttacctggggtccctacttatggttttacatgcttcgggctgctacatcaactctctcagtgtgtgacttccttggagagaagattgcatctgttttgggtatcagcaccccaaagtaccaatatgccattgatgaatattatcggatgaagaaggaggaagaagaagaagaagaagaaaacaggatgtctgaagaagcagaaaaacaatatcaacagaataaattgcagactgattccattgttcagacagatcaaccagagacagtgatatccagctcatttgtgaatgtcaattttgaaatggagggagacagtgaagtaattatggaaagcaagcaaaatccagtctctgtcccaccataaaatgaaatgactatcaagcttcaaactcttaagttttttttttttaatacaaaaactttcacattctttattcagtgggacttaatacaattatttatattttaaattattaaagtatctggaaagggaaaatgttttcttcatttttaggatctatctagcaaaagccagatctgaaattcagatatttgtactgtttttactgtgtatagaaattagtgctttggttttaaaatgatcttttaaaaaagttaaggacatcctagagccttaatagttaagaagagttaaattatcaagcctatttgtgcatttgctttttttgaaaaaggtaagttgctgattaagtctaattggaattgataattccatagtcttagattaaaatgaggatattttctcctagattttctcatgttatgccatgcatttatatatctaaccattaatttcacactaaggatgcttcaccatataataaaaggagcaagatggaagcactttgaattttctttcattgagaataactgttttatgtaagaatctgtatttataacaccagatattaagataggcttccattttttaatgcaagccacttacttaatcttgtattctttttcaggactcaaataactagctttgaacataatattaaaacactacttatagaatagatttattaatgttaatacctagtgaatatccatgtggcatcctggttatgttatcggttcagcgttaatcctatagaaaagtggtttggaggggattgggggatagtgggacaggtatagatttaatccatcaggagcaattagatattgtataaggtgcaatgatagcctaatgaaattacccgtcattcatcatttagaagtagcaacagtgaagactggacagtttacttgaatctggttggccactcctctacctacttggttatttgtaaaccttacaaatgtatatattgtgaagctaattttgaaaatattcctaaatatggccaggtacggtgctcacacctgtaatcccagcactttgggaggctgaagtgggcagattacttgaggtcaggagtttgagaccagcctggccaacgtagtgaaaccccgtctctacaaaaatacaaaaattagccaggcgtggtggtgcacgtctgtaatcccagctgctcgggaggctgaggcaggagaatcacttgaaccagggaggtggaggttgcagtgagccaagattgcaccactgcactccagcctgggcgacagagtgagactccatcttggggggaaaaaagtatatatatatacacacacacagacacacacacacacacatatatctctaaatgtgtgtatagaaccttttatcagtataacattgatttataattaaatgtgggtgaggaagaatgtgtggagtgtttcagaaattttgatcttaaaagccttttcagaaactcaaagctttcagaaattaatagttatattaatagccttctaaacagcattaagttttcaattttaatatatctatataaaatatagtgtcaaagaaagtaacatcaatatagtgggtctgtaatggaaatctgtcaatgaacatgaactgagttcttcaactacaggttgaaggataattaaacttttcattaggagtgttcagctacatggattcatggaatggtggttcatagtaagtgatggtaatctttttattcatgggtgtaaaccctttataacttagtgcttaaaatattaatcttttgattatataatgtcccatgaattatagtttaccaatagttctaaaacatgctaacctgaccttttccttctaatttgtttttaacttcattcgagatagtacctctcactcacagatatttatttggttatcaagtgaagataggtgtgtctaaaagtgatcttctgaatcctgtctccctagaggtactagtatctagagtttacccagaaaattttatgattgtaacaaaaggaagtagtgacttatgaaggttttgtttcttgaattttacttttgctacttgtccaatagtggctagtttatgtttatcaatatagttattcactgtgccttaagtttatactttgtttatgcaaactataaaatttcccataaatgtattcaa

SEQ ID NO: 132236 - DNA, 858 bp, Homo sapiens
  Payload ID: 5823
  Gene Symbol: FAM177A1
  Gene Name: family with sequence similarity 177, member A1
  Uniprot ID: Q8N128
  ENST ID: ENST00000382406
  CDS Start-End: 58-699
aggcgcggcgcgaggcgggcgctgggcggcgccagcagccctgtggtggcgacgacgatggaccaggagccagtgggcggtgtggaacgaggagaagccgtcgcagcctcgggagctgcggccgccgcggcattcggggaatctgcagggcagatgagtaacgaaagaggctttgaaaatgtagaactgggagtcataggaaaaaagaagaaagtcccaaggagagtcatccactttgttagtggtgaaacaatggaagaatatagcacagatgaagacgaagttgatggcctggagaagaaagatgttttgcctactgttgatccgacaaaacttacctggggtccctacttatggttttacatgcttcgggctgctacatcaactctctcagtgtgtgacttccttggagagaagattgcatctgttttgggtatcagcaccccaaagtaccaatatgccattgatgaatattatcggatgaagaaggaggaagaagaagaagaagaagaaaacaggatgtctgaagaagcagaaaaacaatatcaacagaataaattgcagactgattccattgttcagacagatcaaccagagacagtgatatccagctcatttgtgaatgtcaattttgaaatggagggagacagtgaagtaattatggaaagcaagcaaaatccagtctctgtcccaccataaaatgaaatgactatcaagcttcaaactcttaagttttttttttttaatacaaaaactttcacattctttattcagtgggacttaatacaattatttatattttaaattattaaagtatctggaaagggaaaatgttttcttcatttttaggatctatct

SEQ ID NO: 132237 - DNA, 3254 bp, Homo sapiens
  Payload ID: 5823
  Gene Symbol: FAM177A1
  Gene Name: family with sequence similarity 177, member A1
  Uniprot ID: Q8N128
  ENST ID: ENST00000396472
  CDS Start-End: 460-1101
aagaaaattgtaatttgatatttaattgccactttggaaaataaaatcatgcatttataaatatcccacaaagttttagtaataaagattgttgattgccctgcttgccagtaagaaggaagagattttgaatacatataatgcagaactgtgttgtttatgaatgccaattcatgaagtcttaacaattggttctttatttttgttttcaatttatggccgagtttggttttgctgttttggactgtctcaactccctgctgatgccaccatacagagtcagatcagcaaccacatcccatcactagcctttgaagtacaacgacacagctgtcttcattttacaagtgcaaaaaccgaggtcctgcggggtgactgccccagacgccgctggtgacgggctgcgccgaggtcgagacgccaggcttcagcgccagcagccctgtggtggcgacgacgatggaccaggagccagtgggcggtgtggaacgaggagaagccgtcgcagcctcgggagctgcggccgccgcggcattcggggaatctgcagggcagatgagtaacgaaagaggctttgaaaatgtagaactgggagtcataggaaaaaagaagaaagtcccaaggagagtcatccactttgttagtggtgaaacaatggaagaatatagcacagatgaagacgaagttgatggcctggagaagaaagatgttttgcctactgttgatccgacaaaacttacctggggtccctacttatggttttacatgcttcgggctgctacatcaactctctcagtgtgtgacttccttggagagaagattgcatctgttttgggtatcagcaccccaaagtaccaatatgccattgatgaatattatcggatgaagaaggaggaagaagaagaagaagaagaaaacaggatgtctgaagaagcagaaaaacaatatcaacagaataaattgcagactgattccattgttcagacagatcaaccagagacagtgatatccagctcatttgtgaatgtcaattttgaaatggagggagacagtgaagtaattatggaaagcaagcaaaatccagtctctgtcccaccataaaatgaaatgactatcaagcttcaaactcttaagttttttttttttaatacaaaaactttcacattctttattcagtgggacttaatacaattatttatattttaaattattaaagtatctggaaagggaaaatgttttcttcatttttaggatctatctagcaaaagccagatctgaaattcagatatttgtactgtttttactgtgtatagaaattagtgctttggttttaaaatgatcttttaaaaaagttaaggacatcctagagccttaatagttaagaagagttaaattatcaagcctatttgtgcatttgctttttttgaaaaaggtaagttgctgattaagtctaattggaattgataattccatagtcttagattaaaatgaggatattttctcctagattttctcatgttatgccatgcatttatatatctaaccattaatttcacactaaggatgcttcaccatataataaaaggagcaagatggaagcactttgaattttctttcattgagaataactgttttatgtaagaatctgtatttataacaccagatattaagataggcttccattttttaatgcaagccacttacttaatcttgtattctttttcaggactcaaataactagctttgaacataatattaaaacactacttatagaatagatttattaatgttaatacctagtgaatatccatgtggcatcctggttatgttatcggttcagcgttaatcctatagaaaagtggtttggaggggattgggggatagtgggacaggtatagatttaatccatcaggagcaattagatattgtataaggtgcaatgatagcctaatgaaattacccgtcattcatcatttagaagtagcaacagtgaagactggacagtttacttgaatctggttggccactcctctacctacttggttatttgtaaaccttacaaatgtatatattgtgaagctaattttgaaaatattcctaaatatggccaggtacggtgctcacacctgtaatcccagcactttgggaggctgaagtgggcagattacttgaggtcaggagtttgagaccagcctggccaacgtagtgaaaccccgtctctacaaaaatacaaaaattagccaggcgtggtggtgcacgtctgtaatcccagctgctcgggaggctgaggcaggagaatcacttgaaccagggaggtggaggttgcagtgagccaagattgcaccactgcactccagcctgggcgacagagtgagactccatcttggggggaaaaaagtatatatatatacacacacacagacacacacacacacacatatatctctaaatgtgtgtatagaaccttttatcagtataacattgatttataattaaatgtgggtgaggaagaatgtgtggagtgtttcagaaattttgatcttaaaagccttttcagaaactcaaagctttcagaaattaatagttatattaatagccttctaaacagcattaagttttcaattttaatatatctatataaaatatagtgtcaaagaaagtaacatcaatatagtgggtctgtaatggaaatctgtcaatgaacatgaactgagttcttcaactacaggttgaaggataattaaacttttcattaggagtgttcagctacatggattcatggaatggtggttcatagtaagtgatggtaatctttttattcatgggtgtaaaccctttataacttagtgcttaaaatattaatcttttgattatataatgtcccatgaattatagtttaccaatagttctaaaacatgctaacctgaccttttccttctaatttgtttttaacttcattcgagatagtacctctcactcacagatatttatttggttatcaagtgaagataggtgtgtctaaaagtgatcttctgaatcctgtctccctagaggtactagtatctagagtttacccagaaaattttatgattgtaacaaaaggaagtagtgacttatgaaggttttgtttcttgaattttacttttgctacttgtccaatagtggctagtttatgtttatcaatatagttattcactgtgccttaagtttatactttgtttatgcaaactataaaatttcccataaatgtattc

SEQ ID NO: 132238 - DNA, 731 bp, Homo sapiens
  Payload ID: 5823
  Gene Symbol: FAM177A1
  Gene Name: family with sequence similarity 177, member A1
  ENST ID: ENST00000553955
  CDS Start-End: 1-23
ttctccgcgggccgctcttttagcctgcgcggccgtcctccgagcaggccgccccagctttggagttcctcctcactgcacccctgtttctgctcactgagaccagcttgtgggaaggagcgccccccgcctcactcaccaaccccttggctggcagcacagcagactctggggcggcctcgggttcctggggtgatagtccagcttctggtctaccagaggaagaagaaaggcgtgtcccccaaaggctgtccttgcagtagctggaagccaggtgagggcggcttcaaccacttctcagtctcttctggtgcgagcgcctgcctgggcatctgccctttgcttggcatatgccaaacgtttaccagctttaattcactggatccttacagtaaccgctcgagatgagtaacgaaagaggctttgaaaatgtagaactgggagtcataggaaaaaagaagaaagtcccaaggagagtcatccactttgttagtggtgaaacaatggaagaatatagcacagatgaagacgaagttgatggcctggagaagaaagatgttttgcctactgttgatccgacaaaacttacctggggtccctacttatggttttacatgcttcgggctgctacatcaactctctcagtgtgtgacttccttggagagaagattgcatctgttttgggtatcagcaccccaaagtaccaatatgccattgatgaatattatcgg

SEQ ID NO: 132239 - DNA, 516 bp, Homo sapiens
  Payload ID: 5823
  Gene Symbol: FAM177A1
  Gene Name: family with sequence similarity 177, member A1
  ENST ID: ENST00000553852
  CDS Start-End: 1-111
gcggccgccgcggcattcggggaatctgcagggcaggtaggtggggccgccgaggctgacgtccggggagccgagccgcctccttgccttctccgcgggccgctcttttagcctgcgcggccgtcctccgagcaggccgccccagctttggagttcctcctcactgcacccctgtttctgctcactgagaccagcttgtgggaaggagcgccccccgcctcactcaccaaccccttggctggcagcacagcagactctggggcggcctcgggttcctggggtgatagtccagcttctggtctaccagaggaagaagaaaggcgtgtcccccaaaggctgtccttgcagtagctggaagccagatgagtaacgaaagaggctttgaaaatgtagaactgggagtcataggaaaaaagaagaaagtcccaaggagagtcatccactttgttagtggtgaaacaatggaagaatatagcacagatgaagacgaagttgatggcctggagaagaaagatg

SEQ ID NO: 132240 - DNA, 476 bp, Homo sapiens
  Payload ID: 5823
  Gene Symbol: FAM177A1
  Gene Name: family with sequence similarity 177, member A1
  ENST ID: ENST00000555211
  CDS Start-End: 250-476
aatttatggccgagtttggttttgctgttttggactgtctcaactccctgctgatgccaccatacagagtcagatcagcaaccacatcccatcactagcctttgaagtacaacgacacagctgtcttcattttacaagtgcaaaaaccgaggtcctgcggggtgactgccccagacgccgctggtgacgggctgcgccgaggtcgagacgccaggcttcagcgccagcagccctgtggtggcgacgacgatggaccaggagccagtgggcggtgtggaacgaggagaagccgtcgcagcctcgggagctgcggccgccgcggcattcggggaatctgcagggcagatgagtaacgaaagaggctttgaaaatgtagaactgggagtcataggaaaaaagaagaaagtcccaaggagagtcatccactttgttagtggtgaaacaatggaagaatatagcacagatgaagacgaagt

SEQ ID NO: 132241 - DNA, 499 bp, Homo sapiens
  Payload ID: 5823
  Gene Symbol: FAM177A1
  Gene Name: family with sequence similarity 177, member A1
  ENST ID: ENST00000554794
  CDS Start-End: 79-499
taccaaaagtttttcacgtgtaatgaaagaaaattaatctcacttgaaactcattttcttaaaatatcgttgatatagatgagtaacgaaagaggctttgaaaatgtagaactgggagtcataggaaaaaagaagaaagtcccaaggagagtcatccactttgttagtggtgaaacaatggaagaatatagcacagatgaagacgaagttgatggcctggagaagaaagatgttttgcctactgttgatccgacaaaacttacctggggtccctacttatggttttacatgcttcgggctgctacatcaactctctcagtgtgtgacttccttggagagaagattgcatctgttttgggtatcagcaccccaaagtaccaatatgccattgatgaatattatcggatgaagaaggaggaagaagaagaagaagaagaaaacaggatgtctgaagaagcagaaaaacaatatcaacagaataaattgcagactgattcca

SEQ ID NO: 132242 - DNA, 912 bp, Homo sapiens
  Payload ID: 5823
  Gene Symbol: FAM177A1
  Gene Name: family with sequence similarity 177, member A1
  ENST ID: ENST00000555260
  CDS Start-End: 1-148
gaataaattgcagactgattccattgttcagacagatcaaccagagacagtgatatccagctcatttgtgaatgtcaattttgaaatggagggagacagtgaagtaattatggaaagcaagcaaaatccagtctctgtcccaccataaaatgaaatgactatcaagcttcaaactcttaagttttttttttttaatacaaaaactttcacattctttattcagtgggacttaatacaattatttatattttaaattattaaagtatctggaaagggaaaatgttttcttcatttttaggatctatctagcaaaagccagatctgaaattcagatatttgtactgtttttactgtgtatagaaattagtgctttggttttaaaatgatcttttaaaaaagttaaggacatcctagagccttaatagttaagaagagttaaattatcaagcctatttgtgcatttgctttttttgaaaaaggttaagtaacttgtattatcaacttctgatgcagcttcccaaagccaccaattaccctagttatgggcccatcatctcacctggactatcatgaaagacagctcttgattcctctcttaatttctgtagtaagacttcatcttcagcaggcagctgaaaatacaaggtctttagacaaactcagccaagtgtcaaccagaaaacatttgaatttacctgtagcctggaagccccacttcaaattgtcccacctttctggatcaaaccaatgtatttctcaaatgtatttgattgatgtctcatgcctccctaaaatgtatgaaaccaagctgcacccaaaccacctttggtacatgttctcaggatctcttgaaggctgtgtcacaggccatggccactcatatttggctcagaataaatctcttcaaatatt

SEQ ID NO: 132243 - DNA, 617 bp, Homo sapiens
  Payload ID: 5823
  Gene Symbol: FAM177A1
  Gene Name: family with sequence similarity 177, member A1
  ENST ID: ENST00000556858
  CDS Start-End: 1-118
ggcattcggggaatctgcagggcaggaaattaagggatccaaaaagctgagtcatggtccaaaaggaaacgttgatgtcaggacagccatagccaaattttatctcaaggatgagtaacgaaagaggctttgaaaatgtagaactgggagtcataggaaaaaagaagaaagtcccaaggagagtcatccactttgttagtggtgaaacaatggaagaatatagcacagatgaagacgaagttgatggcctggagaagaaagatgttttgcctactgttgatccgatttggctttaaatatttggctattagaaaatcatgccaggtgtggtggctgacacctgtaatcccagcgctttgggaggtcgaggcaggcagatcacctgaggtcgggagttcaagaccagcctgaccaacatggagaaaccccatctctactaaaaatacaaaaaaattagccaggcatggtggtgcatgcctgtaatcccagctacccaggaggctgaggcaggagaatcgcttgaacccaggaggcgaaggttgcggtgggccaagatcgtgccattgcactccagcctgggcaataagagcgaaacttggtctcaaaaaataaaaaaa

SEQ ID NO: 132244 - DNA, 540 bp, Homo sapiens
  Payload ID: 5823
  Gene Symbol: FAM177A1
  Gene Name: family with sequence similarity 177, member A1
  ENST ID: ENST00000554052
  CDS Start-End: 12-281
ggagaccaaggatggaagtgggcttaccggccattaccctctttctcaccagcgccagcagccctgtggtggcgacgacgatggaccaggagccagtgggcggtgtggaacgaggagaagccgtcgcagcctcgggagctgcggccgccgcggcattcggggaatctgcagggcagaatctcactctgttgcccaggctgaagttcatggcgcgatctcggctcgctgcaacctccacctcccgggttcaagcaattctcctgcctcagcctcctgtgtagctgggattataggcacgctccaccgcgcctggctaatttttgtatttttttagtagaggtgggatttcaccatgttagccagggtggtctcacacccttgacctcaagttgtctgcccgcctcagtctcccaaagtgctggggttacaagcatgagccaccatgcccagccacagtgtaaattttatttgtaattattggatttctggttcaagttgatgtttgaaaaataaaaaaagaaaaatattttaaaaatataa

SEQ ID NO: 132245 - DNA, 764 bp, Homo sapiens
  Payload ID: 5824
  Gene Symbol: FAM177B
  Gene Name: family with sequence similarity 177, member B
  Uniprot ID: A6PVY3
  ENST ID: ENST00000360827
  CDS Start-End: 150-626
ggagtgttcagtgttgatttgatgtgaggtgtgattaaagaagaaccaagaatgactttagtgttgttggcctgagcaactggaagaacagagttgccatttattgagatgagaaggctgccagaagagtagagttgttttgtttcattatggagattgacggtttccagcagttagacctagagaagagtgtaccttccaaaaagactactcctaaaaggattatccattttgttgacggagacatcatggaagaatatagcacagaggaggaggaggaagaggaaaaggaggagcagagcacaaattcaacacttgacccttctaaactttcctgggggccctacctacgattttgggcaggacgaatagcaagcacctcattttctacatgtgaattccttggtggaagatttgctgtcttctttggtcttactcaacccaaatatcagtatgtgttaaacgagttctataggatacaaaacaagaaaagtgacaacaaaagtgaaaggagaggatcaaaggcccaggcagctgaggttcctaatgaaaagtgtcacttggaggctggggtccaagagtatggaaccatacaacaggatgtgacagaggccattcctcagtgaagcacctcatccagggagggtctggtggcagatcctagctcatgatggcagcaaagactgcagtttccctggatctgttccttggccattgattaccatggcaacaacaccagaggtagcacttctgagccagatctg

SEQ ID NO: 132246 - DNA, 1994 bp, Homo sapiens
  Payload ID: 5824
  Gene Symbol: FAM177B
  Gene Name: family with sequence similarity 177, member B
  Uniprot ID: A6PVY3
  ENST ID: ENST00000391880
  CDS Start-End: 267-629
agatacagcagtgaacataacaggtaaaaccctccccctctgccaaggggcaggacagggaggaaagggaagacagagacaggtggaatatggagtgttcagtgttgaaatatccaagacaatttcctggcagatttgatgtgaggtgtgattaaagaagaaccaagaatgactttagtgttgttggcctgagcaactggaagaacagagttgccatttattgagatgagaaggctgccagaagagtagagttgttttgtttcattatggagattgacggtttccagcagttagacctagagaagagtgtaccttccaaaaagactactcctaaaaggattatccattttgttgacggagacatcatggaagaatatagcacagaggaggaggaggaagaggaaaaggaggagcagagcacaaattcaacacttgacccttctaaactttcctgggggccctacctacgattttgggcaggacgaatagcaagcacctcattttctatgctgagcctgcaggccaccttgctactgaaggcagaaaaggaaggccttaaacaacttctgagaagtctgtctggatgcatggaagaattcctgatgtgggtcttggtaacactggattgagtttgggtttaatttgaaatatacttggagcagatgtttagccggtatgcatggggataatgaacaatacctgttctgattgctcaggacccatgctatacctgttgttaaagtatattgaaaatctctcctgatatatacatctggaaaaaatagtttatatataatcccatataaagatagaagatttgacaaatttcctttgaatcctagaatttttgagaggccaaggcaattgaaatgttttgtcagccttgaagttaagtatagtaatagaccactattactatactatcagaatagtttaaactctgggcatctcaactgatgcgaagctttagttagtaattcagtttacgcaagtgctcgttctttcttttagcatgtgaattccttggtggaagatttgctgtcttctttggtcttactcaacccaaatatcagtatgtgttaaacgagttctataggatacaaaacaagaaaagtgacaacaaaagtgaaaggagaggatcaaaggcccaggcagctgaggttcctaatgaaaagtgtcacttggaggctggggtccaagagtatggaaccatacaacaggatgtgacagaggccattcctcagtgaagcacctcatccagggagggtctggtggcagatcctagctcatgatggcagcaaagactgcagtttccctggatctgttccttggccattgattaccatggcaacaacaccagaggtagcacttctgagccagatctgatcctaatctctgtgtgacttagtctcaagcatccaggaattacaagcaataatgagagtaattttggacactttctcagaataatttctatattcaagccaccccacctcaactccacccctgtgatacaagtcccatgagtactgacatttgcacagtagcataaatgccttaaggaactttgggactgggagtttttggctgaaatcctctgtcatgggacgagggtacagtaaagaagctctattcctcagaagaaaatttgggcaccgcaaagtctaaataaatcccctttcaggatttgatatagtgtgtacttccaacaaccatcctggcgtagttggggattgttttacaataagtaaacattgctaataactgtgttacaagatcattatcaagatctttaagaattaggtacatccctccaaattaaaacaattgataaataatataagctctagaaaaaaatattaatggattattttcttatttatttgtcaagaaattttcaaaacctggaaagatcgaacatggaaatcattgttagataacacagggtgtgctggccaaagtaactgtgatacattaatagcaaaaaacaaacc

SEQ ID NO: 132247 - DNA, 466 bp, Homo sapiens
  Payload ID: 5824
  Gene Symbol: FAM177B
  Gene Name: family with sequence similarity 177, member B
  ENST ID: ENST00000434700
  CDS Start-End: 166-466
aggggcagaagatacagcagtgaacataacagatttgatgtgaggtgtgattaaagaagaaccaagaatgactttagtgttgttggcctgagcaactggaagaacagagttgccatttattgagatgagaaggctgccagaagagtagagttgttttgtttcattatggagattgacggtttccagcagttagacctagagaagagtgtaccttccaaaaagactactcctaaaaggattatccattttgttgacggagacatcatggaagaatatagcacagaggaggaggaggaagaggaaaaggaggagcagagcacaaattcaacacttgacccttctaaactttcctgggggccctacctacgattttgggcaggacgaatagcaagcacctcattttctacatgtgaattccttggtggaagatttgctgtcttctttggtcttactcaacccaaatatc

SEQ ID NO: 132248 - DNA, 545 bp, Homo sapiens
  Payload ID: 5824
  Gene Symbol: FAM177B
  Gene Name: family with sequence similarity 177, member B
  ENST ID: ENST00000456298
  CDS Start-End: 248-545
agcatatccaagtgcactgtatggcctcagcctacagaacccttaactcttaaatttatcatctattgaacaatttctaacatcaaaatttgtactactttcaacaccaaacatcactaattaatgaaagaaaaatacagaggaattattcataacctaatgatcccagcaagataatgtcctgtcttctaagatgtgcatcaagcctggtacatactgaaaatcctataagttgttttgtttcattatggagattgacggtttccagcagttagacctagagaagagtgtaccttccaaaaagactactcctaaaaggattatccattttgttgacggagacatcatggaagaatatagcacagaggaggaggaggaagaggaaaaggaggagcagagcacaaattcaacacttgacccttctaaactttcctgggggccctacctacgattttgggcaggacgaatagcaagcacctcattttctacatgtgaattccttggtggaagatttgctgtcttctttggtcttactcaacccaaat

SEQ ID NO: 132249 - DNA, 1096 bp, Homo sapiens
  Payload ID: 5824
  Gene Symbol: FAM177B
  Gene Name: family with sequence similarity 177, member B
  Uniprot ID: A6PVY3
  ENST ID: ENST00000445590
  CDS Start-End: 18-494
agttgttttgtttcattatggagattgacggtttccagcagttagacctagagaagagtgtaccttccaaaaagactactcctaaaaggattatccattttgttgacggagacatcatggaagaatatagcacagaggaggaggaggaagaggaaaaggaggagcagagcacaaattcaacacttgacccttctaaactttcctgggggccctacctacgattttgggcaggacgaatagcaagcacctcattttctacatgtgaattccttggtggaagatttgctgtcttctttggtcttactcaacccaaatatcagtatgtgttaaacgagttctataggatacaaaacaagaaaagtgacaacaaaagtgaaaggagaggatcaaaggcccaggcagctgaggttcctaatgaaaagtgtcacttggaggctggggtccaagagtatggaaccatacaacaggatgtgacagaggccattcctcagtgaagcacctcatccagggagggtctggtggcagatcctagctcatgatggcagcaaagactgcagtttccctggatctgttccttggccattgattaccatggcaacaacaccagaggtagcacttctgagccagatctgatcctaatctctgtgtgacttagtctcaagcatccaggaattacaagcaataatgagagtaattttggacactttctcagaataatttctatattcaagccaccccacctcaactccacccctgtgatacaagtcccatgagtactgacatttgcacagtagcataaatgccttaaggaactttgggactgggagtttttggctgaaatcctctgtcatgggacgagggtacagtaaagaagctctattcctcagaagaaaatttgggcaccgcaaagtctaaataaatcccctttcaggatttgatatagtgtgtacttccaacaaccatcctggcgtagttggggattgttttacaataagtaaacattgctaataactgtgttacaagatcattatcaagatctttaagaattaggtacatccctccaaattaaaacaattgataaataatataagctcta

SEQ ID NO: 132250 - DNA, 1004 bp, Homo sapiens
  Payload ID: 5825
  Gene Symbol: FAM178B
  Gene Name: family with sequence similarity 178, member B
  Uniprot ID: Q8IXR5
  ENST ID: ENST00000393526
  CDS Start-End: 251-610
cacaggggtttagaattgactggtgtaggagcagaggacctggggctggatctgggcacagcaatttgcagggcactgctgggcaggagtccctgatggccaagctgctgggctctgtatctcccacaagctgcagcggaggccccatggagcaggagcagaagcacacgttggagaactgaacttgaaggacaggacttacagcattgaggtcacacagctgtcctcgctcagccggctcctgggcctcatgaggccatcatctctcaggcaatacctggactctgtgcccttgccaccctgccaggagcaacagccaaaggctagtgccgagctagaccacaaggcctgctacctgtgccacagcttgctgatgctggccggggtagttgttagctgccaggacatcactccagaccagtggggcgagctgcagctgctgtgcatgcagttggaccgccacatcagcacgcagatccgggagagcccccaggccatgcaccgcaccatgctcaaggacctggctacccagacctacatccgttggcaggagctgctgacccactgccagccccaggcccagtatttcagcccctggaaagacatctaaagggacagggtcagggcagcccagggctcctggcttcagcaggaagtgaacaggctcagggaactggaggaagcgaagcatcaaggccagaggaggccacatgctgaccagcctgatgaggcaagagcctgcccctgccaccgccccgacccctctcctctctgcaagagcctgcctctgccaccgccccgaccccctctcctctcagcaagggatgggcctctctgcctcgcccacccctcagccctcctcccagccatctcctcttccctaaggcctctgtctccatagctctggtttccctgggcctcagtcctccccaccctccttcctctgtctccctgtcactaatgtgaggtttctttgtgcacattaaagtcttctttcagcatca

SEQ ID NO: 132251 - DNA, 2710 bp, Homo sapiens
  Payload ID: 5825
  Gene Symbol: FAM178B
  Gene Name: family with sequence similarity 178, member B
  Uniprot ID: Q8IXR5
  ENST ID: ENST00000490605
  CDS Start-End: 280-2319
ggaagagggtgcgcacttggccggcgagctccccagctggcggcggcggcggctgtgagctggccgcttggtttggagtcggaactcaatccccagaactggatctttaggttccacgttggcggccctggatctagggacgcaactcttggggtcctcccactgcgccgcctggggagcctgctcctgcttcctttcccggctagctggccccgtcctctgaggccgtgcgaattcccgccaccctccctcaccccggagccctgcccttcccgccctatgtggccaaggcttccaggtgcgggcctcgctccacaactcaggaggcaggatcagcggctccattttacaggacagatgtcccacggcttgcagatggctgggccccaggagacggtgctagcccttcctctgagagaaggggtgcaggctgccgccaccgtgcccatcctcctgtacaacctggaggatggcttgtcagaccatcccctggaccaggggccccgctgccctgcccggcggccctgcagccctgcctcggctccagctcccacatcgccaaagaagcccaagatacaggcacctggggaaacgtttcccactgactggagccccccgcccgtggaattcctcaacccgagggtgctgcaggccagtcgggaggccccggcccagaggtgggtgggtgtggtgggcccccagggcctgaggagactggctggtgagctgcccgaggagttggagcaggaacacctggacttggacccgaagaggggcctggccttgccagagaagctgttctggaacacgtcaggcctgagccagcaggctgcggccccagagttttcctgggggggctcaggaagctacttcaacaacctggactacttactgcaggagaagagggaacaggccctggagcaggagcgagagaggctgcttctgcaggagtgtctcaatctcaactccttggatcttgatgaagaggaagtgccactcacacccgagcacaggatgctggtggaaaagtactcagtgtccctgcagaccatcccgccggtccatccaggtgagactgtgtttctgcccaggtgtcaccccctgccatgcatcctggactcctcactcctgaagccacgcagccacctggaagggctgttcctcagctccccgccagcccaacagctctccttcctgcgcagtggcctcctgaacatcctctacctgcacatgcctgactgcccggtatccctgctccagtggctgttccagctgctgacatggcctccagaaacatctttgggagcctttggtcttctgtgggatctcattgtggatggaatcttccttcagcctgatgaagacaagcacctgtggtgcccctcactgcaagaagtcagggaggcattccacagcctgggtgcccacagtcctgccctgtaccctctggggcccttttggcacggtggcagggtgcttccaggcgaggctggcctgaatgagaatgaggagcaggacgctccccaagagattgccttggacatcagcctgggccacatctacaagtttctggcgctgtgtgcccaggcccagccgggggcctacactgatgagaacctcatgggactgattgagctgctgtgccgcaccagcctggacgtggggctccgcctgctgcccaaagttgacctccagcagcttctcctcttgctcctggagaacatccgggagtggccagggaagctccaggaactgtgctgcaccctgagctgggtgtctgaccaccaccacaacctgctggccctcgtgcagttcttcccagacatgacctcccggagcaggcggcttcgaagccagctcagccttgtggtcattgctcgaatgctgggccagcaggagatgctccctctctggcaagagaagacccagctgtcctcgctcagccggctcctgggcctcatgaggccatcatctctcaggcaatacctggactctgtgcccttgccaccctgccaggagcaacagccaaaggctagtgccgagctagaccacaaggcctgctacctgtgccacagcttgctgatgctggccggggtagttgttagctgccaggacatcactccagaccagtggggcgagctgcagctgctgtgcatgcagttggaccgccacatcagcacgcagatccgggagagcccccaggccatgcaccgcaccatgctcaaggacctggctacccagacctacatccgttggcaggagctgctgacccactgccagccccaggcccagtatttcagcccctggaaagacatctaaagggacagggtcagggcagcccagggctcctggcttcagcaggaagtgaacaggctcagggaactggaggaagcgaagcatcaaggccagaggaggccacatgctgaccagcctgatgaggcaagagcctgcccctgccaccgccccgacccctctcctctctgcaagagcctgcctctgccaccgccccgaccccctctcctctcagcaagggatgggcctctctgcctcgcccacccctcagccctcctcccagccatctcctcttccctaaggcctctgtctccatagctctggtttccctgggcctcagtcctccccaccctccttcctctgtctccctgtcactaatgtgaggtttctttgtgcacattaaagtcttctttcagca

SEQ ID NO: 132252 - DNA, 12691 bp, Homo sapiens
  Payload ID: 5826
  Gene Symbol: FAM179A
  Gene Name: family with sequence similarity 179, member A
  Uniprot ID: Q6ZUX3
  ENST ID: ENST00000379558
  CDS Start-End: 352-3411
gtttattcaaggagagctttgctgagagctggagcacgccagcagtggagctcgtggccacccagcccctgctcagacaggaggctgcggcccaggactgtgtggctggtgggggccagggtgggccaggcctggggctgccccgtccttgcctccctgggcccatgagcatcaacgtctctatagagaccaaggaccctggattcctccagtgacaggggtttggcctctggacagagaggtcccggatgttacaggtcagagccctccagacccccaaggactgtactcactgcccagaaatagctgctgcctctgggcaaccttgtaggcaccttctccacccaggacatgggcacccgtgacgatgtccccgaagccaaggtcctggtccccgtggccgtgtactgcgggagcatccctcggaccagtgctgggccccgggtgctcccgcctggaagcatcaactccagtctgcctcatggagaaggttctctccagcctgagccaagagccctgctgaacaacgaggaaccgtcacagctcctgcgtggactcggacagctgggtggcctcaagctggacaccccttccaagggctggcaggcaaggaatggtcaccccaggaacctcagggccttgtctttgggggaccagcccctggtgctcctcccttctccggagtcagaggccaacagcgtggccagggacaccatccagattaaggacaagctcaagaaaaggaggctctcagagggcttggcagcgtcttcccgagcctctctggatccagggggaggcccccaaggagttcccctgcacagcaccatcccccgagccacctctcagaggctgctgagggtgcccaggccgatgcctctcatccagagcatccctaccacccctgaggccagcggagtcaaagagaagggcctggacctaccggggagcattccgggtcctcacgagttgagacccggtgctcaggaggcgcagatctcctggcaatacctgcactgcaatgatgagaagatgcagaagtccctgggcgccatcgtgatcccacccatcccaaaggccaggacggttgcagcgaccccctcccgtgtgcctggctcccttcccagcccgttacctccaggccagggagtcctcacaggcctgagggccccacgcacgcgattggctcgggggagtgggcctcgggagaagacccctgcatctctggagccaaaacctttggcctcacccatcagagacaggcctgccgctgccaagaagcctgccctgcctttttctcagtctgctcccacgctgacagccttctcctttgactgtgccagagaagcctgccctccgctgaaagaagaggaccagaaggagatcggcaccaagatccaagtcaccatctccaagtctgcccgggagaagatgcagctgaagcagatgaaggagatggagctgcttcggaggctggaggagcccaggacagggcaggagctcacttcccagtgcctgggctcccagagagccttcatgaaggaaggcctccttcccctccggggcagcgggacactgtctgtgcccactaggctgagcggcccatgcagaaacgacgtcagcatcatcctgaggaagtgggccagccgggcctccctgcccagcatccccatcagccggcaggagccccgctttgcccgccacgcctcagctaactcattacctgcggtgctcacgttggggtctcctgaatgggaagaagaggaggagatggatcttagagcctgtaaggagttgaggcctttctcgaacccggagctggggctgagggatgcactccagtgcctcaacagcagtgactggcagatgaaggagaagggtctggtgagcatccagcgcttggcagcctgtcactcagaggtcctcaccgggaagctgcacgacgtgtgcttggtggtgactggggaggtcaccaacctgcggtccaaggtgtctcacctggccatcagcaccttgggagacctcttccaggccttgaagaagaatatggaccaggaggccgaggagatcgcccgctgcttgctgcagaagatggcggacaccaacgagttcatccagagagcagccggccagtctctgagggctatggtggagaatgtgacccttgcccgctccctggtggtcctcacctcggcgggtgtctaccaccggaaccccttgatccggaaatacgcggctgagcacctctcagctgtgctggagcagatcggcgctgagaagcttctctcgggcaccagagacagcacagacatgttggtgcacaacctggtgaggctggcacaggactccaaccaggacaccagattttatggccggaagatggtgaatatcttgatggcgaacactaagtttgatgcatttctgaagcaatctctcccatcttacgacttgcagaaggtcatggcggccattaaacagcagggaatagaagataatgatgaacttccctctgccaaaggccgcaaggtgttgaggagtctggtggtgtgtgagaacgggctgcccatcaaggaggggctcagctgcaatggcccaaggctggtggggctgcgctccacactgcagggccgcggggagatggtggagcagctacgggagctgacacggctgctggaggccaaggacttccggtcccggatggaaggcgtggggcagctcctggagctctgcaaggccaagacggagcttgtcactgcccacctggtccaggtctttgatgctttcaccccaaggcttcaggattccaacaagaaagtgaaccagtgggcgctggagtccttcgccaagatgatccccctcctcagagagagcttacaccccatgctgctctccatcatcatcactgttgcagacaacctcaactccaagaactcagggatttacgctgctgccgtggctgtgctggatgcgatggttgagagcctggacaacctttgccttctaccagcgcttgctgggcgagtgcgtttcctgagtggccgtgcggtgctggatgtcacagatcgcctggcagtgctggtggcctcagtttacccccggaagcctcaagctgtagagcggcatgtccttcccatcctctggcacttcctgaacaccgccaccaggaatggcaccctgcctggacccagcgggaacatccgcggggtggtgtgccggctgtccaggagcctccaggagcacatgggctcccgcctgctggactttgccgccagccagccaaagcacgtcctcaagacgctccaggaactcttagactcagagtccttgggaggcagccgcaaggccactgacagaggggtggcccctgacagcaagacaactggcagctcatacccttttcagctggattaaagatggatctgaaatgggcaattattatttatcttatttttttgatggactattctcctggttactttcccccttagagttccagatgtacatggtatattttgaagtagaaataaaagaattacttatttttctaaggttttattatcttgtacttttttaatcacagagaattttccagtaactaggtttgtgatgaacgaaatgaaatgtgacagcagcaaaaccagttgcagacaatgttgagacaaagagttaggaagaaaaagggtagcacagccctgcaagctgcagcccgctcgagacgatagttgcccatctgtgagctgctgggcaagccctcctgaaacccgcagcctgagttggtcatcgaatccagtccatttgttatgggcctgattggaggtgagtgtaacaaacgtgttcagggacatcgtgcttctgccctgcaaaagctgcagcacgtgtctgttggtcctgtgggaaccttctgatcggcccagcttatcaaaagacaaggggaatttgagatttgcatcactaaaagccttctctagaagttggagttctggctagttctgaagaggactagacaatgctttgccattgaaacaccctaaatggagatgcatgtggagcgtaaagtgctaccagtgtgcagatgctgccgagtctctgaaactgcacaggctgcaattgtgggccacatcacaaggctggaggggcgagtgggcacagcacgggccaggacttgtggaagcagggaaggtgttggcccctgggggaacagccagtgaaatgaagtcccggcagtggagagggaagtctggggctcaggctctggacactttaggtaggagtggctctgccttggctggggccagtggcaggttaacaactgtgtgaccagaaagagttagagctaaggccatgacctcaaatgcacaggcaaggcaggcctggtaaggcaaaggctgaagaggcagcatcccagctcttgcaggggagcccagcctgcagccacgtgctggggcagatccagacgaccgaggccctgagggcccagcctcatgccagcaagttttctggcagacacccccctcccctgcccttccccagtggaacctctttccactgtcatctgccccccaggcctaacatccattccacatccctgttctgagcctctcctggggagtctggctctggaaagccccgaatctactcacttatgtatttccataccccaccaggctgaggaagccactttcccatcttgcctctgtggcaggtgtagttagtccggcccctccttacgccctggggtgaggttgggcctgcgagtcatcccgggccttgggcttgtcataggcggcttaagagtgactttgggtaattctagcccagtgagctgcttctcacctgattgtgaccccagcaggggcttccctgcgaccatctagctctttgttgattctgattgaaccaggttaaaggcctgctagacaggcagccatccaaaaatgcccaagaggctgacagtaaatgttttaagtgttgaacaatttaatgaattgcatttgcctgtcatctgagcaaatgtttttggtttggtgaggagacttgcattttctgcttttatcctagaatgtatcagaacatttcagggttttttagatccctaggaggccagggacgtagagtctggcaaggattttgacggcagaaatgaagcttagcagtactgtcctgtcttcctgccttccatgtgtgttctcacacaggaagcttcccatcccatgggcctccacccactctcaggggcggaggcattgaaaacagctgaaaacagtggaaaagtgcagaatacatctttgcactgttctcttttccctcattatttcaggttttattaaccacacctgtggtgtgacgctgctgggaggcactgggtggctctggtgtaccttgagaaatttccatctccaaagacttccttacctcattacttttaaaatgaagggaagacagcatgttggtaacctggccctgggcctgttgggaatacctgtgggaatctaatgggacggcctgtcatgggacatgaagattttcctaagagctggggctggagctaagcccacacatactttgcttggttctgtgtgtggccaggaactccacttacatgagatgctcttgggggtgggaatacagcctctaatgatggaagattctctttctctcaatctctctctccatgtaacaaaaatgcaggtgcagtcactcactgcttgcagactccagtgaacaaaagggaggcctggtataaagaaactgactttttattccaaagctagtttaggggaagaagctgccttgaagggtactgtgtcgtttttggagcagaaagtgggcacttttaaaggggcgggggggggggtgctggcacgaatggcatgcaggagaggaagcgggcaggtgggggagtccacatacttgctttgatgacttatgtaacgggtggtcaagttggcatcttcgtgggcagaactaggttgtaaagtggctgaagctctccgggtgggagggagtttcatagtgggcatattttgggttattaattgactgttgtgtctccaggcagtttcctggtgggtgcaagttctgctctagagcttctaagcacacagttagatgagcctgccctggagggagtgtctggtaaaggggaggtaaaaggttatagttgcatttcttttatatatatgtttatttgtttatttatttattatactttaagttctagggtacatgtgcacaacgtgcaggtttgttacatatgtatacatgtgccatgttggtgtgctgcacccttaactcgtcatttacattaggtatatctcctaatgctatccctcccccctcccccaccccacaacaggccccggtgtgtgatgttccccttcctgcgtccaagtgttctcattgctcaattcccacctatgagtgagaacatgcggtgtttggttttttgtccttgcgatagtttgctgagaatgatggtttcccgcttcatccatgtccctacaaaggacatgaactcatcattttgtatggctgcataatattccatggtgtatatgtgccacattttcttaatccagtctatcattgttggacatttgggttggttccaagtctttgctattgtgagtagtgccgtatagttgcatttctaaagggctaagtaggaagtggggaacaaggggaaatggggaaaagagaagagaaataattttaaaaactcgttttcttagaaaaatgagtgtactcagttcagagtgagactcatagacagaagacttgtctgagagctgtaactgccaggattcccttttacatcaaggagaatttttttgagattttaggaaacttttcctataggtcccattgtggcaggccaggtatcactaatgcaggcatccataacaactgtttcaatactgactgagtggttaagttaaacattaaaagctgagagagctggtggccttatacaaaggctggaatgtaacaaaagcccaccaagagtttgcctaggcctttgctgggccttgaagcatgatgagataatgaaggaattcttagtgggacctgtttaggattaaacaagctttactgggtgtctgaagaaactccccaggcctccaaaaacaagtttattggaggtctgaaggaactccccaaaccttcaggatttagcaggagacaagataagggtaatcaccccagcacctggacccatttagattaagtaaatctattgaggctccagaggaaggtcttcaggacttagatgttagctacagattaaaagaaattaatcgcttatgtctttagatgagtgcacacttacacatagacatgtagcttagaagatatgcaagctctggaaaactttgtaatttgagttggtctggcgatattttccaggccttctccctgtaaccggttatggaaataaaaaactctcttcctccccagttcatctgcatcttgttactgggccacgagaaatagcagcccaaccctcagtttggtccaggaacaaaatctctcatcttgttttctcctccctttattatctcctacctgctgagataataaacgtttctaccctctcactgtgcttcggaatcatctggcaagacttaaaaaatactgaggtctacccccaccccacagggattttgattcacttggtctgaggtgaagcctaggcagctgtatttttttttcttttaactccaggtgattctaatggctgggtgaattcaaaaaccacaataaaatatcagataaaaaaggaaactggccatggcttaggccctgtgggctcctggcctgccagctccccttacctcacagccctagagtattctggggttgacggtagaaactgagtccaggctctggagtcaggcctgtggcctgctggcgtgtggcttgggacccatctatcaacctctctgatctttccatatcaatctagtgtgtggatgacatcaatgcccacctacacctggctgtggtgacgatgactgagaacattctcataaagcatttagcataaggccacgaaaacagggagctgttctgcttggggcctgccatttctccagctgtcttaccctttctccagacgccctcagaaccatccctccccccagagaagaaaacccagaagctcttctctccttgtggctgttccttcccctccactcttctgactcttgagactggagaggggatgatttgcaggggagcagagtgctttcttgcctaaagcattttcctcttattataacttggttctgccattaggaaaagaaagggggaaatgaccataagtctcctgctctccttgtgatggagggaggaagatgggggcccagaaagggaagccgagaggaagagccaacctcctcattaaattctgcagtgttccaggtctgccattcttcttgacatcttataaggaagatattatttcttccatttcctgatgaggaaactgggcctcagcgatgcttaatgaataaccgcagccagtgcacaggaatcacctgggaatcttggtaaagttcagattctgcttcagcaggtctgggtggggcctgagagtctgtagtgttcaattcccaggtgaggtcaatcctgtgagtctggcagggaccacactttgaggcgtcaggtcctaagacagcaagaaagtggctgaaacttgggtgtgtgtccaggcctgtttgactccaaagcccctgactttctgttccaggatgttttatggctccaagacatttacctccccttgggtcagtttgagccctttgaaataagccacggaaaccccatggatttctggagttagtctggtcccagagttttgctcccaaaagcttcagggcagagagggtctgcttggtcagctctgatcattaggacatgctgtgaacacttggcctctggtggggacgggatttgtggacacaaatgaaggctacatgagcaaagtgtagcctattcagagcttgctatagcaagggagcctgccatgacgacctgagttttggcagagactcatatgcaagcagaggtaatgctgcagcttcatagtggaaaaaggggagacttcaggtatgccctgattggaagctgttggcctggggacgctgtaggcacgaagtgtggactgtggcttgcttgttacagtatcacccacggtgcttgttaaagtacagatccctgggttgtactgcagacctaccgaatcagagccttgatcactcaaagttgagaacctctgtcacaatctcaaagctttcagtggttattaggttcccaggctagcccacacctgggagtcagcatccctaaatcagtctttaccaaatgtggttgatgaaaagaattgcttgcgggaggagaacggggagagagagacgggaacaagtgctttttaaaaactcagactcttagtctcagctgtagatctgttactggggggaaggcctgggaatctgcaaattatcaagcagctgattctgaggatcaggaagcctgggaagcagcgtcctaactgcctgctcccagccgggttccagacagcacggcagcatcactgtgtgcacagatgctccctggtgggtgtttctgagtcagggacctcttgggggctcaggtttggtccttatgattactggggtttattcagggggcgtgctggtttcgccatattccgtcccctggtgtttcagtgaagctggctgtaacatttgaaggctttgctttattttaatcacatctttataattacctcgctgtgagttgacagctgttattaacatcaccttgggttctccttgagaatttttacatccttaaagtgatgcggcacttctgcagctgaagtcagaagccgttaactaaataatcgctctaaaatgtcaccaggttttgtaaacatagccaatactgtccccttccaaaggaggaaaaaaaattgctagataaataattttcatgaaggcaatttgtttcccagggtctatattattttctgtctcatccactggtttttgccgctgtggggcactggcaataaagagctgtctcaagaaggaggccacgtctgctcctgccaattttcatctggaagcccacttcagggttcatggcaatgagaagcaaagatttttggaaaagacttttctttttctcttaatgctagcagcagttgtgtgtgtgtgtgtgtgtgtgtgtgtgtgtgtgtgtgtgtgtgtgtggaaaatgatgggagtggttgaggttcatagagggaattattttaaaaactcttggaaacattgttttgagttttcatccaagctagtttgaggaatggctagaatttcagctgaactttgattagatatgaaaagtaatgtcctgggctaggtgtggcagctcacacccgtaaacccagcactttgggaggctgaggtgggaggattgcttgagtctaggagtttgagaccagtctgggcaacagagcaagaccccatctctacaaaaaaataaaaaatcgtagctgggaatggtggtgcatgcctgcagtgccagttaatcaggagactgaggtgggaggatcacttgagcttaggagttcgaggctgcactgagctacagtgagctatgattgtgtcacttcactccagcctgggcgacattgagtgagaccctgtatctttaaaaagaaaaataatttcctatttgtaaatgttggagaaaatggagaatttcttccatagaaaggtatgctgtctccttccagtactgcctctatggaataatctagatcttgctttcagcaggtatcaggaggaaggctggccagggtaagaggcctgctctgccctcactggcaatgtatctttggagtgagatctttttttcatgtgtaaaaggtattgaaaaaacacttgctttgtccatctcatagcgtcttttttcctctaaagatttaatgaaacaatgtacatgattgcattttgaaaaagtagagtgttacatacaaagaaaggtagaattattaactggagcctcatcccacactgtgtgcaaagcctgctgtttagcagtgttcagagtaattgccagtcatctatctgactgactgacaagcctcatgactcaacatgggaaagatgagagattcagaggcttaatttgtttttttccatgtggtatatttgacatatgtacttgcaattgcaagcaaatattgtaaagtcttttctcttcactttgaaagacatgaaaaccttcaaagaaggaagtcaattcttgctgagtttgacagctgtttttaagtttctccaaagatcaaagcgcagcccaggaatgagggggaaatgatattggcttcttttctcaatcgggatcttaaagtgcggaggcagcagagatgaacactaaagaccaaaatggccaggattatgagttccgttccccgaggtggctcaaaaagatgccttagaaaagacaggtttgcccctgttgtgcagatggcaggataaataggctgacattattatcactgctttgcagatgaagacacgggctcagagatgccaggtcacagagccaggggatggaggtgtcatgactcaggctctggtgttctaattccaactctcaggagcgtgataccctctggctcctgagaatgcgtggcccatttaccataccccttgtttctttcccctcctgctctcttcctcctctttttcttcttcctccaatttaggccagtcagctttatctatgggcattaactgagccccgccagtgctatcactccagccaaaaccgattgctgcctcgtgtgctagacttcaaggctgtctgcagtgacagcgttcagaagcgggtgactagatcagtggaatcctagagccacctgatgcagggcccaccgaccattcacaaagttactttgtgaagtccaggagtgcgatcaagcctgcagtgtccagggtccttcctaaaattgaattagagtgctgagtgaattaactgtttgctcctcttcttgtgtgatgcatttttaattacatttcataaaaacgtctggatggattgatggagctttagttaaacttcaggtaggcagggggagtagacgatggtgcagtataacatgttctgttaatacaggctcagaacacatgtactttatggcagttcaactgaatctttgatgtagggctacttaaaaatatattacctttgaaaagatttcctttgaaagatagagtgggtgctttagcagcctgtaagccgtcagccagacgatcaattgacaaacacgtcagcacttataattcactgcagcggctcccctgatacatgcaaaacactggtttatttcagaaaaagaatatatttctcaaaatccctttcattcacattgtaaggtttatgaggcaagtcttgtcaatcctaggcccttcacaatgaaagaaaagtctctttggtctgtctgccctgcgtttcctacaacatggattattttaggctctgaactgggcatacgatgtgaggaaggagaatagatacggcttaaagtaaacagcagctcagaccccagccacggagggaggttatatttcattttgaagattgtatttatacttgcaaaaagctatcactgttctgccagaatatgatgtttact

SEQ ID NO: 132253 - DNA, 720 bp, Homo sapiens
  Payload ID: 5826
  Gene Symbol: FAM179A
  Gene Name: family with sequence similarity 179, member A
  ENST ID: ENST00000401723
  CDS Start-End: 234-720
cttggggtgcttcctgtttctcagtaaagtgaagttgcggcgacctcgtgcctgccttatgtgcacctgtgccagcatctttctcaggtcccggatgttacagagaagcctgccctccgctgaaagaagaggaccagaaggagatcggcaccaaggtcaccaacctgcggtccaaggtgtctcacctggccatcagcaccttgggagacctcttccaggccttgaagaagaatatggaccaggaggccgaggagatcgcccgctgcttgctgcagaagatggcggacaccaacgagttcatccagagagcagccggccagtctctgagggctatggtggagaatgtgacccttgcccgctccctggtggtcctcacctcggcgggtgtctaccaccggaaccccttgatccggaaatacgcggctgagcacctctcagctgtgctggagcagatcggcgctgagaagcttctctcgggcaccagagacagcacagacatgttggtgcacaacctggtgaggctggcacaggactccaaccaggacaccagattttatggccggaagatggtgaatatcttgatggcgaacactaagtttgatgcatttctgaagcaatctctcccatcttacgacttgcagaaggtcatggcggccattaaacagcagggaatagaagataatgatgaacttccctctgccaaaggccgcaaggtgttga

SEQ ID NO: 132254 - DNA, 658 bp, Homo sapiens
  Payload ID: 5826
  Gene Symbol: FAM179A
  Gene Name: family with sequence similarity 179, member A
  ENST ID: ENST00000440012
  CDS Start-End: 321-658
caaggaagcagctgtgaacagcagaaagaggatgagaggattggggaagacctcggtttctttcctgttgcttcataaaatgtcagggctggacagcactggctacagacaggaatcagagggtccagagcttctaccagggcacctcaggaatcgtgcctgggacatggggacgctctgtccccattctaccagaggagcttctatgttgcctcattttttttttttgtatactgggcattcatgtgagatttcatttggaaagattttgctactgaaaaaaacttaaaaacagtcagcttggttcagagtttctgcagatgaaggagaagggtctggtgagcatccagcgcttggcagcctgtcactcagaggtcctcaccgggaagctgcacgacgtgtgcttggtggtgactggggaggtcaccaacctgcggtccaaggtgtctcacctggccatcagcaccttgggagacctcttccaggccttgaagaagaatatggaccaggaggccgaggagatcgcccgctgcttgctgcagaagatggcggacaccaacgagttcatccagagagcagccggccagtctctgagggctatggtggagaatgtgacccttgcccgctccctggtggtcctcacctcggcgggtgtcta

SEQ ID NO: 132255 - DNA, 493 bp, Homo sapiens
  Payload ID: 5826
  Gene Symbol: FAM179A
  Gene Name: family with sequence similarity 179, member A
  ENST ID: ENST00000420297
  CDS Start-End: 287-493
tttcactccggctggccctggctcatctccttgaggaggaagtgtgtgtcctctcctgcacgcctctccttcctggggagccctggctcacagctggagccagcaggcctggaggctgcagaccctggactgggacttgttgcttttgagagctcccctgaagcctggctcctcaggtcccggatgttacaggtcagagccctccagacccccaaggactgtactcactgcccagaaatagctgctgcctctgggcaaccttgtaggcaccttctccacccaggacatgggcacccgtgacgatgtccccgaagccaaggtcctggtccccgtggccgtgtactgcgggagcatccctcggaccagtgctgggccccgggtgctcccgcctggaagcatcaactccagtctgcctcatggagaaggttctctccagcctgagccaagagccctgctgaacaacgaggaaccgtcacagctcctgcgtggactc

SEQ ID NO: 132256 - DNA, 6375 bp, Homo sapiens
  Payload ID: 5827
  Gene Symbol: FAM179B
  Gene Name: family with sequence similarity 179, member B
  ENST ID: ENST00000361462
  CDS Start-End: 184-5505
agacgggggccattttgccagaggctgcctcccggagttgggggcggcctggcggcaggctgaagctgttcttttgcctcttctgcagcttggggcttggagaggatctggaagtctgggctccatcgagccctttggagacggcaatggtttcttccaaccaccaccacctgacaaccctgcatggcggctgccccctccgcgctgcttctgctgccgccctttccagtcctctctacctatcggctccagagccgcagtcgtccttccgccccagagaccgatgatagtcgagttgggggcattatgagaggagagaaaaactactacttccgtggagctgcgggggaccacggttcctgccccactacaacttcgcctctggcctcggccctcttgatgccctcggaggcagtctcaagcagctggtctgagtctggaggcggtttgtcagggggagatgaagaggacactcggctccttcaactcctccgcactgcccgggatccttctgaggccttccaggctttgcaagctgctttgccgcggcggggcggtcgacttggcttcccccgacgcaaggaagctttgtatcgggcactgggccgagtgcttgtggaaggaggtagtgatgagaagcggctctgcttgcaacttctctcggacgttctccggggtcagggggaggcaggccagcttgaagaggcctttagcttagcacttttgcctcaactagttgtctcgttacgggaagagaatccagccctgcggaaagatgcgctgcagatccttcatatatgtctgaaacgtagtcctggagaggtgctgagaacgcttatacaacaaggactggaaagtaccgatgcccgacttagagcttccacagcactactgcttcccatcttgcttactactgaggacttgttgcttggtctggatctcaccgaggtgataatatccctagcccgaaagcttggtgatcaggagacagaagaagaatctgagacagctttctccgcacttcaacaaattggggagcgacttggccaagacaggtttcaatcttacatttctcgtctgccctctgccctgaggagacactacaatcgccgcctggagtcccagtttggaagtcaggttccttattatttggaacttgaagcctctggatttcctgaagatccccttccctgtgcagtgactctttccaacagcaatcttaaatttgggattattcctcaggagctgcattcacgattattggatcaggaagactataagaaccggacccaggccgtcgaagaactaaagcaggtgctgggaaaatttaaccctagttctactcctcattctagtcttgttggcttcattagtttgctatataatttgttagacgattctaacttcaaagtggtgcatggcacacttgaagtcctgcatttactggttattcgccttggagagcaggtacagcagttcttgggaccagttatagcagcttctgtcaaagtgctggcggacaacaagttggtgatcaaacaagaatacatgaaaatcttcctcaagctaatgaaggaagtaggacctcagcaggtgctttgtttactcctggaacatctcaaacataagcattccagagtgagagaggaggtggtgaacatttgcatctgctccctgctgacctatcctagtgaggattttgacttgcccaaactgtcctttgatcttgccccagctcttgtagatagcaaacgcagggtacgccaagcagctttagaagcttttgccgtattggcatcatcaatgggctcaggtaaaaccagcatcctttttaaagctgtggatacagttgaactgcaagataatggagatggagtgatgaatgctgtgcaggccagattggctaggaaaaccttaccaaggctcacagagcagggatttgtggaatatgcagtactgatgccatcttctgccgggggtaggtcaaaccatttggcacatggagcagatacggactggcttttggctggtaacagaactcagagtgcacactgtcactgtggtgaccacgtgagggatagcatgcacatttatggatcttacagcccaactatctgtacccgaagggtattaagtgcaggaaaaggaaaaaataaattaccatgggaaaatgagcaacctggaatcatgggagaaaaccagacctccacttccaaggatatagagcagttttcaacatatgatttcatcccatctgcaaaattaaagctttctcaaggaatgccagtcaatgatgatttatgttttagcagaaaaagagtatcaagaaacttatttcagaatagtcgggattttaacccagattgtcttcctttatgtgctgctggtactactgggactcatcaaacaaatctttctgggaaatgtgcacaacttggattttcacaaatatgtggtaaaactggcagtgtgggttctgacttacaattcctagggacaactagcagtcatcaagaaaaagtgtatgctagcctcaattttggcagtaagacacagcaaacatttggtagtcaaacagagtgtacttcctcaaatggtcaaaatccaagtccaggagcttacatccttccatcctatcctgtctcatcacctcgaactagtccaaagcatacatctcctcttattatatctccaaagaagtctcaagataattctgttaatttctcaaattcctggcctcttaaaagcttcgaaggactatcaaagccaagtccacagaagaagcttgtcagccaaaaatcgtctgatcctacgggtagaaatcatggagaaaattctcaagaaaaacctccagttcagcttacacctgccttggtgagatcgccatcttcccgacgaggtctaaatgggacaaagcctgttcctcccataccaaggggaataagccttttgcctgataaagctgatttaagcacagtgggacacaaaaagaaagagcctgatgatatttggaagtgtgaaaaagatagtcttccaattgatctttcagaattaaatttcaaggataaagatttggatcaagaagagatgcatagctctcttaggtcccttcgtaatagtgcagctaagaaaagagcaaaactgagtggcagtacttcagatcttgaaagccctgattctgcaatgaagctcgacttgacgatggactccccgtctctgtcttcctcaccaaacatcaattcttacagtgaaagtggagtttacagccaagaatcattgacttcttctctgtctacaactccccaggggaagagaataatgtcagacatatttccaacatttgggtcaaaaccttgtccaacaagactttcttctgcaaagaaaaaaatttctcatattgctgaacaaagccccagtgcagggtcatcatcaaatccacagcaaatttccagttttgacttcacaaccacaaaggctttatcagaagactcagtagtagttgttggaaaaggcgtatttggaagtttaagttcagcaccagcaacctgcagccaatcagtgatatcttctgtggaaaatggggatacattttcaattaaacaaagtattgaaccaccatcagggatttatggaagatcagtccagcaaaatatttcatcatatcttgatgttgagaatgaaaaagatgctaaagtttctatttctaaatctacttataacaagatgagacaaaagagaaaagaagagaaagaactgtttcacaataaagattgtgaaaagaaggaaaaaaattcctgggaacgaatgagacatacaggaactgagaaaatggcatctgaaagtgaaacacctactggagctatttcacagtataaagaaaggatgccttctgtcactcatagtccagaaataatggatctgtcagaactacgaccattctctaaaccagaaatagcactgacagaagccctgaggcttttggctgatgaggattgggagaagaaaattgagggactgaattttattagatgcttagctgcttttcattctgagatactgaacacaaagttgcatgaaacaaattttgcagttgttcaagaggtgaaaaatttacgttctggagtttctcgtgctgctgtggtctgtttaagtgatcttttcacttatttgaaaaagagcatggatcaagagctagataccacagtaaaagttttgttgcacaaggctggtgaatcaaatacatttataagagaagatgttgacaaagcattgagagctatggttaataatgtaactcctgcacgtgcagttgtttctcttatcaatggtggacaaagccatttacacattgctgtaagaaggtgtacagcccagcatttatcagatgtattggaatttatggaaccagaacgtattttatctgcagcaaaggatatggctgaacgcatattaccagctgctgctaagtttgctcaagacagttcacaagaaaccaggtattatggtcgaaagatgctgttcttcatgatgtgtcatcctaactttgaaaaaatgcttgaaaagtatgtcccatctaaagatttgccatatattaaggactctgttagaaacttacagcaaaagggtttgggggagataccattagatactccttcagcaaaaggaagacgatctcatactggcagtgttggaaatacaagatcatcatctgtttctagagatgctttcaattcagctgaaagagctgtaactgaagttcgtgaagtcaccagaaaatcagtccctcgtaattccttagaaagtgctgagtaccttaaactcataactggcttattaaatgcaaaagactttcgtgatcgtattaatgggattaagcagcttttatcagatacagaaaataatcaagaccttgttgttggaaacattgtgaagatttttgatgcttttaaatctcgacttcatgattctaatagtaaagtaaatctggtggctctggaaacaatgcacaaaatgattcctctacttagagaccacttatctcctataatcaacatgctaattccagcaatagtggataacaatctgaattccaagaatccaggcatctatgcggctgctacaaatgttgttcaggcactgagtcagcatgtagacaattacttacttctacagccattttgcacaaaagctcagtttttaaatggaaaagcaaaacaggacatgacggaaaagcttgctgatattgttacggaactttatcaaaggaagccgcatgccacagagcagaaagtgttggttgttttatggcatctcttaggaaatatgacaaatagtggctctctgcctggagctggaggaaatatacgaacagccacagctaaattatcaaaagcactctttgcacagatgggtcagaatctgttaaatcaggctgcatctcaaccaccacatatcaaaaagagtttggaggaattactcgatatgacaattttaaatgaattatgaatcttcgataaaatactgtatgatgaacaaaagtgtttacatgatgacaaatggaactttctaaaagttatgttatcagtgcctgcacttcacatccagcaaattaagtcaatggctatttttatttgcagcctatgagtacacatctgtcctatatcaaccttaccacttatattcatcacataaaaacctaaaatattcatgaataattcatgaaatctgagtcacatgggatgaattcaattttaatatttttgagaaaagtcctgctcatttgcactattctatagaaactacaatttgttgccctatatgtaaaattagaattgtaattaaaaatacacattttattatgtaatcatgttctggtatgtctcatttctcagccttattttataacgtggaagtcattgaactatgttatcagaaactaagtttgtatattatttgtgaaaaacatgtatttctgaatcagtccgctaatatgattgtgcagtattagcttgcttttgctgctgtgttaatgtcatatatttgcttaccttttgggttcaattatctacataattgtgaaatttaacaagttataataaagcatgacaaccaaagttttagaaaacattaaacattttaaatgcacgtttaaaaaacgtgttgaatgtaacccccctatttttgtgtgcaaacactaaattttattgctttatgttttgacctttataaaggtgttattctgctgcccagttttgtaattctcaaaaatagtgccaggtcttctatagcttttttcagaattcatgggcttacaagtactgtatgcatctttaaaaagaaaaggaatgttataaaataaaaggatttatttcttta

SEQ ID NO: 132257 - DNA, 6247 bp, Homo sapiens
  Payload ID: 5827
  Gene Symbol: FAM179B
  Gene Name: family with sequence similarity 179, member B
  Uniprot ID: Q9Y4F4
  ENST ID: ENST00000361577
  CDS Start-End: 215-5377
cgcccggtggcagctgtggggtctagggctcagacgggggccattttgccagaggctgcctcccggagttgggggcggcctggcggcaggctgaagctgttcttttgcctcttctgcagcttggggcttggagaggatctggaagtctgggctccatcgagccctttggagacggcaatggtttcttccaaccaccaccacctgacaaccctgcatggcggctgccccctccgcgctgcttctgctgccgccctttccagtcctctctacctatcggctccagagccgcagtcgtccttccgccccagagaccgatgatagtcgagttgggggcattatgagaggagagaaaaactactacttccgtggagctgcgggggaccacggttcctgccccactacaacttcgcctctggcctcggccctcttgatgccctcggaggcagtctcaagcagctggtctgagtctggaggcggtttgtcagggggagatgaagaggacactcggctccttcaactcctccgcactgcccgggatccttctgaggccttccaggctttgcaagctgctttgccgcggcggggcggtcgacttggcttcccccgacgcaaggaagctttgtatcgggcactgggccgagtgcttgtggaaggaggtagtgatgagaagcggctctgcttgcaacttctctcggacgttctccggggtcagggggaggcaggccagcttgaagaggcctttagcttagcacttttgcctcaactagttgtctcgttacgggaagagaatccagccctgcggaaagatgcgctgcagatccttcatatatgtctgaaacgtagtcctggagaggtgctgagaacgcttatacaacaaggactggaaagtaccgatgcccgacttagagcttccacagcactactgcttcccatcttgcttactactgaggacttgttgcttggtctggatctcaccgaggtgataatatccctagcccgaaagcttggtgatcaggagacagaagaagaatctgagacagctttctccgcacttcaacaaattggggagcgacttggccaagacaggtttcaatcttacatttctcgtctgccctctgccctgaggagacactacaatcgccgcctggagtcccagtttggaagtcaggttccttattatttggaacttgaagcctctggatttcctgaagatccccttccctgtgcagtgactctttccaacagcaatcttaaatttgggattattcctcaggagctgcattcacgattattggatcaggaagactataagaaccggacccaggccgtcgaagaactaaagcaggtgctgggaaaatttaaccctagttctactcctcattctagtcttgttggcttcattagtttgctatataatttgttagacgattctaacttcaaagtggtgcatggcacacttgaagtcctgcatttactggttattcgccttggagagcaggtacagcagttcttgggaccagttatagcagcttctgtcaaagtgctggcggacaacaagttggtgatcaaacaagaatacatgaaaatcttcctcaagctaatgaaggaagtaggacctcagcaggtgctttgtttactcctggaacatctcaaacataagcattccagagtgagagaggaggtggtgaacatttgcatctgctccctgctgacctatcctagtgaggattttgacttgcccaaactgtcctttgatcttgccccagctcttgtagatagcaaacgcagggtacgccaagcagctttagaagcttttgccgtattggcatcatcaatgggctcaggtaaaaccagcatcctttttaaagctgtggatacagttgaactgcaagataatggagatggagtgatgaatgctgtgcaggccagattggctaggaaaaccttaccaaggctcacagagcagggatttgtggaatatgcagtactgatgccatcttctgccgggggtaggtcaaaccatttggcacatggagcagatacggactggcttttggctggtaacagaactcagagtgcacactgtcactgtggtgaccacgtgagggatagcatgcacatttatggatcttacagcccaactatctgtacccgaagggtattaagtgcaggaaaaggaaaaaataaattaccatgggaaaatgagcaacctggaatcatgggagaaaaccagacctccacttccaaggatatagagcagttttcaacatatgatttcatcccatctgcaaaattaaagctttctcaaggaatgccagtcaatgatgatttatgttttagcagaaaaagagtatcaagaaacttatttcagaatagtcgggattttaacccagattgtcttcctttatgtgctgctggtactactgggactcatcaaacaaatctttctgggaaatgtgcacaacttggattttcacaaatatgtggtaaaactggcagtgtgggttctgacttacaattcctagggacaactagcagtcatcaagaaaaagtgtatgctagcctcaattttggcagtaagacacagcaaacatttggtagtcaaacagagtgtacttcctcaaatggtcaaaatccaagtccaggagcttacatccttccatcctatcctgtctcatcacctcgaactagtccaaagcatacatctcctcttattatatctccaaagaagtctcaagataattctgttaatttctcaaattcctggcctcttaaaagcttcgaaggactatcaaagccaagtccacagaagaagcttgtcagccaaaaatcgtctgatcctacgggtagaaatcatggagaaaattctcaagaaaaacctccagttcagcttacacctgccttggtgagatcgccatcttcccgacgaggtctaaatgggacaaagcctgttcctcccataccaaggggaataagccttttgcctgataaagctgatttaagcacagtgggacacaaaaagaaagagcctgatgatatttggaagtgtgaaaaagatagtcttccaattgatctttcagaattaaatttcaaggataaagatttggatcaagaagagatgcatagctctcttaggtcccttcgtaatagtgcagctaagaaaagagcaaaactgagtggcagtacttcagatcttgaaagccctgattctgcaatgaagctcgacttgacgatggactccccgtctctgtcttcctcaccaaacatcaattcttacagtgaaagtggagtttacagccaagaatcattgacttcttctctgtctacaactccccaggggaagagaataatgtcagacatatttccaacatttgggtcaaaaccttgtccaacaagactttcttctgcaaagaaaaaaatttctcatattgctgaacaaagccccagtgcagggtcatcatcaaatccacagcaaatttccagttttgacttcacaaccacaaaggctttatcagaagactcagtagtagttgttggaaaaggcgtatttggaagtttaagttcagcaccagcaacctgcagccaatcagtgatatcttctgtggaaaatggggatacattttcaattaaacaaagtattgaaccaccatcagggatttatggaagatcagtccagcaaaatatttcatcatatcttgatgttgagaatgaaaaagatgctaaagtttctatttctaaatctacttataacaagatgagacaaaagagaaaagaagagaaagaactgtttcacaataaagattgtgaaaagaaggaaaaaaattcctgggaacgaatgagacatacaggaactgagaaaatggcatctgaaagtgaaacacctactggagctatttcacagtataaagaaaggatgccttctgtcactcatagtccagaaataatggatctgtcagaactacgaccattctctaaaccagaaatagcactgacagaagccctgaggcttttggctgatgaggattgggagaagaaaattgagggactgaattttattagatgcttagctgcttttcattctgagatactgaacacaaagttgcatgaaacaaattttgcagttgttcaagaggtgaaaaatttacgttctggagtttctcgtgctgctgtggtctgtttaagtgatcttttcacttatttgaaaaagagcatggatcaagagctagataccacagtaaaagttttgttgcacaaggctggtgaatcaaatacatttataagagaagatgttgacaaagcattgagagctatggttaataatgtaactcctgcacgtgcagttgtttctcttatcaatggtggacaaaggtattatggtcgaaagatgctgttcttcatgatgtgtcatcctaactttgaaaaaatgcttgaaaagtatgtcccatctaaagatttgccatatattaaggactctgttagaaacttacagcaaaagggtttgggggagataccattagatactccttcagcaaaaggaagacgatctcatactggcagtgttggaaatacaagatcatcatctgtttctagagatgctttcaattcagctgaaagagctgtaactgaagttcgtgaagtcaccagaaaatcagtccctcgtaattccttagaaagtgctgagtaccttaaactcataactggcttattaaatgcaaaagactttcgtgatcgtattaatgggattaagcagcttttatcagatacagaaaataatcaagaccttgttgttggaaacattgtgaagatttttgatgcttttaaatctcgacttcatgattctaatagtaaagtaaatctggtggctctggaaacaatgcacaaaatgattcctctacttagagaccacttatctcctataatcaacatgctaattccagcaatagtggataacaatctgaattccaagaatccaggcatctatgcggctgctacaaatgttgttcaggcactgagtcagcatgtagacaattacttacttctacagccattttgcacaaaagctcagtttttaaatggaaaagcaaaacaggacatgacggaaaagcttgctgatattgttacggaactttatcaaaggaagccgcatgccacagagcagaaagtgttggttgttttatggcatctcttaggaaatatgacaaatagtggctctctgcctggagctggaggaaatatacgaacagccacagctaaattatcaaaagcactctttgcacagatgggtcagaatctgttaaatcaggctgcatctcaaccaccacatatcaaaaagagtttggaggaattactcgatatgacaattttaaatgaattatgaatcttcgataaaatactgtatgatgaacaaaagtgtttacatgatgacaaatggaactttctaaaagttatgttatcagtgcctgcacttcacatccagcaaattaagtcaatggctatttttatttgcagcctatgagtacacatctgtcctatatcaaccttaccacttatattcatcacataaaaacctaaaatattcatgaataattcatgaaatctgagtcacatgggatgaattcaattttaatatttttgagaaaagtcctgctcatttgcactattctatagaaactacaatttgttgccctatatgtaaaattagaattgtaattaaaaatacacattttattatgtaatcatgttctggtatgtctcatttctcagccttattttataacgtggaagtcattgaactatgttatcagaaactaagtttgtatattatttgtgaaaaacatgtatttctgaatcagtccgctaatatgattgtgcagtattagcttgcttttgctgctgtgttaatgtcatatatttgcttaccttttgggttcaattatctacataattgtgaaatttaacaagttataataaagcatgacaaccaaagttttagaaaacattaaacattttaaatgcacgtttaaaaaacgtgttgaatgtaacccccctatttttgtgtgcaaacactaaattttattgctttatgttttgacctttataaaggtgttattctgctgcccagttttgtaattctcaaaaatagtgccaggtcttctatagcttttttcagaattcatgggcttacaagtactgtatgcatctttaaaaagaaaaggaatgttataaaataaaaggatttatttcttta

SEQ ID NO: 132258 - DNA, 710 bp, Homo sapiens
  Payload ID: 5827
  Gene Symbol: FAM179B
  Gene Name: family with sequence similarity 179, member B
  ENST ID: ENST00000556823
  CDS Start-End: 1-468
tctcgacttcatgattctaatagtaaagtaaatctggtggctctggaaacaatgcacaaaatgattcctctacttagagaccacttatctcctataatcaacatgctaattccagcaatagtggataacaatctgaattccaagaatccaggcatctatgcggctgctacaaatgttgttcaggcactgagtcagcatgtagatattgttacggaactttatcaaaggaagccgcatgccacagagcagaaagtgttggttgttttatggcatctcttaggaaatatgacaaatagtggctctctgcctggagctggaggaaatatacgaacagccacagctaaattatcaaaagcactctttgcacagatgggtcagaatctgttaaatcaggctgcatctcaaccaccacatatcaaaaagagtttggaggaattactcgatatgacaattttaaatgaattatgaatcttcgataaaatactgtatgatgaacaaaagtgtttacatgatgacaaatggaactttctaaaagttatgttatcagtgcctgcacttcacatccagcaaattaagtcaatggctatttttatttgcagcctatgagtacacatctgtcctatatcaaccttaccacttatattcatcacataaaaacctaaaatattcatgaataattcatgaaatctgagtcacatgggatgaattca

SEQ ID NO: 132259 - DNA, 479 bp, Homo sapiens
  Payload ID: 5827
  Gene Symbol: FAM179B
  Gene Name: family with sequence similarity 179, member B
  ENST ID: ENST00000557250
  CDS Start-End: 1-479
gttttagcagaaaaagagtatcaagaaacttatttcagaatagtcgggattttaacccagattgtcttcctttatgtgctgctggtactactgggactcatcaaacaaatctttctgggaaatgtgcacaacttggattttcacaaatatgtggtaaaactggcagtgtgggttctgacttacaattcctagggacaactagcagtcatcaagaaaaaggagaaaattctcaagaaaaacctccagttcagcttacacctgccttggtgagatcgccatcttcccgacgaggtctaaatgggacaaagcctgttcctcccataccaaggggaataagccttttgcctgataaagctgatttaagcacagtgggacacaaaaagaaagagcctgatgatatttggaagtgtgaaaaagatagtcttccaattgatctttcagaattaaatttcaaggataaagatttggatcaagaagag

SEQ ID NO: 132260 - DNA, 544 bp, Homo sapiens
  Payload ID: 5827
  Gene Symbol: FAM179B
  Gene Name: family with sequence similarity 179, member B
  ENST ID: ENST00000555874
  CDS Start-End: 22-544
gttgccagagtctgctgtaggatgttttcaacatatgatttcatcccatctgcaaaattaaagctttctcaaggaatgccagtcaatgatgatttatgttttagcagaaaaagagtatcaagaaacttatttcagaatagtcgggattttaacccagattgtcttcctttatgtgctgctggtactactgggactcatcaaacaaatctttctgggaaatgtgcacaacttggattttcacaaatatgtggtaaaactggcagtgtgggttctgacttacaattcctagggacaactagcagtcatcaagaaaaagtgtatgctagcctcaattttggcagtaagacacagcaaacatttggtagtcaaacagagtgtacttcctcaaatggtcaaaatccaagtccaggagcttacatccttccatcctatcctgtctcatcacctcgaactagtccaaagcatacatctcctcttattatatctccaaagaagtctcaagataattctgttaatttctcaaattcctggcctcttaaaagct

SEQ ID NO: 132261 - DNA, 6232 bp, Homo sapiens
  Payload ID: 5827
  Gene Symbol: FAM179B
  Gene Name: family with sequence similarity 179, member B
  Uniprot ID: Q9Y4F4
  ENST ID: ENST00000557423
  CDS Start-End: 210-3197
ggtggcagctgtggggtctagggctcagacgggggccattttgccagaggctgcctcccggagttgggggcggcctggcggcaggctgaagctgttcttttgcctcttctgcagcttggggcttggagaggatctggaagtctgggctccatcgagccctttggagacggcaatggtttcttccaaccaccaccacctgacaaccctgcatggcggctgccccctccgcgctgcttctgctgccgccctttccagtcctctctacctatcggctccagagccgcagtcgtccttccgccccagagaccgatgatagtcgagttgggggcattatgagaggagagaaaaactactacttccgtggagctgcgggggaccacggttcctgccccactacaacttcgcctctggcctcggccctcttgatgccctcggaggcagtctcaagcagctggtctgagtctggaggcggtttgtcagggggagatgaagaggacactcggctccttcaactcctccgcactgcccgggatccttctgaggccttccaggctttgcaagctgctttgccgcggcggggcggtcgacttggcttcccccgacgcaaggaagctttgtatcgggcactgggccgagtgcttgtggaaggaggtagtgatgagaagcggctctgcttgcaacttctctcggacgttctccggggtcagggggaggcaggccagcttgaagaggcctttagcttagcacttttgcctcaactagttgtctcgttacgggaagagaatccagccctgcggaaagatgcgctgcagatccttcatatatgtctgaaacgtagtcctggagaggtgctgagaacgcttatacaacaaggactggaaagtaccgatgcccgacttagagcttccacagcactactgcttcccatcttgcttactactgaggacttgttgcttggtctggatctcaccgaggtgataatatccctagcccgaaagcttggtgatcaggagacagaagaagaatctgagacagctttctccgcacttcaacaaattggggagcgacttggccaagacaggtttcaatcttacatttctcgtctgccctctgccctgaggagacactacaatcgccgcctggagtcccagtttggaagtcaggttccttattatttggaacttgaagcctctggatttcctgaagatccccttccctgtgcagtgactctttccaacagcaatcttaaatttgggattattcctcaggagctgcattcacgattattggatcaggaagactataagaaccggacccaggccgtcgaagaactaaagcaggtgctgggaaaatttaaccctagttctactcctcattctagtcttgttggcttcattagtttgctatataatttgttagacgattctaacttcaaagtggtgcatggcacacttgaagtcctgcatttactggttattcgccttggagagcaggtacagcagttcttgggaccagttatagcagcttctgtcaaagtgctggcggacaacaagttggtgatcaaacaagaatacatgaaaatcttcctcaagctaatgaaggaagtaggacctcagcaggtgctttgtttactcctggaacatctcaaacataagcattccagagtgagagaggaggtggtgaacatttgcatctgctccctgctgacctatcctagtgaggattttgacttgcccaaactgtcctttgatcttgccccagctcttgtagatagcaaacgcagggtacgccaagcagctttagaagcttttgccgtattggcatcatcaatgggctcaggtaaaaccagcatcctttttaaagctgtggatacagttgaactgcaagataatggagatggagtgatgaatgctgtgcaggccagattggctaggaaaaccttaccaaggctcacagagcagggatttgtggaatatgcagtactgatgccatcttctgccgggggtaggtcaaaccatttggcacatggagcagatacggactggcttttggctggtaacagaactcagagtgcacactgtcactgtggtgaccacgtgagggatagcatgcacatttatggatcttacagcccaactatctgtacccgaagggtattaagtgcaggaaaaggaaaaaataaattaccatgggaaaatgagcaacctggaatcatgggagaaaaccagacctccacttccaaggatatagagcagttttcaacatatgatttcatcccatctgcaaaattaaagctttctcaaggaatgccagtcaatgatgatttatgttttagcagaaaaagagtatcaagaaacttatttcagaatagtcgggattttaacccagattgtcttcctttatgtgctgctggtactactgggactcatcaaacaaatctttctgggaaatgtgcacaacttggattttcacaaatatgtggtaaaactggcagtgtgggttctgacttacaattcctagggacaactagcagtcatcaagaaaaagtgtatgctagcctcaattttggcagtaagacacagcaaacatttggtagtcaaacagagtgtacttcctcaaatggtcaaaatccaagtccaggagcttacatccttccatcctatcctgtctcatcacctcgaactagtccaaagcatacatctcctcttattatatctccaaagaagtctcaagataattctgttaatttctcaaattcctggcctcttaaaagcttcgaaggactatcaaagccaagtccacagaagaagcttgtcagccaaaaatcgtctgatcctacgggtagaaatcatggagaaaattctcaagaaaaacctccagttcagcttacacctgccttggtgagatcgccatcttcccgacgaggtctaaatgggacaaagcctgttcctcccataccaaggggaataagccttttgcctgataaagctgatttaagcacagtgggacacaaaaagaaagagcctgatgatatttggaagtgtgaaaaagatagtcttccaattgatctttcagaattaaatttcaaggataaagatttggatcaagaagaggtcagacatatttccaacatttgggtcaaaaccttgtccaacaagactttcttctgcaaagaaaaaaatttctcatattgctgaacaaagccccagtgcaggtgttccctcggaagttaggaattccctttctctccatattgctgcgtgggcatggaggactagggtcatcatcaaatccacagcaaatttccagttttgacttcacaaccacaaaggctttatcagaagactcagtagtagttgttggaaaaggcgtatttggaagtttaagttcagcaccagcaacctgcagccaatcagtgatatcttctgtggaaaatggggatacattttcaattaaacaaagtattgaaccaccatcagggatttatggaagatcagtccagcaaaatatttcatcatatcttgatgttgagaatgaaaaagatgctaaagtttctatttctaaatctacttataacaagatgagacaaaagagaaaagaagagaaagaactgtttcacaataaagattgtgaaaagaaggaaaaaaattcctgggaacgaatgagacatacaggaactgagaaaatggcatctgaaagtgaaacacctactggagctatttcacagtataaagaaaggatgccttctgtcactcatagtccagaaataatggatctgtcagaactacgaccattctctaaaccagaaatagcactgacagaagccctgaggcttttggctgatgaggattgggagaagaaaattgagggactgaattttattagatgcttagctgcttttcattctgagatactgaacacaaagttgcatgaaacaaattttgcagttgttcaagaggtgaaaaatttacgttctggagtttctcgtgctgctgtggtctgtttaagtgatcttttcacttatttgaaaaagagcatggatcaagagctagataccacagtaaaagttttgttgcacaaggctggtgaatcaaatacatttataagagaagatgttgacaaagcattgagagctatggttaataatgtaactcctgcacgtgcagttgtttctcttatcaatggtggacaaagccatttacacattgctgtaagaaggtgtacagcccagcatttatcagatgtattggaatttatggaaccagaacgtattttatctgcagcaaaggatatggctgaacgcatattaccagctgctgctaagtttgctcaagacagttcacaagaaaccaggtattatggtcgaaagatgctgttcttcatgatgtgtcatcctaactttgaaaaaatgcttgaaaagtatgtcccatctaaagatttgccatatattaaggactctgttagaaacttacagcaaaagggtttgggggagataccattagatactccttcagcaaaaggaagacgatctcatactggcagtgttggaaatacaagatcatcatctgtttctagagatgctttcaattcagctgaaagagctgtaactgaagttcgtgaagtcaccagaaaatcagtccctcgtaattccttagaaagtgctgagtaccttaaactcataactggcttattaaatgcaaaagactttcgtgatcgtattaatgggattaagcagcttttatcagatacagaaaataatcaagaccttgttgttggaaacattgtgaagatttttgatgcttttaaatctcgacttcatgattctaatagtaaagtaaatctggtggctctggaaacaatgcacaaaatgattcctctacttagagaccacttatctcctataatcaacatgctaattccagcaatagtggataacaatctgaattccaagaatccaggcatctatgcggctgctacaaatgttgttcaggcactgagtcagcatgtagacaattacttacttctacagccattttgcacaaaagctcagtttttaaatggaaaagcaaaacaggacatgacggaaaagcttgctgatattgttacggaactttatcaaaggaagccgcatgccacagagcagaaagtgttggttgttttatggcatctcttaggaaatatgacaaatagtggctctctgcctggagctggaggaaatatacgaacagccacagctaaattatcaaaagcactctttgcacagatgggtcagaatctgttaaatcaggctgcatctcaaccaccacatatcaaaaagagtttggaggaattactcgatatgacaattttaaatgaattatgaatcttcgataaaatactgtatgatgaacaaaagtgtttacatgatgacaaatggaactttctaaaagttatgttatcagtgcctgcacttcacatccagcaaattaagtcaatggctatttttatttgcagcctatgagtacacatctgtcctatatcaaccttaccacttatattcatcacataaaaacctaaaatattcatgaataattcatgaaatctgagtcacatgggatgaattcaattttaatatttttgagaaaagtcctgctcatttgcactattctatagaaactacaatttgttgccctatatgtaaaattagaattgtaattaaaaatacacattttattatgtaatcatgttctggtatgtctcatttctcagccttattttataacgtggaagtcattgaactatgttatcagaaactaagtttgtatattatttgtgaaaaacatgtatttctgaatcagtccgctaatatgattgtgcagtattagcttgcttttgctgctgtgttaatgtcatatatttgcttaccttttgggttcaattatctacataattgtgaaatttaacaagttataataaagcatgacaaccaaagttttagaaaacattaaacattttaaatgcacgtttaaaaaacgtgttgaatgtaacccccctatttttgtgtgcaaacactaaattttattgctttatgttttgacctttataaaggtgttattctgctgcccagttttgtaattctcaaaaatagtgccaggtcttctatagcttttttcagaattcatgggcttacaagtactgtatgcatctttaaaaagaaaaggaatgttataaaataaaaggatttatttcttta

SEQ ID NO: 132262 - DNA, 1800 bp, Homo sapiens
  Payload ID: 5828
  Gene Symbol: FAM180A
  Gene Name: family with sequence similarity 180, member A
  Uniprot ID: Q6UWF9
  ENST ID: ENST00000338588
  CDS Start-End: 267-788
gtgctcaaaaacagagtctctctgtggaaggccagttccccaatcccagagagcgtcaaatgaagagaggtaccgactcctgtcccacccaggacgcagccttcagcctccagccttctgaggcagagtaggcatttctgcacgtctgcaaaaggaagggagggaagcactccatcatctcactgggaagaacggcacgggcatacctgcagctactggggttccactgggcttgagggtcgatttttcaccttttgaaggacaagatgcattggaagatgttgctgcttctgctgttgtattacaatgctgaggcttctatgtgccacaggtggagcagggctgtgctcttccctgccgcccaccggccaaagaggtcctcatcactgccattgaacccagtcctgcagacctccctggaggaggtggagctgctctacgagttcctgctggccgaacttgagatcagccctgacctgcagatctccatcaaggacgaggagctggcctccttgcggaaggcctcagacttccgcaccgtctgcaacaacgtcatccccaagagcatcccagacatccgccggctcagcgccagcctctccagccaccctggcatcctcaagaaagaagactttgaaaggacagtgctgaccctggcctacacagcctaccgcacagccctgtcccacggccatcagaaggacatctgggcgcagtccctcgttagcctcttccaggccctgaggcacgacttgatgcgctcctcacagccgggagtacctccctgagagactggcccacaccaggacctcagagcagggaccagcacagtaatccagaaagtcttcattctctactccatttacagagaccagcaacaaaactcttaccgctgacacagagcagcagagatcaaacagtaaccccgatgctcttttctccttgtagtttcctggaagacacatctgattcatgccatcatgtgacctgggctggaagaaagggctggaatggtcattcaagacgcctccatgggcagaatggtttgcctatggcaggcagaattctgatatgcttcaacccagagcagtggccacacactcaagagtgagaacaggcgtgagccaccgtgcctggcccaggatctaaaaactttctaagtttcctccatcgttggcatcctcacagctatctccaatgtcactcaagagacatcaacagacatttaactgctgcagacttcattgctctgtcacctcaccttgaatctaacaaatcaaagtatttctgcaggtccaatggtctaaaatcaaatgcttgttaaatgactttttacaacaccccttactttcctaatccatttcaatcttattttttttattgtggtaaaaaacacatcaggtaaaatgtaccatcttaaccatttttaagcatatggtacagcagtgttaactccatgcatgttgtgaaacagacccccggaactttctcatcttgtaattctgaagttctatacccaccgaacaactcctcttttccccttccccctgcctgccccagctcttggcaccattattctgctttctgtttttgagagtctgactacttaagatacctcatacaagcgggatctggcttacatttcttgagcattgtattctggaaaagtgtttccttcctctgaaaaatgggtagagttctgaaggagaactactggtcttattgtacacttgctgtacctatttttatttaacaaatattcatctatggtataataaagatgtcatgattgagttgctc

SEQ ID NO: 132263 - DNA, 1073 bp, Homo sapiens
  Payload ID: 5828
  Gene Symbol: FAM180A
  Gene Name: family with sequence similarity 180, member A
  Uniprot ID: Q6UWF9
  ENST ID: ENST00000415751
  CDS Start-End: 133-654
tttctgcacgtctgcaaaaggaagggagggaagcactccatcatctcactgggaagaacggcacgggcatacctgcagctactggggttccactgggcttgagggtcgatttttcaccttttgaaggacaagatgcattggaagatgttgctgcttctgctgttgtattacaatgctgaggcttctatgtgccacaggtggagcagggctgtgctcttccctgccgcccaccggccaaagaggtcctcatcactgccattgaacccagtcctgcagacctccctggaggaggtggagctgctctacgagttcctgctggccgaacttgagatcagccctgacctgcagatctccatcaaggacgaggagctggcctccttgcggaaggcctcagacttccgcaccgtctgcaacaacgtcatccccaagagcatcccagacatccgccggctcagcgccagcctctccagccaccctggcatcctcaagaaagaagactttgaaaggacagtgctgaccctggcctacacagcctaccgcacagccctgtcccacggccatcagaaggacatctgggcgcagtccctcgttagcctcttccaggccctgaggcacgacttgatgcgctcctcacagccgggagtacctccctgagagactggcccacaccaggacctcagagcagggaccagcacagtaatccagaaagtcttcattctctactccatttacagagaccagcaacaaaactcttaccgctgacacagagcagcagagatcaaacagtaaccccgatgctcttttctccttgtagtttcctggaagacacatctgattcatgccatcatgtgacctgggctggaagaaagggctggaatggtcattcaagacgcctccatgggcagaatggtttgcctatggcaggcagaattctgatatgcttcaacccagagcagtggccacacactcaagagtgagaacaggccgggcacagaggctcacgcctgtaatcccagcactttaggaggctgagacaggaggattatttgaggtcaggagttcaagaccagcct

SEQ ID NO: 132264 - DNA, 1534 bp, Homo sapiens
  Payload ID: 5828
  Gene Symbol: FAM180A
  Gene Name: family with sequence similarity 180, member A
  Uniprot ID: Q6UWF9
  ENST ID: ENST00000444083
  CDS Start-End: 40-561
tgggcttgagggtcgatttttcaccttttgaaggacaagatgcattggaagatgttgctgcttctgctgttgtattacaatgctgaggcttctatgtgccacaggtggagcagggctgtgctcttccctgccgcccaccggccaaagaggtcctcatcactgccattgaacccagtcctgcagacctccctggaggaggtggagctgctctacgagttcctgctggccgaacttgagatcagccctgacctgcagatctccatcaaggacgaggagctggcctccttgcggaaggcctcagacttccgcaccgtctgcaacaacgtcatccccaagagcatcccagacatccgccggctcagcgccagcctctccagccaccctggcatcctcaagaaagaagactttgaaaggacagtgctgaccctggcctacacagcctaccgcacagccctgtcccacggccatcagaaggacatctgggcgcagtccctcgttagcctcttccaggccctgaggcacgacttgatgcgctcctcacagccgggagtacctccctgagagactggcccacaccaggacctcagagcagggaccagcacagtaatccagaaagtcttcattctctactccatttacagagaccagcaacaaaactcttaccgctgacacagagcagcagagatcaaacagtaaccccgatgctcttttctccttgtagtttcctggaagacacatctgattcatgccatcatgtgacctgggctggaagaaagggctggaatggtcattcaagacgcctccatgggcagaatggtttgcctatggcaggcagaattctgatatgcttcaacccagagcgtgagccaccgtgcctggcccaggatctaaaaactttctaagtttcctccatcgttggcatcctcacagctatctccaatgtcactcaagagacatcaacagacatttaactgctgcagacttcattgctctgtcacctcaccttgaatctaacaaatcaaagtatttctgcaggtccaatggtctaaaatcaaatgcttgttaaatgactttttacaacaccccttactttcctaatccatttcaatcttattttttttattgtggtaaaaaacacatcaggtaaaatgtaccatcttaaccatttttaagcatatggtacagcagtgttaactccatgcatgttgtgaaacagacccccggaactttctcatcttgtaattctgaagttctatacccaccgaacaactcctcttttccccttccccctgcctgccccagctcttggcaccattattctgctttctgtttttgagagtctgactacttaagatacctcatacaagcgggatctggcttacatttcttgagcattgtattctggaaaagtgtttccttcctctgaaaaatgggtagagttctgaaggagaactactggtcttattgtacacttgctgtacctatttttatttaacaaatattcatctatggtataataaagatgtcatgattg

SEQ ID NO: 132265 - DNA, 1388 bp, Homo sapiens
  Payload ID: 5829
  Gene Symbol: FAM180B
  Gene Name: family with sequence similarity 180, member B
  ENST ID: ENST00000538490
  CDS Start-End: 23-628
agctgaggtgtgtggcaggcagatgagggagcagagaactgctgaacagagtgagactcagaggacgtggttgagcatggctgcgaccctgcagttcctggtttgcctggtggtagccatttgtctcctctctggtgtgactacaacccagccccatgcagggcagcccatggacagcaccagcgtgggaggtggcctgcaggagccagaggccccggaagtgatgtttgagctgctctgggctgggctggagctggatgtcatggggcagctgcacatccaggatgaggaactagcgtccacacacccaggccgccgactcagactcctcctgcagcaccacgtgcccagtgacttggagggcactgagcagtggctgcagcagctccaggacctgcggaaggggcctcctcttagcacttgggactttgaacatctgctcctcacaggcctgtcctgcgtctaccggctccacgcagctagtgaggctgaggaacggggccgctgggcccaggtcttcgctctcctggcacaggaaacactctgggacctgtgcaaaggtttctgcccccaggaccggcccccttccctggggtcctgggcctccatccttgaccccttcccctgaccctcctcttttgttctttcacctgccattaccccctcccatctcctcctcaaccccccaggcagacccatcttgcgcaggggcttctgtctggcatctgattcttttcaccgtgttcagatctctgggcttggcttgcaccctggacaccccctctctgcttaccccgaccagatcttgtttcctagatcttgagaggctaagaacccaggctctgggtcgcaaggagtgcgcaaggagtgggcacagagctaagggcacgacttgcaggcagtgtgtgtgtgagtgtgtgtgtgtgtgtgtgtgtgtgtgtgtgtgtgtggagatcaggggtcagggttgagaagtgtgttcaagagatgctgaagggaagctgccccaagtaaggcctggtcagaccttccaactcctaccctggcagtctgtgacaggtcctgtggaattcacaggaatcctctaggtgctgagcatccccttttaggcacaaccaaggatttggggtctctgagcctccaagttcccatctgggttgggagaatcgactttttgagttctgtcagttggaagagtggagggaagcagggggagggaggaacattatctcttttggggtagggaggcaatatctcaacaagcgtcgggtgaatacctcagaggggggagtaaggctgggagaccaaggagagacaagcggaggtgggctggagcaggtgtggccctgattctgtgttgctcttctcataaaatgttctgtttcggc

SEQ ID NO: 132266 - DNA, 1816 bp, Homo sapiens
  Payload ID: 5830
  Gene Symbol: FAM181A
  Gene Name: family with sequence similarity 181, member A
  Uniprot ID: Q8N9Y4
  ENST ID: ENST00000267594
  CDS Start-End: 308-1372
agttgagatcaaacagacttttcattcctggttggtgcctgggagagtgacgaggcctatcagtactggaggacacagtcaagtgtttggtggaagaacagcccacattaagagctttggaaagactttcgtaagacaccaactcacctcccacggagtccacgggcctggtggggaggcttactactggctaagaaaggagagacagcttcatgagcgggcagtgcagaatgggccagcagggctgcaggtgccgtgggatctcaaggaagctgggagctgagctgagtggctctaaaatgtcttgatgcccttagaagagagaagatcttctggagagaggaatgatgcagcccccacaaatcacagaaggcctggggagaaaagggcgagcacagcaaagcaggtcagctcggtgcccttccttggagctgccggccaccagcagagcctaccctcttcatggaaagcctcgtgcagtggccccctggtgatggcatccgacagtgatgtgaagatgctgctgaacttcgtgaacctggcgtccagcgacatcaaggcagccctggataagtccgcaccctgccgccgctccgtggaccatcgcaagtacctgcagaagcagctcaagcgcttctcccagaagtattcccggctcccgcggggccttcctggcagagctgctgagccctacctgaaaagggggtctgaggaccggcccaggaggctgctcctggatttgggccctgattccagccccggcgggggtgggggctgcaaggagaaggtgctgaggaacccctacagggaggaatgtcttgctaaggagcagctcccacagaggcagcatccagaagctgcccagcctggccaggtgcccatgaggaaaagacagctgcccgcttccttctgggaagagccaaggcccacccacagctaccatgtggggctggaggggggactgggccccagggagggacctccctatgagggtaagaaaaattgcaagggcttggagcccctgggacctgagactaccctggtgtccatgtctccaagggccctggctgaaaaggagccgctcaagatgcctggggtctccttggtgggccgcgtcaatgcctggagttgctgccccttccagtaccatggacagcccatctatccgggccccctgggggcactgcctcagagtcctgtccccagcctgggcctttggaggaagagcccagcctttcccggggagctggcgcacctctgcaaggatgtggacggcctggggcagaaggtgtgcaggcccgtggtgctgaaacccatccccaccaagccagccgtgcccccacccatcttcaatgtctttggctacctctagccacgcggagagggcctcagcccccacctctggcctgcaggagtgtcgaggtccccgaggcgctctcctgtgaggaggtggctgggccacagtgtggcctcttccgtttgtgtgcgcatgggagtggagggcaggattggggcagggctcctcaggcagtgacccttcagccttgcagccttggaagctgggaggctggacctggttggcccctccccaggcaggccagggcccagcagcttgtcccgctgtccctgtgcagaccataggtactgggatgttgcccttccttgccttgcagtcaccccagaagccagagagacgcatctgtttacctgccacccactctgcgagccaatctcagttgttgttcttgttcttcttgttctttgtaaatattgagaaagttaaaagaataaagacatttcttttggagtttccata

SEQ ID NO: 132267 - DNA, 1652 bp, Homo sapiens
  Payload ID: 5830
  Gene Symbol: FAM181A
  Gene Name: family with sequence similarity 181, member A
  Uniprot ID: Q8N9Y4
  ENST ID: ENST00000557000
  CDS Start-End: 330-1208
cggggcctgtcccaggtctgcagtggggaacctgccgggccacgttggtggggcctgggccgcaccttcggtcagtgtggaggcccggtggctctggcccgactgggtggcgggtgtgggggcaggctggggcctgggggaggggcgaggtgccgtgggtggcggccgaggaggcatgaaattgctgcagatgcttcttcgggggaatccctgctgcccgcagcctgagatcagcccgcaaggtcagctcggtgcccttccttggagctgccggccaccagcagagcctaccctcttcatggaaagcctcgtgcagtggccccctggtgatggcatccgacagtgatgtgaagatgctgctgaacttcgtgaacctggcgtccagcgacatcaaggcagccctggataagtccgcaccctgccgccgctccgtggaccatcgcaagtacctgcagaagcagctcaagcgcttctcccagaagtattcccggctcccgcggggccttcctggcagagctgctgagccctacctgaaaagggggtctgaggaccggcccaggaggctgctcctggatttgggccctgattccagccccggcgggggtgggggctgcaaggagaaggtgctgaggaacccctacagggaggaatgtcttgctaaggagcagctcccacagaggcagcatccagaagctgcccagcctggccaggtgcccatgaggaaaagacagctgcccgcttccttctgggaagagccaaggcccacccacagctaccatgtggggctggaggggggactgggccccagggagggacctccctatgagggtaagaaaaattgcaagggcttggagcccctgggacctgagactaccctggtgtccatgtctccaagggccctggctgaaaaggagccgctcaagatgcctggggtctccttggtgggccgcgtcaatgcctggagttgctgccccttccagtaccatggacagcccatctatccgggccccctgggggcactgcctcagagtcctgtccccagcctgggcctttggaggaagagcccagcctttcccggggagctggcgcacctctgcaaggatgtggacggcctggggcagaaggtgtgcaggcccgtggtgctgaaacccatccccaccaagccagccgtgcccccacccatcttcaatgtctttggctacctctagccacgcggagagggcctcagcccccacctctggcctgcaggagtgtcgaggtccccgaggcgctctcctgtgaggaggtggctgggccacagtgtggcctcttccgtttgtgtgcgcatgggagtggagggcaggattggggcagggctcctcaggcagtgacccttcagccttgcagccttggaagctgggaggctggacctggttggcccctccccaggcaggccagggcccagcagcttgtcccgctgtccctgtgcagaccataggtactgggatgttgcccttccttgccttgcagtcaccccagaagccagagagacgcatctgtttacctgccacccactctgcgagccaatctcagttgttgttcttgttcttcttgttctttgtaaatattgagaaagttaaaagaataaagacatttcttttggagtttccata

SEQ ID NO: 132268 - DNA, 1162 bp, Homo sapiens
  Payload ID: 5830
  Gene Symbol: FAM181A
  Gene Name: family with sequence similarity 181, member A
  Uniprot ID: Q8N9Y4
  ENST ID: ENST00000556222
  CDS Start-End: 284-1162
tttgtatctggagaggcgctcctgattggcctgaggggccccccagctccggggagttgtcctccattcagcccactcaagggttgcacaactgcttccagccggacggagctcggccggctgcgccggggcctgtcccaggtctgcagtggggaacctgccgggccacgttggtggggcctgggccgcaccttcggtcagctcggtgcccttccttggagctgccggccaccagcagagcctaccctcttcatggaaagcctcgtgcagtggccccctggtgatggcatccgacagtgatgtgaagatgctgctgaacttcgtgaacctggcgtccagcgacatcaaggcagccctggataagtccgcaccctgccgccgctccgtggaccatcgcaagtacctgcagaagcagctcaagcgcttctcccagaagtattcccggctcccgcggggccttcctggcagagctgctgagccctacctgaaaagggggtctgaggaccggcccaggaggctgctcctggatttgggccctgattccagccccggcgggggtgggggctgcaaggagaaggtgctgaggaacccctacagggaggaatgtcttgctaaggagcagctcccacagaggcagcatccagaagctgcccagcctggccaggtgcccatgaggaaaagacagctgcccgcttccttctgggaagagccaaggcccacccacagctaccatgtggggctggaggggggactgggccccagggagggacctccctatgagggtaagaaaaattgcaagggcttggagcccctgggacctgagactaccctggtgtccatgtctccaagggccctggctgaaaaggagccgctcaagatgcctggggtctccttggtgggccgcgtcaatgcctggagttgctgccccttccagtaccatggacagcccatctatccgggccccctgggggcactgcctcagagtcctgtccccagcctgggcctttggaggaagagcccagcctttcccggggagctggcgcacctctgcaaggatgtggacggcctggggcagaaggtgtgcaggcccgtggtgctgaaacccatccccaccaagccagccgtgcccccacccatcttcaatgtctttggctacctctag

SEQ ID NO: 132269 - DNA, 1072 bp, Homo sapiens
  Payload ID: 5830
  Gene Symbol: FAM181A
  Gene Name: family with sequence similarity 181, member A
  Uniprot ID: Q8N9Y4
  ENST ID: ENST00000557719
  CDS Start-End: 189-1067
aatcaaacccgagatgacagttgagatcaaacagacttttcattcctggttggtgcctgggagagtgacgaggcctatcagtactggaggacacagtcaaggtcagctcggtgcccttccttggagctgccggccaccagcagagcctaccctcttcatggaaagcctcgtgcagtggccccctggtgatggcatccgacagtgatgtgaagatgctgctgaacttcgtgaacctggcgtccagcgacatcaaggcagccctggataagtccgcaccctgccgccgctccgtggaccatcgcaagtacctgcagaagcagctcaagcgcttctcccagaagtattcccggctcccgcggggccttcctggcagagctgctgagccctacctgaaaagggggtctgaggaccggcccaggaggctgctcctggatttgggccctgattccagccccggcgggggtgggggctgcaaggagaaggtgctgaggaacccctacagggaggaatgtcttgctaaggagcagctcccacagaggcagcatccagaagctgcccagcctggccaggtgcccatgaggaaaagacagctgcccgcttccttctgggaagagccaaggcccacccacagctaccatgtggggctggaggggggactgggccccagggagggacctccctatgagggtaagaaaaattgcaagggcttggagcccctgggacctgagactaccctggtgtccatgtctccaagggccctggctgaaaaggagccgctcaagatgcctggggtctccttggtgggccgcgtcaatgcctggagttgctgccccttccagtaccatggacagcccatctatccgggccccctgggggcactgcctcagagtcctgtccccagcctgggcctttggaggaagagcccagcctttcccggggagctggcgcacctctgcaaggatgtggacggcctggggcagaaggtgtgcaggcccgtggtgctgaaacccatccccaccaagccagccgtgcccccacccatcttcaatgtctttggctacctctagccacg

SEQ ID NO: 132270 - DNA, 842 bp, Homo sapiens
  Payload ID: 5830
  Gene Symbol: FAM181A
  Gene Name: family with sequence similarity 181, member A
  ENST ID: ENST00000554404
  CDS Start-End: 146-842
ttgcacaactgcttccagccggacggagctcggccggctgcgccggggcctgtcccaggtcagctcggtgcccttccttggagctgccggccaccagcagagcctaccctcttcatggaaagcctcgtgcagtggccccctggtgatggcatccgacagtgatgtgaagatgctgctgaacttcgtgaacctggcgtccagcgacatcaaggcagccctggataagtccgcaccctgccgccgctccgtggaccatcgcaagtacctgcagaagcagctcaagcgcttctcccagaagtattcccggctcccgcggggccttcctggcagagctgctgagccctacctgaaaagggggtctgaggaccggcccaggaggctgctcctggatttgggccctgattccagccccggcgggggtgggggctgcaaggagaaggtgctgaggaacccctacagggaggaatgtcttgctaaggagcagctcccacagaggcagcatccagaagctgcccagcctggccaggtgcccatgaggaaaagacagctgcccgcttccttctgggaagagccaaggcccacccacagctaccatgtggggctggaggggggactgggccccagggagggacctccctatgagggtaagaaaaattgcaagggcttggagcccctgggacctgagactaccctggtgtccatgtctccaagggccctggctgaaaaggagccgctcaagatgcctggggtctccttggtgggccgcgtcaatgcctggagttgctgccccttccagtaccatggacagcccatctatccgggccccctgggggcactgcctc

SEQ ID NO: 132271 - DNA, 1072 bp, Homo sapiens; identical to SEQ ID NO: 132269
  Payload ID: 5830
  Gene Symbol: FAM181A
  Gene Name: family with sequence similarity 181, member A
  Uniprot ID: Q8N9Y4
  ENST ID: ENST00000620448
  CDS Start-End: 189-1067

SEQ ID NO: 132272 - DNA, 1652 bp, Homo sapiens; identical to SEQ ID NO: 132267
  Payload ID: 5830
  Gene Symbol: FAM181A
  Gene Name: family with sequence similarity 181, member A
  Uniprot ID: Q8N9Y4
  ENST ID: ENST00000611800
  CDS Start-End: 330-1208

SEQ ID NO: 132273 - DNA, 1816 bp, Homo sapiens; identical to SEQ ID NO: 132266
  Payload ID: 5830
  Gene Symbol: FAM181A
  Gene Name: family with sequence similarity 181, member A
  Uniprot ID: Q8N9Y4
  ENST ID: ENST00000617881
  CDS Start-End: 308-1372

SEQ ID NO: 132274 - DNA, 842 bp, Homo sapiens; identical to SEQ ID NO: 132270
  Payload ID: 5830
  Gene Symbol: FAM181A
  Gene Name: family with sequence similarity 181, member A
  ENST ID: ENST00000629121
  CDS Start-End: 146-842

SEQ ID NO: 132275 - DNA, 1162 bp, Homo sapiens; identical to SEQ ID NO: 132268
  Payload ID: 5830
  Gene Symbol: FAM181A
  Gene Name: family with sequence similarity 181, member A
  Uniprot ID: Q8N9Y4
  ENST ID: ENST00000626058
  CDS Start-End: 284-1162

SEQ ID NO: 132276 - DNA, 3924 bp, Homo sapiens
  Payload ID: 5831
  Gene Symbol: FAM181B
  Gene Name: family with sequence similarity 181, member B
  Uniprot ID: A6NEQ2
  ENST ID: ENST00000329203
  CDS Start-End: 136-1416
agcgcagcgagccaggcccggaactagtaggctgcgccgcgcgcgccgcgccggggcgggagctgggtctgggcggcgggcaggagctggcgggggcgcacgggcagcgctgcggacagcccgggagccgcggcgatggcggtgcaggcggcgctcctcagcacgcaccctttcgtgcccttcggcttcgggggctccccggacgggctagggggcgccttcggagccctggacaagggctgctgtttcgaggacgatgagaccggggctccggcgggtgcgctgctgtcgggagccgaaggaggggacgtgcgcgaggccacccgcgatctactcagcttcattgactcggcgtccagcaacatcaagctggcgctggacaagccgggcaagtcgaagcggaaggtgaaccaccgcaagtacctgcagaagcagatcaagcgctgcagcggcctcatgggcgccgcgccccccggcccgccctccccgagcgccgccgacacgccagccaaacggccgctggccgcccctagcgccccgacagtcgcggccccggcccacggcaaggctgccccccggcgggaggcgtcgcaggccgccgcggccgccagcttgcaaagccgaagtctggccgcgctcttcgactcgctgcgccacgtccccgggggtgccgagccggcggggggtgaggtggctgcgccggcggccgggctaggaggtgcgggcactgggggcgcgggaggggacgtggcaggccccgcgggggccacggcgatcccaggggccaggaaggtcccgctgcgggcacgcaatctgcctccgtccttcttcacggagccgtcccgggcaggcggcggcgggtgtggcccgtcggggccggacgtgagcttgggcgacctggagaagggcgcggaggccgtggagttctttgagctgctggggcccgactacggcgccggcacggaggcggcagtcttgcttgccgccgagcctctcgacgtgttccccgccggagcctccgtactgcggggacccccggagctggagcccggcctctttgagccgccgccggcagtggtgggaaacctactgtaccccgagccctggagcgtcccgggctgctccccgaccaaaaagagccccctgactgccccccgcggcggcttgaccttgaacgagcccttgagccccctgtaccccgccgctgcggattctcccggcggggaggacgggcggggccatttggcctctttcgcccccttctttccagactgcgccctgcccccgccgccgccgccccatcaggtgtcctacgattacagcgcgggctacagccgcaccgcctattccagcctttggagatccgacggggtttgggaaggggcgccgggggaggagggggcgcaccgggactgacttcgaggcacgcttcccttcattagagacggctgtggagagcgccgcgcctccgtgggtttctcctaaatctgaagaacgatgggaaaatgcacgtggagatgaaaccagatttttaaaaattcaattaataaaagcaacttcagaaaaaagagatgaagacgagttggggattgtttaatcacaacctcaagtgttaaaacaaaaacaaacaaacacgtttgtaggttcttactggaccagaggagtcaagaaaccaagatggtttggggtatggggtggggacggcaaaaggggtaagagctggcttctgtagccacctgtcccttctatttttcagcgaaggtcagtgtatttagtgtaattaccccttctaaacagtgtcctagtccctcccttccctctccttgagtgcattttgaattaaagcctatattgaaaagaatggaggtgagacttactgatttgggtgttttcttacaggacggttttccgtctggtcgcttagctttgttaggtgagcctgtggctgagggaggaggccggtggtccactgctgacctcctgtgcttgtccttgggtagggttctcttctgtcacggtttaactcttttttctgcccgcttcctgcttccatctccctccacccttatcacagtcccagtgcttactttccttctttctttgcctggcctctcattattctatttctttcggccggcttttcttgcacatctcttttgtaggagacttaaatttggcaaacctgggttccatttctctcctgtcttttccccattttccagccactttgggagggagagggtgggcaaactgtaacctctttgtatcaattttcgtgatctgagagggtgaagacggtaatgttcttctactcacttcacaactggttgggtagctcagagggaaataagtaaaatgtcttgaggctgtggcagtgcttgattggttctgctgtgtatatataaatggtttctacacacggaaacagagttgtgagtcccatgccttttttggcggggggctatctacttgcctggtgattgccctttcccttacaagctgtacatcctctttaccatccctccttctctccttccacagctccccttccacctctgttggtttctgcctccctttgtttcctcagtccttatacccacactctccccacggaagggcataaagaaaggtgtgaagtttccaaaggaatttctgttccctgaatagcaggtctgatgaatggaatctgaaggggctctgcagggaggagtatgatctgttgtccgagggagatttggggaaaaagaaatatttttaccagccatgaatgtggcagagaggacacatggcaccaataggttggttaaggggcaggggaggaaagactggtgggaagtgagcagctggagggaaaagaggagcccttggtgctgtagaactgcggggagaaaggcatgaagagagcaacgcccagaacatctgagtgagaggctgccttctgatgatgctgcaaaggagagctgcttggcttcaaggcacccaggattgattgcaggaatatctggatgtgagttagttgaaaaccgagtgttaccgcaagaggtgtaaaaatccaggttcatgtttgcacacatcaaaagtattgtgatattttcataaaagaatttctggaaaaaatgagtattaaccaatggtagatgcaactttaaatgctatcagtaagtcattttcttctgaataaagcctttcttaagaaagcaccacaggaaatagaacgagtactgttaatgatgaaaagaacttttgcaactccagaaagctaatgtctattggatttcttccaaagtggttaaaggtgattaattccattgtgctaacagaatattacttaataacgatttaatttgtctaaactgttgtgaatacaatccaggatacacttgcacagtaggaaaacattaataaccctgtgactgttactaagactatagtgtcattgtaatgtttcttaattctcctctcctttcttacctagtgtagtaaaacaggttatctctctcctactgttttgcttgctatacgtttaattaataataatatcaacattgtttccgcatcccaggcatttaagctaactcactgagcctcttaatattgccatgatgtaggtgcttgatactgtttggatctgtgtccctagccaaatgtcatctctaattgtaatccccacatgtcgagggaggtcctagtggaaggtgattggatcatgggggtggtttcctccatgctgttcttgtgatagtgagggagttctcatgagatctgatggttataaagtgtggcacttccttgctatctctctctcctgccaccatgtaagacgtgccttcctgctgcttcaccttctgccatgattgtaagtttcatgaggcctcccagccatgtggaactgtgagtcaattaaacctctttcatttataaatt

SEQ ID NO: 132277 - DNA, 1681 bp, Homo sapiens
  Payload ID: 5832
  Gene Symbol: FAM182B
  Gene Name: family with sequence similarity 182, member B
  Uniprot ID: Q5T319
  ENST ID: ENST00000376403
  CDS Start-End: 380-838
gacctctcctcggggtcgacgggaaggtctccggatgccaggactcgcaaagggccgaccagaatgaggaaatcccaggcggagtccgggggaggcagcacggcatcccagcctcagggctgcccggacggtgttggttggggtaagattggggaagatgccaggtgatagaatccaccctgcctctgacagcatccaatctggagcaaaggcttctttcaaccttcccccaagctcccaatacaagcccaaattctggaacaagtcctttccaacacctccttcagagaagctccctggctccaggcagtgcttgctcccctcactgcagcaggaagcctaacttgcgaactgcaggtgtgctccaggtggtcactggatgcaagaaatggtgcgagaactttggatgtggaacgtggaggaggaggaacacgaagtggggatctgcacttggggtggtcagcactgcggatgcccagcaaagtcactgcctggtccacatcccggaggggtctctgcgcctcagtcggcatcgcagctgatggtgaaacttttggtgtggcagaagagtgtccacaaacttcggaaggtatccgctacatcctccatagccgtgtatccctgcccagggcaatcttctgggggagcggaaagtcctgctcccgggccagggctggctggctggagccacttgtgcggcgcagccctggcggaggttcaggcggccccggtgtcgcaagcggctgtgagtgatgcctccctggggccggagtggtcccaggaaggctgcagaccagggctgaccagcgggcagcatggtggccgcgatggaaggtgacggggttcgcagcgccaggggacccagcagagcccgagcccgggcatcccgcatctccagcagcatcgcaggtaggcctggtgctggtgaagtggcggccagtgcacaaggcctacgacccagtcccagaggccagcccattgtcagctaacttcaggaaccccgggccagctgaggccccgggccccatgggcaagacaaagggcagagggtccgcaggcggggccgagtgcaggcagtgcaggcctggctccaccgccgcggagctcgcagggcgcagcaggcatcgggcagtgaccagggcttccagaggaggctgtgcacccctgcaaaggctcctgccctgcgtccagcctatccgcggggactccacgtgcaccccctcctcattgtccttgtctagggccgcggcggcaaggtccttgctcccatggcgtgactccagggtgcaggagcctgggctgagcaggtggagtagggtgagctccgccaagaacccagcgagagtggcgccccagggcggcacaggaggccgcatttaacatgtcaatcatctgaaagattttatggcatcttttttttgacatcttataatatctataatgtttattatatcttgtgatataattattaacaccacttcagtgtgattattatgattatttttataccaacacatcttcaattattaatattcccagttgctagagaaaactgaaaactactagttttgaaagcctcacttctgccaatggaagcacattccagcatgtcgccaacgcaatccactttccaccactttcacaaaaaacgttactgcacaattatactatcctaccctta

SEQ ID NO: 132278 - DNA, 456 bp, Homo sapiens
  Payload ID: 5832
  Gene Symbol: FAM182B
  Gene Name: family with sequence similarity 182, member B
  ENST ID: ENST00000376404
  CDS Start-End: 1-456
ttagaaatggtgcgagaactttggatgtggaacgtggaggaggaggaacacgaagtggggatctgcacttggggtggtcagcactgcggatgcccagcaaagtcactgcctggtccacatcccggaggggtctctgcgcctcagtcggcatcgcagctgatggtgaaacttttggtgtggcagaagagtgtccacaaacttcggaaggtatccgctacatcctccatagccgtgtatccctgcccagggcaatcttctgggggagcggaaagtcctgctcccgggccagggctggctggctggagccacttgtgcggcgcagccctggcggaggttcaggcggccccggtgtcgcaagcggctgtgagtgatgcctccctggggccggagtggtcccaggaaggctgcagaccagggctgaccagcgggcagcatggtggccgcgatggaaggtga

SEQ ID NO: 132279 - DNA, 733 bp, Homo sapiens
  Payload ID: 5832
  Gene Symbol: FAM182B
  Gene Name: family with sequence similarity 182, member B
  ENST ID: ENST00000584071
  CDS Start-End: 413-733
tgcttgtgtgtcggagctctgaggctccggcctgacctctcctcggggtcgacgggaacgtctccggatgccaggactcgcaaagggctgacaagaatgaggaaatcccaggcggagtccgggggaggcagcacggcatcccagcctcagggctgcccggacggtgttggttggggtaagattggggaagatgccaggtgatagaatccaccctgcctctgacagcatccaatctggagcaaaggcttctttcaaccttcccccaagctcccaatacaagcccaaattctggaacaagtcctttccaacacctccttcagagaagctccctggctccaggcagtgcttgctcccctcactgcagcaggaagcctaacttgcgaactgcaggtgtgctccaggtggtcactggatgcaagtttcttttgatttctcctgcttagaaatggtgcgagaactttggatgtggaacgtggaggaggaggaacacgaagtggggatctgcacttggggtggtcagcactgcggatgcccagcaaagtcactgcctggtccacatcccggaggggtctctgcgcctcagtcggcatcgcagctgatggtgaaacttttggtgtggcagaagagtgtccacaaacttcggaaggtatccgctacatcctccatagccgtgtatccctgcccagggcaatcttctgggggagcggaaagtcctgctcccgggccagggctg

SEQ ID NO: 132280 - DNA, 488 bp, Homo sapiens
  Payload ID: 5833
  Gene Symbol: FAM183A
  Gene Name: family with sequence similarity 183, member A
  Uniprot ID: A6NL82
  ENST ID: ENST00000335282
  CDS Start-End: 1-405
atggcgggacacccaaaagagaaggtgattccagatgaggtccatcagaaccagatcttgcgggaactgtacctcaaggagctacgaacccagaaactctacacgcagtatcacgtgaatcccctccgcaagattcatacagtcaccaggaagcccatgtcttggcatgataacctggaggaacctgcagatgccaggtttctgaatctcattcaccatgctgcccagggaccaaggaagaagtacccagagacacagactgaaaaccaggaagttggatgggacttagagcccttgatcaacccagaacgccatgaccgcaggctgaatcacttcagggtctgcagtgacatcactctgtacaaggctaaaacgtggggcttaggagatgatcaccacaagtagcatcccagcggatgagcccatctgtggatctaatgccttaagtgtgcacagcccagagaaataaaatactactttaaaacgaa

SEQ ID NO: 132281 - DNA, 530 bp, Homo sapiens
  Payload ID: 5833
  Gene Symbol: FAM183A
  Gene Name: family with sequence similarity 183, member A
  ENST ID: ENST00000410025
  CDS Start-End: 36-212
ggcccaggcaagagggcgcgtggcagcccaaggccatggcgggacacccaaaagagaaggtgattccagatgaggtccatcagaaccagatcttgcgggaactgtacctcaaggagctacgaacccagaaactctacacgcagtatcacgtgaatcccctccgcaagagtgagagttcatacagtcaccaggaagcccatgtcttggcatgataacctggaggaacctgcagatgccaggtttctgaatctcattcaccatgctgcccagggaccaaggaagaagtacccagagacacagactgaaaaccaggaagttggatgggacttagagcccttgatcaacccagaacgccatgaccgcaggctgaatcacttcagggtctgcagtgacatcactctgtacaaggctaaaacgtggggcttaggagatgatcaccacaagtagcatcccagcggatgagcccatctgtggatctaatgccttaagtgtgcacagcccagagaaataaaatactactttaaaacgaa

SEQ ID NO: 132282 - DNA, 500 bp, Homo sapiens
  Payload ID: 5833
  Gene Symbol: FAM183A
  Gene Name: family with sequence similarity 183, member A
  ENST ID: ENST00000410048
  CDS Start-End: 97-417
cagccagcctgcatgaggttctctacgtttgagactggcttctccacggaacttggtctgtagccacagagcaaactgcagggccattgacagagaatgaagaggagagtgaagagtggaacacatctaatgtgttctctggaggttcatacagtcaccaggaagcccatgtcttggcatgataacctggaggaacctgcagatgccaggtttctgaatctcattcaccatgctgcccagggaccaaggaagaagtacccagagacacagactgaaaaccaggaagttggatgggacttagagcccttgatcaacccagaacgccatgaccgcaggctgaatcacttcagggtctgcagtgacatcactctgtacaaggctaaaacgtggggcttaggagatgatcaccacaagtagcatcccagcggatgagcccatctgtggatctaatgccttaagtgtgcacagcccagagaaataaaatactactttaaaacgaa

SEQ ID NO: 132283 - DNA, 448 bp, Homo sapiens
  Payload ID: 5833
  Gene Symbol: FAM183A
  Gene Name: family with sequence similarity 183, member A
  ENST ID: ENST00000409396
  CDS Start-End: 30-448
ggcaagagggcgcgtggcagcccaaggccatggcgggacacccaaaagagaaggtgattccagatgaggtccatcagaaccagatcttgcgggaactgtacctcaaggagctacgaacccagaaactctacacgcagtatcacgtgaatcccctccgcaagattcatacagtcaccaggaagcccatgtcttggcatgataacctggaggaacctgcagatgccaggtttctgaatctcattcaccatgctgcccagggaccaaggaagaagtacccagagacacagactgaaaaccaggaagttggatgggacttagagcccttggtaagcgtggctccttcctcaggaaatacgaggaaacacagcagcaatatcaacccagaacgccatgaccgcaggctgaatcacttcagggtctgcagtgacatcactctgtacaaggctaa

SEQ ID NO: 132284 - DNA, 3700 bp, Homo sapiens
  Payload ID: 5834
  Gene Symbol: FAM184A
  Gene Name: family with sequence similarity 184, member A
  Uniprot ID: Q8NB25
  ENST ID: ENST00000352896
  CDS Start-End: 512-3427
aaatctcacagtgctcatttttaaaagggtacacaaaaaaatctcaattccaaagaatttggatcagccaagagaaggcatgggaaaatatcaaatgtttgtatgattacctgggcaaccttttctgtgctatgtaaatgtgtaatgactaatcaaccaggacggccaagggatttgtttctagagataggcaattttcatttgtgcctgtgattggctcagctctgcgtgtgaagagggaaaaggcttccgtttatttagcataatgatggaccaaaacaaaagaagaaatcatttcactcatgcttaggtaatatatgctttaaacactaaaaatgatgagcatgaatctgcaattcaagccctcaaagatgctcatgaagaagaaattcaacaaattcttgctgaaacaagagaaaaaatattgcagtataaaagcaaagtaacagaggagctagaccttagaagaaagattcaagttttagaatcatcattagaagatcacataaaaatgaagcagcaggctttgacagaatttgaagcttataagcacagagttgaggacatgcaactttgtgcagaagcccagcatgtccaacgcatagtgaccatgtctagagaagtcgaagagattagaaggaaatttgaagaaaaattacggagctttggacaacttcaagtacagtttgaaaaagacaaacgattggcattggaagacttgcaagctgctcacagacgggagatacaagagctattgaagtcacagcaggatcacagtgcctcagtaaataaaggccaggaaaaggcagaggaactacacagaatggaggtggagtccctaaacaaaatgcttgaggagctaagacttgaacggaagaaactaattgaggattatgaaggcaagttgaataaagctcagtccttttatgaacgtgagcttgatactttgaaaaggtcacagctttttacagcagaaagcctacaggccagcaaagaaaaggaagctgatcttagaaaagaatttcagggacaagaagcaattttacgaaaaactataggaaaattaaagacagagttacagatggtacaggatgaagctggaagtcttcttgacaaatgccaaaagcttcagacggcacttgccatagcagagaacaatgttcaggttcttcaaaaacagcttgatgatgccaaggagggagaaatggccctattaagcaagcacaaagaagtggaaagtgagctagcagctgccagagaacgtttacaacagcaagcttcagatcttgtcctcaaagctagtcatattggaatgcttcaagcaactcaaatgacccaggaagttacaattaaagatttagaatcagaaaaatcgagagtcaatgagagattatctcaacttgaagaggaaagagcttttttgcgaagcaaaacccaaagtctggatgaagagcagaagcaacagattctagaactggagaagaaagtaaatgaagcaaagagaactcagcaagaatattatgaaagggaacttaaaaacctgcaaagtagattggaagaggaggtgactcaattaaacgaggcccattctaagactttggaagaattagcttggaagcaccatatggcaattgaagctgtccacagtaatgcaattagggataagaaaaaactgcaaatggatttggaagaacaacataacaaagataaactaaacctggaagaggataaaaatcagcttcaacaagagctagaaaacctaaaggaagtactggaagacaagttgaatacagccaatcaagagattggccacctccaagatatggtaaggaaaagtgaacaaggtcttggctctgcagaaggacttattgctagtcttcaggactcccaggaaaggcttcagaatgagcttgacttgactaaagacagcctaaaggagaccaaggatgctctattaaatgtggagggtgagctagaacaagaaaggcaacagcatgaagaaacaattgctgccatgaaagaagaagagaagctcaaagtggacaaaatggcccatgacttagaaattaagtggactgaaaatcttagacaagagtgttctaaacttcgtgaagagttaaggcttcaacatgaagaggataagaagtcagcaatgtctcaacttttgcagttgaaagatcgagagaaaaatgcagcaagagattcatggcagaagaaagtagaagatctcttaaaccagatttccttgctgaaacagaatctggagatacagctttcccagtctcagacttctttgcaacaactgcaagcccagtttacgcaagaacgacagcggcttacgcaagagcttgaagaattagaggagcaacatcagcaaagacacaaatcattaaaagaagcacatgtccttgcatttcaaactatggaagaggaaaaggaaaaggagcaaagagctcttgaaaatcatttacaacagaagcattctgcagagcttcaatcactaaaagatgcacacagagagtcaatggagggcttccggatagaaatggaacaggaacttcagactcttcggtttgaattagaagatgaaggaaaggctatgcttgcttccttgcgctcagaactcaaccatcaacatgcagctgcaattgatttgttacggcataatcatcatcaagaattggcagctgctaaaatggaattagagagaagcatagacatcagcagaagacagagtaaggagcacatatgtagaattacagatctacaagaggaattaagacacagagagcatcacatctctgaattggataaggaggttcagcaccttcatgagaatataagtgccctaaccaaagaactggaatttaaggggaaagaaattctcagaatacgaagtgaatctaaccaacagataagattagaagaaatggaagaaaaatatctaatgagagaatcaaaaccagaagatatacagatgattacagaattaaaagccatgcttacagaaagagaccagatcataaagaaactaattgaggataataagttttatcagctggaattagtcaatcgagaaactaacttcaacaaagtgtttaactcaagtcctactgttggtgttattaatccattggctaagcaaaagaagaagaatgataaatcaccaacaaacaggtttgtgagtgttcccaatctaagtgctctggaatctggtggagtgggcaatggacatcctaaccgcctggatcccattcctaattctccagtccacgatattgagttcaacagcagcaaaccacttccacagccagtgccacctaaagggcccaagacatttttgagtcctgctcagagtgaagcttctccagtggcttctccagatccccagcgccaggagtggtttgcccggtacttcacattctgaaagaattgtgttggcacagctctgtatagactgttactaagagcatgactttatacagattgttatgtaaataggctttcctatgtcaaacactgtgaatgagaaagtatttgtctctccaacttgaaaatgcactgtatttcctgtgatatttattggaatcattctataaggtactatattatgtgtgtaattataactgttatttttatttgagatggaagagtctttaacctttgtaattactgcataataaattttgttagaatcaaa

SEQ ID NO: 132285 - DNA, 4141 bp, Homo sapiens
  Payload ID: 5834
  Gene Symbol: FAM184A
  Gene Name: family with sequence similarity 184, member A
  Uniprot ID: Q8NB25
  ENST ID: ENST00000338891
  CDS Start-End: 445-3867
ggtaacggcggctcccgcgtcctcctccatgtccccgcctatccccgccgcagcccgccccgtctcctcctccctccgcagcctcgccgagtcctcggtgcgggctgcgagcgggacccgcggagctgcgctgtcctcgacgcctccgccaggcgcgggccgaggagcctccaagagctggcccggcccccggccgccgccgcccaaccccgggcatctgccccgcgccgttgtccccgcggcttcgggccggcgggaccgccccgtcccttccaggggtgacccgggggtcgcgggtgggacggcgcctgcggccgagtctggggggcgccgggtgtcgggtcgggaagcggccgccgcgactcttgcctcccgggcgtcgttgctccacgggcctgcctccacccgcggggacaggtgccccggctggggtctgttgggaagatggcgaccccgggcatgagctggcagcagcactattacggcggctcggcggccaaattcgcgccctcgccggccaccgcacagctggctgggcacagcatggactacagccaggagatgcacctgaaaatgagcaagaaaatcgcccagctcaccaaggtaatatatgctttaaacactaaaaatgatgagcatgaatctgcaattcaagccctcaaagatgctcatgaagaagaaattcaacaaattcttgctgaaacaagagaaaaaatattgcagtataaaagcaaagtaacagaggagctagaccttagaagaaagattcaagttttagaatcatcattagaagatcacataaaaatgaagcagcaggctttgacagaatttgaagcttataagcacagagttgaggacatgcaactttgtgcagaagcccagcatgtccaacgcatagtgaccatgtctagagaagtcgaagagattagaaggaaatttgaagaaaaattacggagctttggacaacttcaagtacagtttgaaaaagacaaacgattggcattggaagacttgcaagctgctcacagacgggagatacaagagctattgaagtcacagcaggatcacagtgcctcagtaaataaaggccaggaaaaggcagaggaactacacagaatggaggtggagtccctaaacaaaatgcttgaggagctaagacttgaacggaagaaactaattgaggattatgaaggcaagttgaataaagctcagtccttttatgaacgtgagcttgatactttgaaaaggtcacagctttttacagcagaaagcctacaggccagcaaagaaaaggaagctgatcttagaaaagaatttcagggacaagaagcaattttacgaaaaactataggaaaattaaagacagagttacagatggtacaggatgaagctggaagtcttcttgacaaatgccaaaagcttcagacggcacttgccatagcagagaacaatgttcaggttcttcaaaaacagcttgatgatgccaaggagggagaaatggccctattaagcaagcacaaagaagtggaaagtgagctagcagctgccagagaacgtttacaacagcaagcttcagatcttgtcctcaaagctagtcatattggaatgcttcaagcaactcaaatgacccaggaagttacaattaaagatttagaatcagaaaaatcgagagtcaatgagagattatctcaacttgaagaggaaagagcttttttgcgaagcaaaacccaaagtctggatgaagagcagaagcaacagattctagaactggagaagaaagtaaatgaagcaaagagaactcagcaagaatattatgaaagggaacttaaaaacctgcaaagtagattggaagaggaggtgactcaattaaacgaggcccattctaagactttggaagaattagcttggaagcaccatatggcaattgaagctgtccacagtaatgcaattagggataagaaaaaactgcaaatggatttggaagaacaacataacaaagataaactaaacctggaagaggataaaaatcagcttcaacaagagctagaaaacctaaaggaagtactggaagacaagttgaatacagccaatcaagagattggccacctccaagatatggtaaggaaaagtgaacaaggtcttggctctgcagaaggacttattgctagtcttcaggactcccaggaaaggcttcagaatgagcttgacttgactaaagacagcctaaaggagaccaaggatgctctattaaatgtggagggtgagctagaacaagaaaggcaacagcatgaagaaacaattgctgccatgaaagaagaagagaagctcaaagtggacaaaatggcccatgacttagaaattaagtggactgaaaatcttagacaagagtgttctaaacttcgtgaagagttaaggcttcaacatgaagaggataagaagtcagcaatgtctcaacttttgcagttgaaagatcgagagaaaaatgcagcaagagattcatggcagaagaaagtagaagatctcttaaaccagatttccttgctgaaacagaatctggagatacagctttcccagtctcagacttctttgcaacaactgcaagcccagtttacgcaagaacgacagcggcttacgcaagagcttgaagaattagaggagcaacatcagcaaagacacaaatcattaaaagaagcacatgtccttgcatttcaaactatggaagaggaaaaggaaaaggagcaaagagctcttgaaaatcatttacaacagaagcattctgcagagcttcaatcactaaaagatgcacacagagagtcaatggagggcttccggatagaaatggaacaggaacttcagactcttcggtttgaattagaagatgaaggaaaggctatgcttgcttccttgcgctcagaactcaaccatcaacatgcagctgcaattgatttgttacggcataatcatcatcaagaattggcagctgctaaaatggaattagagagaagcatagacatcagcagaagacagagtaaggagcacatatgtagaattacagatctacaagaggaattaagacacagagagcatcacatctctgaattggataaggaggttcagcaccttcatgagaatataagtgccctaaccaaagaactggaatttaaggggaaagaaattctcagaatacgaagtgaatctaaccaacagataaggttgcatgaacaagatttaaacaagagacttgaaaaagagttggatgtcatgacagcagaccacctcagagagaaaaatatcatgcgggcagattttaataagactaacgagctactcaaggaaataaatgccgctttacaagtgtcattagaagaaatggaagaaaaatatctaatgagagaatcaaaaccagaagatatacagatgattacagaattaaaagccatgcttacagaaagagaccagatcataaagaaactaattgaggataataagttttatcagctggaattagtcaatcgagaaactaacttcaacaaagtgtttaactcaagtcctactgttggtgttattaatccattggctaagcaaaagaagaagaatgataaatcaccaacaaacaggtttgtgagtgttcccaatctaagtgctctggaatctggtggagtgggcaatggacatcctaaccgcctggatcccattcctaattctccagtccacgatattgagttcaacagcagcaaaccacttccacagccagtgccacctaaagggcccaagacatttttgagtcctgctcagagtgaagcttctccagtggcttctccagatccccagcgccaggagtggtttgcccggtacttcacattctgaaagaattgtgttggcacagctctgtatagactgttactaagagcatgactttatacagattgttatgtaaataggctttcctatgtcaaacactgtgaatgagaaagtatttgtctctccaacttgaaaatgcactgtatttcctgtgatatttattggaatcattctataaggtactatattatgtgtgtaattataactgttatttttatttgagatggaagagtctttaacctttgtaattactgcataataaattttgttagaatcaaac

SEQ ID NO: 132286 - DNA, 679 bp, Homo sapiens
  Payload ID: 5834
  Gene Symbol: FAM184A
  Gene Name: family with sequence similarity 184, member A
  ENST ID: ENST00000368472
  CDS Start-End: 1-498
atgacagcagaccacctcagagagaaaaatatcatgcgggcagattttaataagactaacgagctactcaaggaaataaatgccgctttacaagtgtcattagaagaaatggaagaaaaatatctaatgagagaatcaaaaccagaagatatacagatgattacagaattaaaagccatgcttacagaaagagaccagatcataaagaaactaattgaggataataagttttatcagctggaattagtcaatcgagaaactaacttcaacaaagtgtttaactcaagtcctactgttggtgttattaatccattggctaaggtatcagtaagatgcatgtgcatgagctcaaggaacatgactactggagtttccattacacattgttgcgtgccttgtaattttccccaaagacgtcctgctcagagtgaagcttctccagtggcttctccagatccccagcgccaggagtggtttgcccggtacttcacattctgaaagaattgtgttggcacagctctgtatagactgttactaagagcatgactttatacagattgttatgtaaataggctttcctatgtcaaacactgtgaatgagaaagtatttgtctctccaacttgaaaatgcactgtatttcctgtgatatttattggaatcattctataaggtactata

SEQ ID NO: 132287 - DNA, 3392 bp, Homo sapiens
  Payload ID: 5834
  Gene Symbol: FAM184A
  Gene Name: family with sequence similarity 184, member A
  ENST ID: ENST00000368475
  CDS Start-End: 312-3122
tttgtgcctgtgattggctcagctctgcgtgtgaagagggaaaaggcttccgtttatttagcataatgatggaccaaaacaaaagaagaaatcatttcactcatgcttaggtaatatatgctttaaacactaaaaatgatgagcatgaatctgcaattcaagccctcaaagatgctcatgaagaagaaattcaacaaattcttgctgaaacaagagaaaaaatattgcagtataaaagcaaagtaacagaggagctagaccttagaagaaagattcaagttttagaatcatcattagaagatcacataaaaatgaagcagcaggctttgacagaatttgaagcttataagcacagagttgaggacatgcaactttgtgcagaagcccagcatgtccaacgcatagtgaccatgtctagagaagtcgaagagattagaaggaaatttgaagaaaaattacggagctttggacaacttcaagtacagtttgaaaaagacaaacgattggcattggaagacttgcaagctgctcacagacgggagatacaagagctattgaagtcacagcaggatcacagtgcctcagtaaataaaggccaggaaaaggcagaggaactacacagaatggaggtggagtccctaaacaaaatgcttgaggagctaagacttgaacggaagaaactaattgaggattatgaaggcaagttgaataaagctcagtccttttatgaacgtgagcttgatactttgaaaaggtcacagctttttacagcagaaagcctacaggccagcaaagaaaaggaagctgatcttagaaaagaatttcagggacaagaagcaattttacgaaaaactataggaaaattaaagacagagttacagatggtacaggatgaagctggaagtcttcttgacaaatgccaaaagcttcagacggcacttgccatagcagagaacaatgttcaggttcttcaaaaacagcttgatgatgccaaggagggagaaatggccctattaagcaagcacaaagaagtggaaagtgagctagcagctgccagagaacgtttacaacagcaagcttcagatcttgtcctcaaagctagtcatattggaatgcttcaagcaactcaaatgacccaggaagttacaattaaagatttagaatcagaaaaatcgagagtcaatgagagattatctcaacttgaagaggaaagagcttttttgcgaagcaaaacccaaagtctggatgaagagcagaagcaacagattctagaactggagaagaaagtaaatgaagcaaagagaactcagcaagaatattatgaaagggaacttaaaaacctgcaaagtagattggaagaggaggtgactcaattaaacgaggcccattctaagactttggaagaattagcttggaagcaccatatggcaattgaagctgtccacagtaatgcaattagggataagaaaaaactgcaaatggatttggaagaacaacataacaaagataaactaaacctggaagaggataaaaatcagcttcaacaagagctagaaaacctaaaggaagtactggaagacaagttgaatacagccaatcaagagattggccacctccaagatatggtaaggaaaagtgaacaaggtcttggctctgcagaaggacttattgctagtcttcaggactcccaggaaaggcttcagaatgagcttgacttgactaaagacagcctaaaggagaccaaggatgctctattaaatgtggagggtgagctagaacaagaaaggcaacagcatgaagaaacaattgctgccatgaaagaagaagagaagctcaaagtggacaaaatggcccatgacttagaaattaagtggactgaaaatcttagacaagagtgttctaaacttcgtgaagagttaaggcttcaacatgaagaggataagaagtcagcaatgtctcaacttttgcagttgaaagatcgagagaaaaatgcagcaagagattcatggcagaagaaagtagaagatctcttaaaccagatttccttgctgaaacagaatctggagatacagctttcccagtctcagacttctttgcaacaactgcaagcccagtttacgcaagaacgacagcggcttacgcaagagcttgaagaattagaggagcaacatcagcaaagacacaaatcattaaaagaagcacatgtccttgcatttcaaactatggaagaggaaaaggaaaaggagcaaagagctcttgaaaatcatttacaacagaagcattctgcagagcttcaatcactaaaagatgcacacagagagtcaatggagggcttccggatagaaatggaacaggaacttcagactcttcggtttgaattagaagatgaaggaaaggctatgcttgcttccttgcgctcagaactcaaccatcaacatgcagctgcaattgatttgttacggcataatcatcatcaagaattggcagctgctaaaatggaattagagagaagcatagacatcagcagaagacagagtaaggagcacatatgtagaattacagatctacaagaggaattaagacacagagagcatcacatctctgaattggataaggaggttcagcaccttcatgagaatataagtgccctaaccaaagaactggaatttaaggggaaagaaattctcagaatacgaagtgaatctaaccaacagataagattagaagaaatggaagaaaaatatctaatgagagaatcaaaaccagaagatatacagatgattacagaattaaaagccatgcttacagaaagagaccagatcataaagaaactaattcaaaagaagaagaatgataaatcaccaacaaacaggtttgtgagtgttcccaatctaagtgctctggaatctggtggagtgggcaatggacatcctaaccgcctggatcccattcctaattctccagtccacgatattgagttcaacagcagcaaaccacttccacagccagtgccacctaaagggcccaagacatttttgagtcctgctcagagtgaagcttctccagtggcttctccagatccccagcgccaggagtggtttgcccggtacttcacattctgaaagaattgtgttggcacagctctgtatagactgttactaagagcatgactttatacagattgttatgtaaataggctttcctatgtcaaacactgtgaatgagaaagtatttgtctctccaacttgaaaatgcactgtatttcctgtgatatttattggaatcattctataaggtactatattatgtgtgtaattataactgttatttttatttgagatggaagagtctttaacctttgtaattactgcataataaattttgttagaatc

SEQ ID NO: 132288 - DNA, 542 bp, Homo sapiens
  Payload ID: 5834
  Gene Symbol: FAM184A
  Gene Name: family with sequence similarity 184, member A
  ENST ID: ENST00000448815
  CDS Start-End: 1-425
ctcaacttgaagaggaaagagcttttttgcgaagcaaaacccaaagtctggatgaagagcagaagcaacagattctagaactggagaagaaagtaaatgaagcaaagagaactcagcaagaatattatgaaagggaacttaaaaacctgcaaagtagattggaagaggaggtgactcaattaaacgaggcccattctaagactttggaagaattagcttggaagcaccatatggcaattgaagctgtccacagtaatgcaattagggataagaaaaaactgcaaatggatttggaagaacaacataacaaagataaactaaacctggaagaggataaaaatcagcttcaacaagagctagaaaacctaaaggaagtactggaagacaagttgaatacagccaatcaagaggcaagaattctttagacctgttgcctatgttatagattttaataataataacttattctggtgacattgtataggtaggtaagtctcagtaaaggtaacatatctagaataaaaataatttaaaaactttaa

SEQ ID NO: 132289 - DNA, 1555 bp, Homo sapiens
  Payload ID: 5834
  Gene Symbol: FAM184A
  Gene Name: family with sequence similarity 184, member A
  ENST ID: ENST00000475529
  CDS Start-End: 1-1115
cattaaaagaagcacatgtccttgcatttcaaactatggaagaggaaaaggaaaaggagcaaagagctcttgaaaatcatttacaacagaagcattctgcagagcttcaatcactaaaagatgcacacagagagtcaatggagggcttccggatagaaatggaacaggaacttcagactcttcggtttgaattagaagatgaaggaaaggctatgcttgcttccttgcgctcagaactcaaccatcaacatgcagctgcaattgatttgttacggcataatcatcatcaagaattggcagctgctaaaatggaattagagagaagcatagacatcagcagaagacagagtaaggagcacatatgtagaattacagatctacaagaggaattaagacacagagagcatcacatctctgaattggataaggaggttcagcaccttcatgagaatataagtgccctaaccaaagaactggaatttaaggggaaagaaattctcagaatacgaagtgaatctaaccaacagataaggttgcatgaacaagatttaaacaagagacttgaaaaagagttggatgtcatgacagcagaccacctcagagagaaaaatatcatgcgggcagattttaataagactaacgagctactcaaggaaataaatgccgctttacaagtgtcattagaagaaatggaagaaaaatatctaatgagagaatcaaaaccagaagatatacagatgattacagaattaaaagccatgcttacagaaagagaccagatcataaagaaactaattgaggataataagttttatcagctggaattagtcaatcgagaaactaacttcaacaaagtgtttaactcaagtcctactgttggtgttattaatccattggctaagcaaaagaagaagaatgataaatcaccaacaaacaggtttgtgagtgttcccaatctaagtgctctggaatctggtggagtgggcaatggacatcctaaccgcctggatcccattcctaattctccagtccacgatattgagttcaacagcagcaaaccacttccacagccagtgccacctaaagggcccaagacatttttgaggtatcagtaagatgcatgtgcatgagctcaaggaacatgactactggagtttccattacacattgttgcgtgccttgtaattttccccaaagacgtcctgctcagagtgaagcttctccagtggcttctccagatccccagcgccaggagtggtttgcccggtacttcacattctgaaagaattgtgttggcacagctctgtatagactgttactaagagcatgactttatacagattgttatgtaaataggctttcctatgtcaaacactgtgaatgagaaagtatttgtctctccaacttgaaaatgcactgtatttcctgtgatatttattggaatcattctataaggtactatattatgtgtgtaattataactgttatttttatttgagatggaagagtctttaacctttgtaattactgcataataaattttgttagaatcaaa

SEQ ID NO: 132290 - DNA, 1147 bp, Homo sapiens
  Payload ID: 5834
  Gene Symbol: FAM184A
  Gene Name: family with sequence similarity 184, member A
  ENST ID: ENST00000521043
  CDS Start-End: 1-807
cataatcatcatcaagaattggcagctgctaaaatggaattagagagaagcatagacatcagcagaagacagagtaaggagcacatatgtagaattacagatctacaagaggaattaagacacagagagcatcacatctctgaattggataaggaggttcagcaccttcatgagaatataagtgccctaaccaaagaactggaatttaaggggaaagaaattctcagaatacgaagtgaatctaaccaacagataaggttgcatgaacaagatttaaacaagagacttgaaaaagagttggatgtcatgacagcagaccacctcagagagaaaaatatcatgcgggcagattttaataagactaacgagctactcaaggaaataaatgccgctttacaagtgtcattagaagaaatggaagaaaaatatctaatgagagaatcaaaaccagaagatatacagatgattacagaattaaaagccatgcttacagaaagagaccagatcataaagaaactaattcaaaagaagaagaatgataaatcaccaacaaacaggtttgtgagtgttcccaatctaagtgctctggaatctggtggagtgggcaatggacatcctaaccgcctggatcccattcctaattctccagtccacgatattgagttcaacagcagcaaaccacttccacagccagtgccacctaaagggcccaagacatttttgagtcctgctcagagtgaagcttctccagtggcttctccagatccccagcgccaggagtggtttgcccggtacttcacattctgaaagaattgtgttggcacagctctgtatagactgttactaagagcatgactttatacagattgttatgtaaataggctttcctatgtcaaacactgtgaatgagaaagtatttgtctctccaacttgaaaatgcactgtatttcctgtgatatttattggaatcattctataaggtactatattatgtgtgtaattataactgttatttttatttgagatggaagagtctttaacctttgtaattactgcataataaattttgttagaatcaaacaatgctttttatttttttctacgtttgctttaatttttaaatattttttaattccaggtaagactt

SEQ ID NO: 132291 - DNA, 497 bp, Homo sapiens
  Payload ID: 5834
  Gene Symbol: FAM184A
  Gene Name: family with sequence similarity 184, member A
  ENST ID: ENST00000481884
  CDS Start-End: 1-224
tcaatcgagaaactaacttcaacaaagtgtttaactcaagtcctactgttggtgttattaatccattggctaagggactatcctcacatgtattatttttaatgcagcaaaagaagaagaatgataaatcaccaacaaacagtcctgctcagagtgaagcttctccagtggcttctccagatccccagcgccaggagtggtttgcccggtacttcacattctgaaagaattgtgttggcacagctctgtatagactgttactaagagcatgactttatacagattgttatgtaaataggctttcctatgtcaaacactgtgaatgagaaagtatttgtctctccaacttgaaaatgcactgtatttcctgtgatatttattggaatcattctataaggtactatattatgtgtgtaattataactgttatttttatttgagatggaagagtctttaacctttgtaattactgcataataaattttgttagaatcaaa

SEQ ID NO: 132292 - DNA, 2721 bp, Homo sapiens
  Payload ID: 5834
  Gene Symbol: FAM184A
  Gene Name: family with sequence similarity 184, member A
  ENST ID: ENST00000522284
  CDS Start-End: 377-1966
acttgtgtgccattggaaggaaggtcagggcagggaatcctcgctacttcactactcatgtctctggattgggcttgcctctcttcttggggaagagccacttcttggggccctgcacacacgaggacgcatgtggaaagggtctgtaaatcgacacccgttctgctaaccgaaggtaatatatgctttaaacactaaaaatgatgagcatgaatctgcaattcaagccctcaaagatgctcatgaagaagaaattcaacaaattcttgctgaaacaagagaaaaaatattgcagtataaaagcaaagtaacagaggagctagaccttagaagaaagattcaagttttagaatcatcattagaagatcacataaaaatgaagcagcaggctttgacagaatttgaagcttataagcacagagttgaggacatgcaactttgtgcagaagcccagcatgtccaacgcatagtgaccatgtctagagaagtcgaagagattagaaggaaatttgaagaaaaattacggagctttggacaacttcaagtacagtttgaaaaagacaaacgattggcattggaagacttgcaagctgctcacagacgggagatacaagagctattgaagtcacagcaggatcacagtgcctcagtaaataaaggccaggaaaaggcagaggaactacacagaatggaggtggagtccctaaacaaaatgcttgaggagctaagacttgaacggaagaaactaattgaggattatgaaggcaagttgaataaagctcagtccttttatgaacgtgagcttgatactttgaaaaggtcacagctttttacagcagaaagcctacaggccagcaaagaaaaggaagctgatcttagaaaagaatttcagggacaagaagcaattttacgaaaaactataggaaaattaaagacagagttacagatggtacaggatgaagctggaagtcttcttgacaaatgccaaaagcttcagacggcacttgccatagcagagaacaatgttcaggttcttcaaaaacagcttgatgatgccaaggagggagaaatggccctattaagcaagcacaaagaagtggaaagtgagctagcagctgccagagaacgtttacaacagcaagcttcagatcttgtcctcaaagctagtcatattggaatgcttcaagcaactcaaatgacccaggaagttacaattaaagatttagaatcagaaaaatcgagagtcaatgagagattatctcaacttgaagaggaaagagcttttttgcgaagcaaaacccaaagtctggatgaagagcagaagcaacagattctagaactggagaagaaagtaaatgaagcaaagagaactcagcaagaatattatgaaagggaacttaaaaacctgcaaagtagattggaagaggaggtgactcaattaaacgaggcccattctaagactttggaagaattagcttggaagcaccatatggcaattgaagctgtccacagtaatgcaattagggataagaaaaaactgcaaatggatttggaagaacaacataacaaagataaactaaacctggaagaggataaaaatcagcttcaacaagagctagaaaacctaaaggaagtactggaagacaagttgaatacagccaatcaagagattggccacctccaagatatggtaaggaaaagtgaacaaggtcttggctctgcagaaggacttattgctagtcttcaggactcccaggaaaggcttcagaatgagcttgacttgactaaagacagcctaaaggagaccaaggatgctctattaaatgtggagcttctggtagcaccaggcattcttggcattcggcaacataatttccatctctgcctatcttcacatcttaaaaggataccaggcatattggaacaagggctcattctactccagtttgacatcatcttaacttaatacatctgtactgactgtatttccaaataaagtcacattctgaggtattgggagggtaggacttcggtatatctttttggggacccagttcaaccgataacaattggaacgtgcaattcttttactagtaagaggtagaactctcatatacagcaactaagtgcttctctgtgtctgcagatttcagaaagactctgccttttttcttccactcttatgaagcacagcaaagatttagattgtcttagatagtagagaaaaagaatccataaaactgggtgtatagtacccaggaagttcttaatcttttccttcagagagatggtttagagtataggctctgaagtcaggttggttgtatgtaaattctgaatccaccacatagtgtgtagctttgtgcaaagcctcaccttccacatctgcacaatgaaggagaggtggggggtaataacactcttcacagcactgttgtaataattaaatgagatgaaccatttatagcacagtgcttagcaaaatagtaaacactcagtaaatactgccttttactaatattatttcagattttcttttttagttcagaattggtgacatttcaaaagcatataaacaaggacactttagtgaatttaccttgtgtgtggggcatacataattctatttatattttatctatgatatattctgtgtgcattgaatatttaccttccattttgaattatgtgacaataaattacttcattttcctcgaatca

SEQ ID NO: 132293 - DNA, 3244 bp, Homo sapiens
  Payload ID: 5834
  Gene Symbol: FAM184A
  Gene Name: family with sequence similarity 184, member A
  Uniprot ID: Q8NB25
  ENST ID: ENST00000521531
  CDS Start-End: 74-3244
cccgggcgtcgttgctccacgggcctgcctccacccgcggggacaggtgccccggctggggtctgttgggaagatggcgaccccgggcatgagctggcagcagcactattacggcggctcggcggccaaattcgcgccctcgccggccaccgcacagctggctgggcacagcatggactacagccaggagatgcacctgaaaatgagcaagaaaatcgcccagctcaccaaggtaatatatgctttaaacactaaaaatgatgagcatgaatctgcaattcaagccctcaaagatgctcatgaagaagaaattcaacaaattcttgctgaaacaagagaaaaaatattgcagtataaaagcaaagtaacagaggagctagaccttagaagaaagattcaagttttagaatcatcattagaagatcacataaaaatgaagcagcaggctttgacagaatttgaagcttataagcacagagttgaggacatgcaactttgtgcagaagcccagcatgtccaacgcatagtgaccatgtctagagaagtcgaagagattagaaggaaatttgaagaaaaattacggagctttggacaacttcaagtacagtttgaaaaagacaaacgattggcattggaagacttgcaagctgctcacagacgggagatacaagagctattgaagtcacagcaggatcacagtgcctcagtaaataaaggccaggaaaaggcagaggaactacacagaatggaggtggagtccctaaacaaaatgcttgaggagctaagacttgaacggaagaaactaattgaggattatgaaggcaagttgaataaagctcagtccttttatgaacgtgagcttgatactttgaaaaggtcacagctttttacagcagaaagcctacaggccagcaaagaaaaggaagctgatcttagaaaagaatttcagggacaagaagcaattttacgaaaaactataggaaaattaaagacagagttacagatggtacaggatgaagctggaagtcttcttgacaaatgccaaaagcttcagacggcacttgccatagcagagaacaatgttcaggttcttcaaaaacagcttgatgatgccaaggagggagaaatggccctattaagcaagcacaaagaagtggaaagtgagctagcagctgccagagaacgtttacaacagcaagcttcagatcttgtcctcaaagctagtcatattggaatgcttcaagcaactcaaatgacccaggaagttacaattaaagatttagaatcagaaaaatcgagagtcaatgagagattatctcaacttgaagaggaaagagcttttttgcgaagcaaaacccaaagtctggatgaagagcagaagcaacagattctagaactggagaagaaagtaaatgaagcaaagagaactcagcaagaatattatgaaagggaacttaaaaacctgcaaagtagattggaagaggaggtgactcaattaaacgaggcccattctaagactttggaagaattagcttggaagcaccatatggcaattgaagctgtccacagtaatgcaattagggataagaaaaaactgcaaatggatttggaagaacaacataacaaagataaactaaacctggaagaggataaaaatcagcttcaacaagagctagaaaacctaaaggaagtactggaagacaagttgaatacagccaatcaagagattggccacctccaagatatggtaaggaaaagtgaacaaggtcttggctctgcagaaggacttattgctagtcttcaggactcccaggaaaggcttcagaatgagcttgacttgactaaagacagcctaaaggagaccaaggatgctctattaaatgtggagggtgagctagaacaagaaaggcaacagcatgaagaaacaattgctgccatgaaagaagaagagaagctcaaagtggacaaaatggcccatgacttagaaattaagtggactgaaaatcttagacaagagtgttctaaacttcgtgaagagttaaggcttcaacatgaagaggataagaagtcagcaatgtctcaacttttgcagttgaaagatcgagagaaaaatgcagcaagagattcatggcagaagaaagtagaagatctcttaaaccagatttccttgctgaaacagaatctggagatacagctttcccagtctcagacttctttgcaacaactgcaagcccagtttacgcaagaacgacagcggcttacgcaagagcttgaagaattagaggagcaacatcagcaaagacacaaatcattaaaagaagcacatgtccttgcatttcaaactatggaagaggaaaaggaaaaggagcaaagagctcttgaaaatcatttacaacagaagcattctgcagagcttcaatcactaaaagatgcacacagagagtcaatggagggcttccggatagaaatggaacaggaacttcagactcttcggtttgaattagaagatgaaggaaaggctatgcttgcttccttgcgctcagaactcaaccatcaacatgcagctgcaattgatttgttacggcataatcatcatcaagaattggcagctgctaaaatggaattagagagaagcatagacatcagcagaagacagagtaaggagcacatatgtagaattacagatctacaagaggaattaagacacagagagcatcacatctctgaattggataaggaggttcagcaccttcatgagaatataagtgccctaaccaaagaactggaatttaaggggaaagaaattctcagaatacgaagtgaatctaaccaacagataagattagaagaaatggaagaaaaatatctaatgagagaatcaaaaccagaagatatacagatgattacagaattaaaagccatgcttacagaaagagaccagatcataaagaaactaattcaaaagaagaagaatgataaatcaccaacaaacaggtttgtgagtgttcccaatctaagtgctctggaatctggtggagtgggcaatggacatcctaaccgcctggatcccattcctaattctccagtccacgatattgagttcaacagcagcaaaccacttccacagccagtgccacctaaagggcccaagacatttttgagtcctgctcagagtgaagcttctccagtggcttctccagatccccagcgccaggagtggtttgcccggtacttcacattctga

SEQ ID NO: 132294 - DNA, 485 bp, Homo sapiens
  Payload ID: 5834
  Gene Symbol: FAM184A
  Gene Name: family with sequence similarity 184, member A
  ENST ID: ENST00000517987
  CDS Start-End: 1-211
gttttatcagctggaattagtcaatcgagaaactaacttcaacaaagtgtttaactcaagtcctactgttggtgttattaatccattggctaagcaaaagaagaagaatgataaatcaccaacaaacagtcctgctcagagtgaagcttctccagtggcttctccagatccccagcgccaggagtggtttgcccggtacttcacattctgaaagaattgtgttggcacagctctgtatagactgttactaagagcatgactttatacagattgttatgtaaataggctttcctatgtcaaacactgtgaatgagaaagtatttgtctctccaacttgaaaatgcactgtatttcctgtgatatttattggaatcattctataaggtactatattatgtgtgtaattataactgttatttttatttgagatggaagagtctttaacctttgtaattactgcataataaattttgttagaatcaaac

SEQ ID NO: 132295 - DNA, 1251 bp, Homo sapiens
  Payload ID: 5834
  Gene Symbol: FAM184A
  Gene Name: family with sequence similarity 184, member A
  ENST ID: ENST00000617072
  CDS Start-End: 8-814
tgctaaaatggaattagagagaagcatagacatcagcagaagacagagtaaggagcacatatgtagaattacagatctacaagaggaattaagacacagagagcatcacatctctgaattggataaggaggttcagcaccttcatgagaatataagtgccctaaccaaagaactggaatttaaggggaaagaaattctcagaatacgaagtgaatctaaccaacagataaggttgcatgaacaagatttaaacaagagacttgaaaaagagttggatgtcatgacagcagaccacctcagagagaaaaatatcatgcgggcagattttaataagactaacgagctactcaaggaaataaatgccgctttacaagtgtcattagaagaaatggaagaaaaatatctaatgagagaatcaaaaccagaagatatacagatgattacagaattaaaagccatgcttacagaaagagaccagatcataaagaaactaattgaggataataagttttatcagctggaattagtcaatcgagaaactaacttcaacaaagtgtttaactcaagtcctactgttggtgttattaatccattggctaagcaaaagaagaagaatgataaatcaccaacaaacaggtttgtgagtgttcccaatctaagtgctctggaatctggtggagtgggcaatggacatcctaaccgcctggatcccattcctaattctccagtccacgatattgagttcaacagcagcaaaccacttccacagccagtgccacctaaagggcccaagacatttttgaggtatcagtaagatgcatgtgcatgagctcaaggaacatgactactggagtttccattacacattgttgcgtgccttgtaattttccccaaagacgtcctgctcagagtgaagcttctccagtggcttctccagatccccagcgccaggagtggtttgcccggtacttcacattctgaaagaattgtgttggcacagctctgtatagactgttactaagagcatgactttatacagattgttatgtaaataggctttcctatgtcaaacactgtgaatgagaaagtatttgtctctccaacttgaaaatgcactgtatttcctgtgatatttattggaatcattctataaggtactatattatgtgtgtaattataactgttatttttatttgagatggaagagtctttaacctttgtaattactgcataataaattttgttagaatc

SEQ ID NO: 132296 - DNA, 4048 bp, Homo sapiens
  Payload ID: 5834
  Gene Symbol: FAM184A
  Gene Name: family with sequence similarity 184, member A
  ENST ID: ENST00000621231
  CDS Start-End: 478-3774
ggtgcgggctgcgagcgggacccgcggagctgcgctgtcctcgacgcctccgccaggcgcgggccgaggagcctccaagagctggcccggcccccggccgccgccgcccaaccccgggcatctgccccgcgccgttgtccccgcggcttcgggccggcgggaccgccccgtcccttccaggggtgacccgggggtcgcgggtgggacggcgcctgcggccgagtctggggggcgccgggtgtcgggtcgggaagcggccgccgcgactcttgcctcccgggcgtcgttgctccacgggcctgcctccacccgcggggacaggtgccccggctggggtctgttgggaagatggcgaccccgggcatgagctggcagcagcactattacggcggctcggcggccaaattcgcgccctcgccggccaccgcacagctggctgggcacagcatggactacagccaggagatgcacctgaaaatgagcaagaaaatcgcccagctcaccaaggtaatatatgctttaaacactaaaaatgatgagcatgaatctgcaattcaagccctcaaagatgctcatgaagaagaaattcaacaaattcttgctgaaacaagagaaaaaatattgcagtataaaagcaaagtaacagaggagctagaccttagaagaaagattcaagttttagaatcatcattagaagatcacataaaaatgaagcagcaggctttgacagaatttgaagcttataagcacagagttgaggacatgcaactttgtgcagaagcccagcatgtccaacgcatagtgaccatgtctagagaagtcgaagagattagaaggaaatttgaagaaaaattacggagctttggacaacttcaagtacagtttgaaaaagacaaacgattggcattggaagacttgcaagctgctcacagacgggagatacaagagctattgaagtcacagcaggatcacagtgcctcagtaaataaaggccaggaaaaggcagaggaactacacagaatggaggtggagtccctaaacaaaatgcttgaggagctaagacttgaacggaagaaactaattgaggattatgaaggcaagttgaataaagctcagtccttttatgaacgtgagcttgatactttgaaaaggtcacagctttttacagcagaaagcctacaggccagcaaagaaaaggaagctgatcttagaaaagaatttcagggacaagaagcaattttacgaaaaactataggaaaattaaagacagagttacagatggtacaggatgaagctggaagtcttcttgacaaatgccaaaagcttcagacggcacttgccatagcagagaacaatgttcaggttcttcaaaaacagcttgatgatgccaaggagggagaaatggccctattaagcaagcacaaagaagtggaaagtgagctagcagctgccagagaacgtttacaacagcaagcttcagatcttgtcctcaaagctagtcatattggaatgcttcaagcaactcaaatgacccaggaagttacaattaaagatttagaatcagaaaaatcgagagtcaatgagagattatctcaacttgaagaggaaagagcttttttgcgaagcaaaacccaaagtctggatgaagagcagaagcaacagattctagaactggagaagaaagtaaatgaagcaaagagaactcagcaagaatattatgaaagggaacttaaaaacctgcaaagtagattggaagaggaggtgactcaattaaacgaggcccattctaagactttggaagaattagcttggaagcaccatatggcaattgaagctgtccacagtaatgcaattagggataagaaaaaactgcaaatggatttggaagaacaacataacaaagataaactaaacctggaagaggataaaaatcagcttcaacaagagctagaaaacctaaaggaagtactggaagacaaactggttaatttacaaaagaaagagattggccacctccaagatatggtaaggaaaagtgaacaaggtcttggctctgcagaaggacttattgctagtcttcaggactcccaggaaaggcttcagaatgagcttgacttgactaaagacagcctaaaggagaccaaggatgctctattaaatgtggagggtgagctagaacaagaaaggcaacagcatgaagaaacaattgctgccatgaaagaagaagagaagctcaaagtggacaaaatggcccatgacttagaaattaagtggactgaaaatcttagacaagagtgttctaaacttcgtgaagagttaaggcttcaacatgaagaggataagaagtcagcaatgtctcaacttttgcagttgaaagatcgagagaaaaatgcagcaagagattcatggcagaagaaagtagaagatctcttaaaccagatttccttgctgaaacagaatctggagatacagctttcccagtctcagacttctttgcaacaactgcaagcccagtttacgcaagaacgacagcggcttacgcaagagcttgaagaattagaggagcaacatcagcaaagacacaaatcattaaaagaagcacatgtccttgcatttcaaactatggaagaggaaaaggaaaaggagcaaagagctcttgaaaatcatttacaacagaagcattctgcagagcttcaatcactaaaagatgcacacagagagtcaatggagggcttccggatagaaatggaacaggaacttcagactcttcggtttgaattagaagatgaaggaaaggctatgcttgcttccttgcgctcagaactcaaccatcaacatgcagctgcaattgatttgttacggcataatcatcatcaagaattggcagctgctaaaatggaattagagagaagcatagacatcagcagaagacagagtaaggagcacatatgtagaattacagatctacaagaggaattaagacacagagagcatcacatctctgaattggataaggaggttcagcaccttcatgagaatataagtgccctaaccaaagaactggaatttaaggggaaagaaattctcagaatacgaagtgaatctaaccaacagataaggttgcatgaacaagatttaaacaagagacttgaaaaagagttggatgtcatgacagcagaccacctcagagagaaaaatatcatgcgggcagattttaataagactaacgagctactcaaggaaataaatgccgctttacaagtgtcattagaagaaatggaagaaaaatatctaatgagagaatcaaaaccagaagatatacagatgattacagaattaaaagccatgcttacagaaagagaccagatcataaagaaactaattgaggataataagttttatcagctggaattagtcaatcgagaaactaacttcaacaaagtgtttaactcaagtcctactgttggtgttattaatccattggctaagcaaaagaagaagaatgataaatcaccaacaaacaggtttgtgagtgttcccaatctaagtgctctggaatctggtggagtgggcaatggacatcctaaccgcctggatcccattcctaattctccagtccacgatattgagttcaacagcagcaaaccacttccacagccagtgccacctaaagggcccaagacatttttgagtcctgctcagagtgaagcttctccagtggcttctccagatccccagcgccaggagtggtttgcccggtacttcacattctgaaagaattgtgttggcacagctctgtatagactgttactaagagcatgactttatacagattgttatgtaaataggctttcctatgtcaaacactgtgaatgagaaagtatttgtctctccaacttgaaaatgcactgtatttcctgtgatatttattggaatcattctataaggtactatattatgtgtgtaattataactgttatttttatttgagatggaagagtctttaacctttgtaattactgcataataaattttgttagaatcaaac

SEQ ID NO: 132297 - DNA, 6622 bp, Homo sapiens
  Payload ID: 5835
  Gene Symbol: FAM184B
  Gene Name: family with sequence similarity 184, member B
  Uniprot ID: Q9ULE4
  ENST ID: ENST00000265018
  CDS Start-End: 214-3396
gaaccagcaggagaggaaaaagggtgggcgcgcgggtgggcccgggaggcggagaccttcgggaagctggggccacgcggcggtgcaggcgacgggactgcagtgccacctctcccgagaaacccacacgctcgcacgcccgcgcgcgcacgcacgtgcacacggtgggcagggagaaaacgagagagtctgagtgctgggcgcgttttagcgatggcttctgctctcaacagcaaaattaacccgcccggcacttgccagggctccaaagccgacggtggcgccggctggagaatggactgtgatccccagatgcacgtgaaaatgtgcaagaagatcgcccagctcaccaaggtgatttatgccctgaacacccgccaggatgaggctgaggccagcatggaggcgctgcgggaagcgcaccaggaggagctccagaatgcggtggcagagaccaaggccaggctcctgcaggaacagggctgcgcagaggaggaagcccttctacagcgcatccaggccctggagagcgccctggagctgcaaaagaggctgacggaggaggcgctggctgagtcggcctcgtgcaggctggagacgaaggagagagagctgagggtggaggcagagcacgccgagcgagtcctcacgctctccagggaaatgctggagctcaaggctgactacgagaggaggctccagcacctgacgagccacgaggctaccccgcagggccggctgccccaggagagccctgaaaccaagtcggagccaggccagggcccggagatgcaggaggtcctgctagaggtgcagcggctgcgagtggagaaccagcagctgagcaaggactacgcccgcaaggccgaggagctgcaggccacctacgagagggaaaacgaggccatccggcaggccatgcagcagtcggtgagccaggccctgtggcagtggcaggagaaggagtcggacctccgcaagaacttccaggtccaggagtcagccctgcaggctcaggtccggaagctggaaggagacctggagcacagaggccgcaagataagtgacctgaagaagtacgcccagaagctgaaggagaggattcaggacctggatgtgcagcttaaggaggctcgacaggagaattcagagttgaaaggcactgcaaaaaaacttggggagaagctggctgttgccaaagacagaatgatgctgcaggagtgtcgtgggacacagcagacagatgccatgaagactgagttagtttcagagaacaaagtcctgcgggaagagaatgacttggaagccggcaatcttcatcctcagcaggatcaaagctgtctcaaggagtgcccttgcatgaaaggaggcacagatatgcagaccaagaaagaggcaagtgctgagacagaatatatgaagcaacaatatgaagaagaccttcgtaaaatcaaacatcagacagaagaggagaagaaacatctcaaagaccagctagtgaagcgactagaagacttggtaaagaagcacaccgtggaaatcaaatccgttcgctcgtccgtggaggctgaaagaaagaaactgcagagggaagtagaagcacagttggaggaagtgaggaagaaatcagaaaaggagataaagcagctggaagaagagaaagcagccctcaatgtgaagcttcagaattctctgcttgaggttttaaggctggaagaatttatccaacaaaataagacacgccccacaggagctgaggaaagtccccaggaattaggccgccagcactgcagcattctggagacccaggatccatgcttgaagctggatgaaacttcgccgagaggagaggagtatcaagataagttagcagctgaagaaggaaccagcagtgatgaagaagaaaggaccaaagtgcttctcaaggagggaagtgacccacaacctccactgggctctttgttgaaggagaaaacatccaaaatccagcgtctagaggaggactggcaaagccagaaggccaaattgcaagcccaggtctcacagatgcagcaggctctggagcagtgcaccagcaactacagggaggacctgcaggcactcaagcagctctcggacctggagagggagaagctgcagcgtgagctccaggagaccactcagcagaaccacgccatgaaagcccagctcgaggcttcccaccagagagccctgcgcatgctggagaaggccagacatcaggaactcaaggccacagaggaacgcttgaagaaggaatccagccacagcctccagatccaacaccagacacaccgactggagctccaggccttggaggaaaaggccaggcaagagctgcaggaggagcgtgagaggatgcaggcacagcaggccctgctgctagagtcgctcagacaggagctgtcggagcagcaagctgcctgttctgggcaccagaaggacttggaggcactgcaggccgagctgagggctctgggcagacagcaagccagcagccagtgtccaggagacagcaaggatcacataatcgccacagaggagcggggcggcccgggccaggccggctccccaccgggcgctgctgggcagggttccggcgagggatgcgggctctgggaggagaacgcgcagctccaggacgcggtgcggcggctgcgcgcggaggtggagcagcatcagcaggaggcgcagaagctccgagaccagcgcaggttcctggaggagactcagcaagcccagcgggccagggaggtggagacactgcgccaggaacaccggaaggagatgcaggccatggtggcagatttcagtagtgcccaggcccagctccaggcccggctggctgccctggaagccgaactgaaagattccggagagaagccagggaagggagcgtccaggcccgaggaccttcagctcattggccgcctgcagacccgcctgaaggagagagaggacatcatcaagcagctcacggaagagagaagatttcactacgcagcattccccagtgccatgtcccaccggaatcggtctttctctttcaatcctcacccgggatatttgaccccttccatgaagaaaaagaaggtggaggacgtgcccagccgcgtggtcagcgtgccgaacctcgcctcctatgcaaagaactttctgagtggcgatctgagttccaggattaatgcccctccaataactacatcacccagcttggacccaagccccagctgtggccggacctacaaacccaaccagtctacagatgcaaaaactgccacaaggaccccagatggtgaaacggcccaagccaaagaagtccagcagaaacagggctctccgcaccaggaatggttcaccaagtacttttctttctaagctaacctttgggatacatcacagaggatacttgaaaaacatttattttaaatcatccgattgaaggaatgaactaacaccaaccaaccaaataatatgcttatgatttatatatgatagctaaaacaaattttggcgttaacacttcatactgttctgccaggcacagcagctcacgcctgtaatcccatcactttgggaggctgaggcagatggactgcttgagtccaggaatttgagaccagcctggccaatatggtgaaaccccatctctacaaaatatacaaaaattagccaggcatggtggcgtgtgcctgtggtcccaggtacttgggggactgaggcgggaggatcacttgaacctaggaggcagaggttgcagtgagccaagttcgaactcctgcattccaaccagcctgggtgacagagggagaccctgtctccaaaaaaaaaaaaaaaaaaaaaaaaaaaaaaaaaaaaaaaaaaaattgacattaaaccagtgttattaaaagtcatctataggaaaatgttattagcgttactaatgacccataccttgtatttctagtgtccataacatcatactccattttgtggaacatcagactttgtgatttccatgatctatttcaaaagtggttgtacttgtccttaggatgctagtcaactccactggaaagctgtttctatgtaaaatgatgcaattccaaaatgcacatctaacctcaataggaagacaaataacagttaaacaggaaagccaactaaaaacaaaccaaacctaccagaaatggatggtagcatgcttggactgaatactttcacttccttggtctaagacaagcagcagattatagatgggataacacccacctctaaaagggctttgcaaggattaagcaagataacataaattaacatgaattggaattaagtaccacaaggtttttctgtaaataaccaatcctagcccagttataggtctcagtgtaatgaccatagtgccaacatgatcacttgtgaaggtctctagattatctgttctttgaagtcaaagatcttctagactgggcacatggctcatgcctgtaatcccaacactttgggaggctgagatgggaggagagcttgaggccaggaatttgagaccagcctgggcaacacagcgagacctccatctctacaaaaaaataattagcccaaagaaaacccagctacttggaagtctgaggtaggacagcatgagcccaagagttcgagaccagcctgggcaagatagtgagatcccatctctacagattaaaaaaatatatatatatatcccctgaacctctggtctttgggtttgagccatttgcctcatggtgtgttgcttcttcactgcatgaattcccagtgggttaaaggaaccgcaatggctgttcacggtgctgaccttgctctcagtccacactgatttgtcttaccttctgacagagcaatgtgatttgacaagactcaataacaacttttagggggcaaaatattttttcagtctttggtgctggcccagaaggtggcccacaaaccaatgttaattctatgcattgtcaaatctttgctctttgaataaaactttgaataactgggcaataaaaatggttgacttgtattgattttccacagaaaggtaaaattagatgaagacagcttagaaatagaaagttcagttcacattaacctcaatcacaccatcttaaaaaaaaaaaagctgattacatataactgtcaaacttacgtattaaaggtaaatttactgcctaatcaaaacgaggctccaatgcatttttaaatgcaaacaaacacttgtcaccatacattaacacaccatactgtttttcactaccaaatattttttgtgagtttcccgcttagagtgtcttagttcgttcaggctgctctaacaaaatatcttacttatactggataatttataaacaatagaaatatgtcactcacagtcctagaggctaagtccaagatcaaggcaccagcagatatggagtctggggagggcccattcttcagaaatgggtgcctgctacgtgtccttacatggtggaagaggcaagagcgcctccctgagcctcttttgtaagggtacttatcctactcatgagggtgaagccctcatgactccattgcttcccaaaagccccacctcttaatactattacattgacattaggttccaacatatgaattttggaagggacatcaacattcaggacatagcagtgaaccctgtaggactgctctttattttgtgctttcaaaaagactacatacaggtggttctatttttgtgtgttgaaacactttcccaggctgcactttgcatttctgtccttaaactcagcatgatccctgggcaaggagaaaattttactagttgagatcgtacataggttttgactcctttcttgctgcaggtgactgaaaagatctttcagtcttaaatttctaaattctaccctgcaatgattatatctttgttaacaaaatctttgcatgcttccataattttttattgaggccatatgccttgggtattgaagtaaggcatttaaggacacaaacttaagctttttgtttgttattaccaaactgccattcagaaagtttctaacaatttacacccttaccagcagtaaatgaacctactgtgccctaacactattgacaaagaaatacaatttgatagataaaacattctattttagtttgcataatgattccatcaatctctcaacagcagagcggtctagagatgacagtgatggcgtagaggtgacagtgaagatgaagagaaattatccaattcgggattaagttaagagagagaaaaaaacagtatttaatggtaaatctcttcaggctgtattatgacaggggtggaagagttaatatgttcctgcagcaaaactgaaaggaatactatctgttccacatgaaagcaaactgttttgtaattggggtaggtaaaaatggattcacccagtcaatggctgcacaccacatacctgagcccttaactgctctaacactgatgtaatatccaacccaacatttgtgattgaggctacttggttaatttttctccaggatccatctggattctgcagatgaggctggcaaattaaatggaactatgatagggaccatcttactgtatctgtcagat

SEQ ID NO: 132298 - DNA, 1446 bp, Homo sapiens
  Payload ID: 5836
  Gene Symbol: FAM185A
  Gene Name: family with sequence similarity 185, member A
  Uniprot ID: Q8N0U4
  ENST ID: ENST00000409231
  CDS Start-End: 181-1008
ggattgcgcggctgatgtttagaacgcctagtcaagccaaccggctcgctcttgtttcagcaaaccctgacttacgtctcctatttgacttgaggcggcacagtggccaagtcgattggccgtggcaagtgaccctccctgtggctgaagtgttctgaggactggcgagagaggcgcgccatgcttgccccctgctcaggttgggagcttggctgcttccgtctctgtctccgtcaggtccgactgtgggctggcgctgggcgctgggcttgctgggcttgccaagccaggccgtacagctcaggtgggagcgagcgctggcccggatcggagactgaggtccctccgcctggcccggggcgccgaactctgaaggagtggacactgcagggtcaaaaattgcatgttcaaacaaaaggaggcaaagtgatctgtctgggaacagtttatggaaatatagatattcatgcatcagataaaagtgctgtgaccatagataaactgcagggaagttctgttactgtatctaccgaagatggtttgctgaaagccaagtatctttatacagaatcatcatttctgtcttctgctgctggggatattacattaggaagtgttcatggtaatataacattacaaagcaagatgggtaacatcacagtagattcgtcttctggatgtctaaaagcctcaactaatcagggtgccatagatgtttatgtcagccaactggggaaagtggaattgaaatcccataaaggttctattattgtcaaggtcccatcttcacttcaagctcatttacagttatcagggaaagaggttgatgtgaactcagaagtccatgttcaggaaatggctgaagttcgtaaagatgatgttgtaacagtgactggactcatgaatcaagcaagcaaacgtgaaaaatggattaaggctgatgccccaaaaggcactgtaagttttagaaggcaaagttggtttcagtccctgaaactgcaggactaaaactgatttgagttggatttatgatttttaacaatgattcgcagatctgtgactacaaaaatgtaaatcccaccattcatataaaggttgaaaacaacaaattgagaatgaatactggtgaactgttttgggaggctttttcaaaatttgtgctttgctattgtattcattttctactgctctgtaacaaattaccacaaatttagcagcataaaataatactcatttacagctatgtctaggttctccgctcagggaatcacaaggctagaaatcaagattttggccaggctgagttctcatctggagtctctgggaagaaatctacttccaacttcattcagattattgggaaaatccagttccttgtgactggatgactgaggtctccattttcttgctggctgtcagccagcaatcactctaagcttctagagg

SEQ ID NO: 132299 - DNA, 1179 bp, Homo sapiens
  Payload ID: 5836
  Gene Symbol: FAM185A
  Gene Name: family with sequence similarity 185, member A
  Uniprot ID: Q8N0U4
  ENST ID: ENST00000413034
  CDS Start-End: 1-1179
atgcttgccccctgctcaggttgggagcttggctgcttccgtctctgtctccgtcaggtccgactgtgggctggcgctgggcgctgggcttgctgggcttgccaagccaggccgtacagctcaggtgggagcgagcgctggcccggatcggagactgaggtccctccgcctggcccggggcgccgaactctgaaggagtggacactgcaggtgagcccgtttggtcggctgcgggcgcggctcccgtgccacctggccgtgaggcccctggaccccctcacctacccggatggcgaccgcgtgctggtcgcggtgtgcggcgtggagggcggcgtgcggggcctggacggcctgcaggtgaagtacgacgaggatctggaggagatggccattgtgtctgatactatccacccccaggcgtccgtggaggtgaacgcgcccctgaagtttggtttagatatcaagtcatcagggtctggctgtgtaaaagttcaaagtattgagggtgataattgcaaaattgaaacagagcatgggactagtatcttgcagtctgttaagggtcaaaaattgcatgttcaaacaaaaggaggcaaagtgatctgtctgggaacagtttatggaaatatagatattcatgcatcagataaaagtgctgtgaccatagataaactgcagggaagttctgttactgtatctaccgaagatggtttgctgaaagccaagtatctttatacagaatcatcatttctgtcttctgctgctggggatattacattaggaagtgttcatggtaatataacattacaaagcaagatgggtaacatcacagtagattcgtcttctggatgtctaaaagcctcaactaatcagggtgccatagatgtttatgtcagccaactggggaaagtggaattgaaatcccataaaggttctattattgtcaaggtcccatcttcacttcaagctcatttacagttatcagggaaagaggttgatgtgaactcagaagtccatgttcaggaaatggctgaagttcgtaaagatgatgttgtaacagtgactggactcatgaatcaagcaagcaaacgtgaaaaatggattaaggctgatgccccaaaaggcactgtaagttttagaaggcaaagttggtttcagtccctgaaactgcaggactaa

SEQ ID NO: 132300 - DNA, 1958 bp, Homo sapiens
  Payload ID: 5836
  Gene Symbol: FAM185A
  Gene Name: family with sequence similarity 185, member A
  ENST ID: ENST00000420217
  CDS Start-End: 199-414
atcccaacttgcccctggggattgcgcggctgatgtttagaacgcctagtcaagccaaccggctcgctcttgtttcagcaaaccctgacttacgtctcctatttgacttgaggcggcacagtggccaagtcgattggccgtggcaagtgaccctccctgtggctgaagtgttctgaggactggcgagagaggcgcgccatgcttgccccctgctcaggttgggagcttggctgcttccgtctctgtctccgtcaggtccgactgtgggctggcgctgggcgctgggcttgctgggcttgccaagccaggccgtacagctcaggtgggagcgagcgctggcccggatcggagactgaggtccctccgcctggcccggggcgccgaactctgaaggagtggacactgcaggtttagatatcaagtcatcagggtctggctgtgtaaaagttcaaagtattgagggtgataattgcaaaattgaaacagagcatgggactagtatcttgcagtctgttaagggtcaaaaattgcatgttcaaacaaaaggaggcaaagtgatctgtctgggaacagtttatggaaatatagatattcatgcatcagataaaagtgctgtgaccatagataaactgcagggaagttctgttactgtatctaccgaagatggtttgctgaaagccaagtatctttatacagaatcatcatttctgtcttctgctgctggggatattacattaggaagtgttcatggtaatataacattacaaagcaagatgggtaacatcacagtagattcgtcttctggatgtctaaaagcctcaactaatcagggtgccatagatgtttatgtcagccaactggggaaagtggaattgaaatcccataaaggttctattattgtcaaggtcccatcttcacttcaagctcatttacagttatcagggaaagaggttgatgtgaactcagaagtccatgttcaggaaatggctgaagttcgtaaagatgatgttgtaacagtgactggactcatgaatcaagcaagcaaacgtgaaaaatggattaaggctgatgccccaaaaggcactgtaagttttagaaggcaaagttggtttcagtccctgaaactgcaggactaaaactgatttgagttggatttatgatttttaacaatgattcgcagatctgtgactacaaaaatgtaaatcccaccattcatataaaggttgaaaacaacaaattgagaatgaatactggtgaactgttttgggaggctttttcaaaatttgtgctttgctattgtattcattttctactgctctgtaacaaattaccacaaatttagcagcataaaataatactcatttacagctatgtctaggttctccgctcagggaatcacaaggctagaaatcaagattttggccaggctgagttctcatctggagtctctgggaagaaatctacttccaacttcattcagattattgggaaaatccagttccttgtgactggatgactgaggtctccattttcttgctggctgtcagccagcaatcactctaagcttctagaggccacccacatgccttctcatgttgcccctccatcttcaagccagcagtgatgcgctgagttcttctcatgctttgaatatctgacttcttctgcagccagctggaagaatatatacttttaaagggctcacttgattaggtcaggcccacccaggataacctttgttttgccatataatgtaacattcataggagtgatggcccatcacattcagttttcactcccactcaaggaaaggagattatacaaaggcatccatcatgtggggacaattagcttagaattctttataatgtagctctcacatgacaggttttctacttagtaccttttatggcatcaatgtaaatttaagctgtaaataaaaaacaaatatgtgaagc

SEQ ID NO: 132301 - DNA, 755 bp, Homo sapiens
  Payload ID: 5836
  Gene Symbol: FAM185A
  Gene Name: family with sequence similarity 185, member A
  ENST ID: ENST00000418198
  CDS Start-End: 172-755
ggctgatgtttagaacgcctagtcaagccaaccggctcgctcttgtttcagcaaaccctgacttacgtctcctatttgacttgaggcggcacagtggccaagtcgattggccgtggcaagtgaccctccctgtggctgaagtgttctgaggactggcgagagaggcgcgccatgcttgccccctgctcaggttgggagcttggctgcttccgtctctgtctccgtcaggtccgactgtgggctggcgctgggcgctgggcttgctgggcttgccaagccaggccgtacagctcaggtgggagcgagcgctggcccggatcggagactgaggtccctccgcctggcccggggcgccgaactctgaaggagtggacactgcaggtgagcccgtttggtcggctgcgggcgcggctcccgtgccacctggccgtgaggcccctggaccccctcacctacccggatggcgaccgcgtgctggtcgcggtgtgcggcgtggagggcggcgtgcggggcctggacggcctgcaggtgaagtacgacgaggatctggaggagatggccattgtgtctgatactatccacccccaggcgtccgtggaggtgaacgcgcccctgaagtttggtttagatatcaagtcatcagggtctggctgtgtaaaagttcaaagtattgagggtgataattgcaaaattgaaacagagcatgggactagtatcttgcagtctgttaagggtcaaaaattgcatgttcaaac

SEQ ID NO: 132302 - DNA, 2217 bp, Homo sapiens
  Payload ID: 5836
  Gene Symbol: FAM185A
  Gene Name: family with sequence similarity 185, member A
  Uniprot ID: Q8N0U4
  ENST ID: ENST00000442873
  CDS Start-End: 238-672
cttaggcaaggggtccaggtcagagtttagagctttcaaatcccaacttgcccctggggattgcgcggctgatgtttagaacgcctagtcaagccaaccggctcgctcttgtttcagcaaaccctgacttacgtctcctatttgacttgaggcggcacagtggccaagtcgattggccgtggcaagtgaccctccctgtggctgaagtgttctgaggactggcgagagaggcgcgccatgcttgccccctgctcaggttgggagcttggctgcttccgtctctgtctccgtcaggtccgactgtgggctggcgctgggcgctgggcttgctgggcttgccaagccaggccgtacagctcaggtgggagcgagcgctggcccggatcggagactgaggtccctccgcctggcccggggcgccgaactctgaaggagtggacactgcaggtgagcccgtttggtcggctgcgggcgcggctcccgtgccacctggccgtgaggcccctggaccccctcacctacccggatggcgaccgcgtgctggtcgcggtgtgcggcgtggagggcggcgtgcggggcctggacggcctgcaggtgaagtacgacgaggatctggaggagatggccattgtgtctgatactatccacccccaggcgtccgtggaggtttagatatcaagtcatcagggtctggctgtgtaaaagttcaaagtattgagggtgataattgcaaaattgaaacagagcatgggactagtatcttgcagtctgttaagggtcaaaaattgcatgttcaaacaaaaggaggcaaagtgatctgtctgggaacagtttatggaaatatagatattcatgcatcagataaaagtgctgtgaccatagataaactgcagggaagttctgttactgtatctaccgaagatggtttgctgaaagccaagtatctttatacagaatcatcatttctgtcttctgctgctggggatattacattaggaagtgttcatggtaatataacattacaaagcaagatgggtaacatcacagtagattcgtcttctggatgtctaaaagcctcaactaatcagggtgccatagatgtttatgtcagccaactggggaaagtggaattgaaatcccataaaggttctattattgtcaaggtcccatcttcacttcaagctcatttacagttatcagggaaagaggttgatgtgaactcagaagtccatgttcaggaaatggctgaagttcgtaaagatgatgttgtaacagtgactggactcatgaatcaagcaagcaaacgtgaaaaatggattaaggctgatgccccaaaaggcactgtaagttttagaaggcaaagttggtttcagtccctgaaactgcaggactaaaactgatttgagttggatttatgatttttaacaatgattcgcagatctgtgactacaaaaatgtaaatcccaccattcatataaaggttgaaaacaacaaattgagaatgaatactggtgaactgttttgggaggctttttcaaaatttgtgctttgctattgtattcattttctactgctctgtaacaaattaccacaaatttagcagcataaaataatactcatttacagctatgtctaggttctccgctcagggaatcacaaggctagaaatcaagattttggccaggctgagttctcatctggagtctctgggaagaaatctacttccaacttcattcagattattgggaaaatccagttccttgtgactggatgactgaggtctccattttcttgctggctgtcagccagcaatcactctaagcttctagaggccacccacatgccttctcatgttgcccctccatcttcaagccagcagtgatgcgctgagttcttctcatgctttgaatatctgacttcttctgcagccagctggaagaatatatacttttaaagggctcacttgattaggtcaggcccacccaggataacctttgttttgccatataatgtaacattcataggagtgatggcccatcacattcagttttcactcccactcaaggaaaggagattatacaaaggcatccatcatgtggggacaattagcttagaattctttataatgtagctctcacatgacaggttttctacttagtaccttttatggcatcaatgtaaatttaagctgtaaataaaaaacaaatatgtgaagca

SEQ ID NO: 132303 - DNA, 7127 bp, Homo sapiens
  Payload ID: 5837
  Gene Symbol: FAM186A
  Gene Name: family with sequence similarity 186, member A
  Uniprot ID: A6NE01
  ENST ID: ENST00000327337
  CDS Start-End: 1-7056
atgttcttcaaaatgaaaaatgagatagacaatgaccctgaatcagaaaaatgcatcaaggattccaccatcatgagaagagagccccaaaatatccttagtcctttgatgctccctaaccttgagatcccattctcagtaaaggatatcatctctaggattgagcgcgcacagctccatcgagccagagaggacattgatatgcagctgagtgaaataatgaacaatgtgcatcggataatgactcgctatactcttgtttttaactcgtcctctgaaaggaatgtctcccttacagaacataagaaaaaacagagaaccaattttcttgagaaaatggctacttacgctaagactattgaaataagagaaaagactcttgccaacattctggcctggttggaagaatggaatgatgttttgtctgagatgactctaatggatgttgatgaacaccaccactggatagcacaaatggagttgttaccggacacgttaaaagctattgagaacaatgtcaagatactaagcagatttagtacatctttcctcgacgaaaagaagaaacaaaagaaaaaaatattatctagaggtactctatggaaatcttggaaagaaagagttataaaacgaccttcaacagcccgtgctttaagaccagatcagatgattagtgatcaacttgcaacaaatacaaaggtttcagaaatccaaggtatgctacaggaactcataggcaccacaatgttcagtacattggaaaacaatgctattaaatatatatcatcaacaatagtaaacctttctacagctttgagtatgctaaatgatgaattaaaatgtgttaacttccaaagttccactgtgtatgcacatgagacaagtgaagcagaaaaggagctctctctgaagataatacgagatctcagtaacgaaaatgaaatgcttcagcagaaacttcaagatgcagaagaaaaatgtgaacaacttattcgatccaaaattgttatagaacaactatatgcaaaattgtccacatcatcaaccttgaaagtgttacctggaccttctccacagtcatccagggcgataatcaaagttggtgatactgaggacaatatggacaatattttagacaaggaacttgaaaatattgtagatgaagtccaaagaaaagagaccaaggactctgggataaaatgggactccactatttcatatacagcccaagctgaaagaactccagatttaactgaactacgacagcaacctgttgcttctgaagatatttccgaagacagcactaaagataacgtatcattgaagaaaggtgatttctatcaggaagatgagactgatgagtatcaatcatggaaaagaagccacaaaaaagccacatatgtatatgagacctctggaccaaatctgagtgataataaaagtggacagaaagtctcagaggccaaacctagtcaatactatgagctacaagtactgaaaaagaaaagaaaagaaatgaaatccttttctgaagataaatcaaagtcacccactgaagcaaaaagaaaacatctctctttaactgaaacaaagagccaaggtggcaaaagtggaacaagtatgatgatgttggagcaatttaggaaggtcaaacgtgaatctccatttgacaaacgtccaactgcagcagagattaaagtggaacccaccactgagtcattggacaaagagggcaaaggtgaaattagaagcctagtggagccactcagtatgatccaatttgatgatactgctgagccacagaaaggaaaaataaaaggaaagaaacaccatatctcttcaggaactatcacaagcaaagaagaaaaaactgaagagaaggaagagttgaccaaacaagtcaagtctcatcaacttgttaaatcactctcaagagtggctaaagagacttcagaatctaccagagttctagaaagtccagatggcaaaagtgaacagagtaacctcgaagaatttcaggaagccataatggctttcctaaaacagaaaattgataacataggaaaggcttttgacaaaaagactgttccgaaggaagaggagttattaaaaagagcagaagctgaaaaattaggaatcataaaggcaaaaatggaggaatatttccaaaaagtggctgaaactgtgactaaaatcttgagaaaatacaaagatacaaaaaaggaagaacaagttggagagaaacctataaaacaaaaaaaggtagtctcatttatgccaggattgcattttcagaagtcaccaattagtgcaaaatctgaaagcagtaccctcctctcatatgagagcacagatccagtaattaacaatttaatacaaatgatcttggctgaaatagaaagtgaaagagatattccaacagtctcaacagtacagaaagaccacaaggagaaggaaaaacaaaggcaggagcaatatttgcaagagggtcaagaacaaatgtctggcatgagtctcaaacagcagttgctgggagaaagaaatctcttgaaggagcactatgagaagataagtgagaattgggaagaaaaaaaggcatggctccagatgaaggagggaaagcaagaacaacagagccagaaacagtggcaggaagaagagatgtggaaggaagagcaaaaacaggcaactccaaagcaggctgagcaagaggaaaagcaaaagcaaagaggacaggaggaagaagagcttccaaagtcaagcctgcagcggctggaagaagggacccaaaaaatgaaaacacaagggttgctcttggaaaaggagaatggacagatgaggcagattcagaaggaagcgaaacatttggggccacacaggagaagggagaaagggaaggaaaagcagaagccagagagagggctagaggacctcgaaaggcagatcaaaacaaaggatcagatgcagatgaaggaaacacaacctaaagagctagaaaaaatggtcatccaaactccaatgacattatctcccaggtggaagagtgtattgaaagatgtacagcggtcatatgaaggaaaagagtttcagaggaatctgaagacattagagaaccttcctgatgaaaaggagcccatatcaatcacacctcccccctccctacaatactccctgcctggagctcttcctatttctggccagcctctcactaaatgcattcatctcacacctcagcaggcccaggaagtggggatcacactcactcctcagcaggcccaggctcaggggatcacgctcacccttcagcaggcccaggaactagggatccctctcacccctcagcaggcccaggccctggagatccttttcacccctcagcaggcgcaggccctggggatccctctcacccctcagcagacccaggttcaagggatcactctcacccctcagcaggaccaggccccggggatctctctcaccactcagcaggctcagaaactagggatccctcttacccctcagcaggcccaggccctggggatccctctcacccctcagcaggctcaggaattggggatccctctcacccctcagcaggcccaggccctgagggtctctctcacccctcagcaggctcaggaattggggatccctctcacccctcagcaggcccaggccctggggatcactctaacccttcagcaggcccagcaattggggatccctctcacccctcagcaggcgcaggctctcggaatcactctcacccctaagcaggttcaggaactggggatccctcttactcctcagcaggcccaggccctggggatcactctcacccctaagcaggctcaggaattggggatccctctcaaccctcagcaggcccagaccctggggatccctctcacccctaagcaggcacaggctctggggatccctttcacccctcagcaggcgcaggccctggggatccctctcacccctcagcaggcgcagactcaggagatcactctcacccctcagcaggcccaggccttggggatgcctctcaccactcagcaggctcaggaactggggatccctctcacccctcagcacgctcaggccttggggatgcctctcaccactcagcaggctcaggaactggggatccctctcacccctcagcaggctcaggccttggggatgcctctcaccactcagcaggctcaggaactggggatccctctcacccctcagcaggctcaggaattggggatccctttcacccctcagcaggcacaggctcaggagatcactctcacccctcagcaggcccaggccctggggatgcctctcaccgctcagcaggctcaggagctggggatcactctcacccctcagcaggctcaggaattggggatccctctcacccctcagcaggcccaggccctggggatccctctcatccctccgcaggctcaggaattggggatccctctcacccctcagcaggcccaggccctggggatccttctcatccctccgcaggctcaggaattggggatccctctcacccctcagcaggcccaggccctggggatccctctgatccctccgcaggctcaggaattggggatccctctcacccctcagcaggtccaggccctggggatccctctcatccctccgcaggctcaggaattggagatccctctcacccctcagcaggcccaggccctggggatccctctcacccctcagcaggcgcaggaactggggatccctctcacccctcagcaggcgcaggaactggggatccctctcacccctcagcaggcgcaggctcaggggatccctctcacccctcagcaggcccaggctctggggatctctctcacccctcagcaggcgcaggctcaggggatcactctcacccctcagcaggcccaggcactgggagtccccatcaccccagtaaatgcctgggtgtcagctgtcactcttacctctgagcaaacccacgctttggagtcccctatgaacttagaacaggctcaagaacagttattgaagttaggggttcctctcaccttagataaagcccataccttgggatcgcccctcacccttaagcaagtccagtggtcccatagaccatttcagaaatcgaaggcttctctccccactgggcaatccatcatatcaagattgtctccaagtcttaggctgtccctggcatcatcagctcctactgctgagaagtcctctatattcggggtctcttctactcctttgcagatatcaagggttcccctcaaccaaggcccctttgcccctgggaagcccctagaaatggggattctttctgagcctgggaagcttggggcaccacagactcttcgttcctctggacagaccctggtatacggaggtcaatccacttctgcgcagttcccggcaccacaggcccctccctcccctgggcagctcccaatatctcgggcccctcccactccagggcagccctttatagctggagttccacccacttctggacagattccaagtctctgggctcctctttctcctgggcagcccttagttcctgaagcctcttccatccctggggacctcctggaatctggacccttaaccttctctgagcagctccaggaattccagcctcctgccactgctgagcaatctccctatctgcaggctccttctacccctgggcagcatctggcaacatggacccttcctgggcgagcttcttcattatggatccctcccacctctagacatcctcccacactatggccgtccccagcccctggaaagccccagaaaagttggtccccttctgttgctaagaaaagattggcaattatttcttctctgaaatctaaatcagtattgatccatcctagtgctccagatttcaaggtagctcaagttcctttcaccactaagaagttccaaatgtcggaggtctctgacacttccgaagaaacccagatacttcgagacacttttgctatagaatcatttagaacatttcagtcccatttcaccaaatataggacaccagtataccaaaccccttacactgatgaaagggcccttctcactctcatgaagccaacaacatcaccatcttctctcactactctactcagaacatcacagatttcacctttggaatggtaccagaaatcccgattccctcctatagacaagccctggatactgagttcagtttcagataccaagaaacccaaagtaatggtgcccccttcctctcctcaagaacttgaagaaaagaggtattttgttgatgtggaggctcagaagaagaacctgatactattaaatcaggctataaaaacttgtggactcccttcacagctacacacaatggctaggactctcataattgagatacttcatatggacacagttcagttgggatacttattccgcaagtacattgcctataggctgatccagcatgccaggaacaacataatgaaacgactaaaagccatccaaaatactgggaaaggctatgaggccaggaacctccacatgatgctgagcagacttgatgactacgggaaaaaggtgatgcaggtctggactgagaagcagaagtctctagggcagaaacggaatcagtgcctgaagaaaatgatacacgtattcaaccagctcaaaaagatacatgaattgaatcttagtcaacctatccccttaatcatcgaagaaaagcagatacctgcctctaccacatttgttcaaaagccattcttaaaattactaatggaagaggacagaacctctgacatatgcaagaaatttaggcaacaagaggaccagacagaggccatctggaatgttgatctgtccacttcaagctacccaatagcagagaagacatctatgcattcactctgggcccagctgggtgggtacccagatattcccaggctgcttcagttagaagtgcagtctaccttccgaaaatctcttgcatccctccaatcacgggttaagaagattcccaaatgactgtaaaattaaatacaagcatgttgaaagtacatttcagtatctttcagtaaaatgcctattttgttctc

SEQ ID NO: 132304 - DNA, 463 bp, Homo sapiens
  Payload ID: 5837
  Gene Symbol: FAM186A
  Gene Name: family with sequence similarity 186, member A
  ENST ID: ENST00000539751
  CDS Start-End: 1-220
gaacaacataatgaaacgactaaaagccatccaaaatactgggaaaggctatgaggccaggaacctccacatgatgctgagcagacttgatgactacgggaaaaaggtgatgcaggtctggactgagaagcagaagtctctagggcagaaacggaatcagtgcctgaagaaaatgatacacgcaacaagaggaccagacagaggccatctggaatgttgatctgtccacttcaagctacccaatagcagagaagacatctatgcattcactctgggcccagctgggtgggtacccagatattcccaggctgcttcagttagaagtgcagtctaccttccgaaaatctcttgcatccctccaatcacgggttaagaagattcccaaatgactgtaaaattaaatacaagcatgttgaaagtacatttcagtatctttcagtaaaatgcctattttgttctcttt

SEQ ID NO: 132305 - DNA, 8200 bp, Homo sapiens
  Payload ID: 5837
  Gene Symbol: FAM186A
  Gene Name: family with sequence similarity 186, member A
  ENST ID: ENST00000543111
  CDS Start-End: 139-7185
accaattagtagcagagtatgccacaacttctaggatcaggaaagacctctcctagcttcctactggatatctttattagcatttttgtagattctgtgaaaaagaagaaataaaacgaaatcacccacattttcaaaatgttcttcaaaatgaaaaatgagatagacaatgaccctgaatcagaaaaatgcatcaaggattccaccatcatgagaagagagccccaaaatatccttagtcctttgatgctccctaaccttgagatcccattctcagtaaaggatatcatctctaggattgagcgcgcacagctccatcgagccagagaggacattgatatgcagctgagtgaaataatgaacaatgtgcatcggataatgactcgctatactcttgtttttaactcgtcctctgaaaggaatgtctcccttacagaacataagaaaaaacagagaaccaattttcttgagaaaatggctacttacgctaagactattgaaataagagaaaagactcttgccaacattctggcctggttggaagaatggaatgatgttttgtctgagatgactctaatggatgttgatgaacaccaccactggatagcacaaatggagttgttaccggacacgttaaaagctattgagaacaatgtcaagatactaagcagatttagtacatctttcctcgacgaaaagaagaaacaaaagaaaaaaatattatctagaggtactctatggaaatcttggaaagaaagagttataaaacgaccttcaacagcccgtgctttaagaccagatcagatgattagtgatcaacttgcaacaaatacaaaggtttcagaaatccaaggtatgctacaggaactcataggcaccacaatgttcagtacattggaaaacaatgctattaaatatatatcatcaacaatagtaaacctttctacagctttgagtatgctaaatgatgaattaaaatgtgttaacttccaaagttccactgtgtatgcacatgagacaagtgaagcagaaaaggagctctctctgaagataatacgagatctcagtaacgaaaatgaaatgcttcagcagaaacttcaagatgcagaagaaaaatgtgaacaacttattcgatccaaaattgttatagaacaactatatgcaaaattgtccacatcatcaaccttgaaagtgttacctggaccttctccacagtcatccagggcgataatcaaagttggtgatactgaggacaatatggacaatattttagacaaggaacttgaaaatattgtagatgaagtccaaagaaaagagaccaaggactctgggataaaatgggactccactatttcatatacagcccaagctgaaagaactccagatttaactgaactacgacagcaacctgttgcttctgaagatatttccgaagacagcactaaagataacgtatcattgaagaaaggtgatttctatcaggaagatgagactgatgagtatcaatcatggaaaagaagccacaaaaaagccacatatgtatatgagacctctggaccaaatctgagtgataataaaagtggacagaaagtctcagaggccaaacctagtcaatactatgagctacaagtactgaaaaagaaaagaaaagaaatgaaatccttttctgaagataaatcaaagtcacccactgaagcaaaaagaaaacatctctctttaactgaaacaaagagccaaggtggcaaaagtggaacaagtatgatgatgttggagcaatttaggaaggtcaaacgtgaatctccatttgacaaacgtccaactgcagcagagattaaagtggaacccaccactgagtcattggacaaagagggcaaaggtgaaattagaagcctagtggagccactcagtatgatccaatttgatgatactgctgagccacagaaaggaaaaataaaaggaaagaaacaccatatctcttcaggaactatcacaagcaaagaagaaaaaactgaagagaaggaagagttgaccaaacaagtcaagtctcatcaacttgttaaatcactctcaagagtggctaaagagacttcagaatctaccagagttctagaaagtccagatggcaaaagtgaacagagtaacctcgaagaatttcaggaagccataatggctttcctaaaacagaaaattgataacataggaaaggcttttgacaaaaagactgttccgaaggaagaggagttattaaaaagagcagaagctgaaaaattaggaatcataaaggcaaaaatggaggaatatttccaaaaagtggctgaaactgtgactaaaatcttgagaaaatacaaagatacaaaaaaggaagaacaagttggagagaaacctataaaacaaaaaaaggtagtctcatttatgccaggattgcattttcagaagtcaccaattagtgcaaaatctgaaagcagtaccctcctctcatatgagagcacagatccagtaattaacaatttaatacaaatgatcttggctgaaatagaaagtgaaagagatattccaacagtctcaacagtacagaaagaccacaaggagaaggaaaaacaaaggcaggagcaatatttgcaagagggtcaagaacaaatgtctggcatgagtctcaaacagcagttgctgggagaaagaaatctcttgaaggagcactatgagaagataagtgagaattgggaagaaaaaaaggcatggctccagatgaaggagggaaagcaagaacaacagagccagaaacagtggcaggaagaagagatgtggaaggaagagcaaaaacaggcaactccaaagcaggctgagcaagaggaaaagcaaaagcaaagaggacaggaggaagaagagcttccaaagtcaagcctgcagcggctggaagaagggacccaaaaaatgaaaacacaagggttgctcttggaaaaggagaatggacagatgaggcagattcagaaggaagcgaaacatttggggccacacaggagaagggagaaagggaaggaaaagcagaagccagagagagggctagaggacctcgaaaggcagatcaaaacaaaggatcagatgcagatgaaggaaacacaacctaaagagctagaaaaaatggtcatccaaactccaatgacattatctcccaggtggaagagtgtattgaaagatgtacagcggtcatatgaaggaaaagagtttcagaggaatctgaagacattagagaaccttcctgatgaaaaggagcccatatcaatcacacctcccccctccctacaatactccctgcctggagctcttcctatttctggccagcctctcactaaatgcattcatctcacacctcagcaggcccaggaagtggggatcacactcactcctcagcaggcccaggctcaggggatcacgctcacccttcagcaggcccaggaactagggatccctctcacccctcagcaggcccaggccctggagatccttttcacccctcagcaggcgcaggccctggggatccctctcacccctcagcagacccaggttcaagggatcactctcacccctcagcaggaccaggccccggggatctctctcaccactcagcaggctcagaaactagggatccctcttacccctcagcaggcccaggccctggggatccctctcacccctcagcaggctcaggaattggggatccctctcacccctcagcaggcccaggccctgagggtctctctcacccctcagcaggctcaggaattggggatccctctcacccctcagcaggcccaggccctggggatcactctaacccttcagcaggcccagcaattggggatccctctcacccctcagcaggcgcaggctctcggaatcactctcacccctaagcaggttcaggaactggggatccctcttactcctcagcaggcccaggccctggggatcactctcacccctaagcaggctcaggaattggggatccctctcaaccctcagcaggcccagaccctggggatccctctcacccctaagcaggcacaggctctggggatccctttcacccctcagcaggcgcaggccctggggatccctctcacccctcagcaggcgcagactcaggagatcactctcacccctcagcaggcccaggccttggggatgcctctcaccactcagcaggctcaggaactggggatccctctcacccctcagcacgctcaggccttggggatgcctctcaccactcagcaggctcaggaactggggatccctctcacccctcagcaggctcaggccttggggatgcctctcaccactcagcaggctcaggaactggggatccctctcacccctcagcaggctcaggaattggggatccctttcacccctcagcaggcacaggctcaggagatcactctcacccctcagcaggcccaggccctggggatgcctctcaccgctcagcaggctcaggagctggggatcactctcacccctcagcaggctcaggaattggggatccctctcacccctcagcaggcccaggccctggggatccctctcatccctccgcaggctcaggaattggggatccctctcacccctcagcaggcccaggccctggggatccttctcatccctccgcaggctcaggaattggggatccctctcacccctcagcaggcccaggccctggggatccctctgatccctccgcaggctcaggaattggggatccctctcacccctcagcaggtccaggccctggggatccctctcatccctccgcaggctcaggaattggagatccctctcacccctcagcaggcccaggccctggggatccctctcacccctcagcaggcgcaggaactggggatccctctcacccctcagcaggcgcaggaactggggatccctctcacccctcagcaggcgcaggctcaggggatccctctcacccctcagcaggcccaggctctggggatctctctcacccctcagcaggcgcaggctcaggggatcactctcacccctcagcaggcccaggcactgggagtccccatcaccccagtaaatgcctgggtgtcagctgtcactcttacctctgagcaaacccacgctttggagtcccctatgaacttagaacaggctcaagaacagttattgaagttaggggttcctctcaccttagataaagcccataccttgggatcgcccctcacccttaagcaagtccagtggtcccatagaccatttcagaaatcgaaggcttctctccccactgggcaatccatcatatcaagattgtctccaagtcttaggctgtccctggcatcatcagctcctactgctgagaagtcctctatattcggggtctcttctactcctttgcagatatcaagggttcccctcaaccaaggcccctttgcccctgggaagcccctagaaatggggattctttctgagcctgggaagcttggggcaccacagactcttcgttcctctggacagaccctggtatacggaggtcaatccacttctgcgcagttcccggcaccacaggcccctccctcccctgggcagctcccaatatctcgggcccctcccactccagggcagccctttatagctggagttccacccacttctggacagattccaagtctctgggctcctctttctcctgggcagcccttagttcctgaagcctcttccatccctggggacctcctggaatctggacccttaaccttctctgagcagctccaggaattccagcctcctgccactgctgagcaatctccctatctgcaggctccttctacccctgggcagcatctggcaacatggacccttcctgggcgagcttcttcattatggatccctcccacctctagacatcctcccacactatggccgtccccagcccctggaaagccccagaaaagttggtccccttctgttgctaagaaaagattggcaattatttcttctctgaaatctaaatcagtattgatccatcctagtgctccagatttcaaggtagctcaagttcctttcaccactaagaagttccaaatgtcggaggtctctgacacttccgaagaaacccagatacttcgagacacttttgctatagaatcatttagaacatttcagtcccatttcaccaaatataggacaccagtataccaaaccccttacactgatgaaagggcccttctcactctcatgaagccaacaacatcaccatcttctctcactactctactcagaacatcacagatttcacctttggaatggtaccagaaatcccgattccctcctatagacaagccctggatactgagttcagtttcagataccaagaaacccaaagtaatggtgcccccttcctctcctcaagaacttgaagaaaagaggtattttgttgatgtggaggctcagaagaagaacctgatactattaaatcaggctataaaaacttgtggactcccttcacagctacacacaatggctaggactctcataattgagatacttcatatggacacagttcagttgggatacttattccgcaagtacattgcctataggctgatccagcatgccaggaacaacataatgaaacgactaaaagccatccaaaatactgggaaaggctatgaggccaggaacctccacatgatgctgagcagacttgatgactacgggaaaaaggtgatgcaggtctggactgagaagcagaagtctctagggcagaaacggaatcagtgcctgaagaaaatgatacacgtattcaaccagctcaaaaagatacatgaattgaatcttagtcaacctatccccttaatcatcgaagaaaagcagatacctgcctctaccacatttgttcaaaagccattcttaaaattactaatggaagaggacagaacctctgacatatgcaagaaatttaggcaacaagaggaccagacagaggccatctggaatgttgatctgtccacttcaagctacccaatagcagagaagacatctatgcattcactctgggcccagctgggtgggtacccagatattcccaggctgcttcagttagaagtgcagtctaccttccgaaaatctcttgcatccctccaatcacgttcttcaggttgaacatcttcatttctgggctactactatgaccactcaagaaagagtatcttctgctctacattactggaaacacaaaggttcaacaaccctggggtaggctgagtcatgaaagggacatcattatgggcccctaacatgatggcaaagtggcacagtctgcctttcccagtctaaacccgaagatgcctcagaaggaagaaataaatgagtataatgaaggaaactaaaaaccagcagacacccctgaagaattagaaggtggttatgattggtaatgaagggaaatcataatgttaccagtagagggttgtgactgcaagttgtccaggttcttggcattttgaacaaagaattgggcaaaatgcccagcaaagcaaataaagaatgaagcaacagaagaacgaaagcagggatttattgagaacaaaagtacactccacagtgcaggagtggcccgagcagctgctcaaggacctggatacagaatcttcttgggtccaaataccctctagaagttgcctattgatcacttcatgctcacctcatgtaaataaagcggtagcctgcaatcagtctgattggttgcagcaaaaagcaaccaatcagaggctagggtgaagttacaaacttatactcctatttttttttttttttgagacagagtttcgctcttgttgcccaggctggagtgccatggtgcgatctcggttcttgaaattctgcctcccaggttcaagcgattctcctgcctcagcttcccgagtagctgggtttacaggcatgcaccaccatgcctggctaattttgtatttttagtagagacagtgtttctccatgttggtcaggcggtttcgaactcccagcctgaggtgatccacctgccttgccgtcccaaagtgctgggattacaggcatgagccaccacgccaggtctcaaagttacacttttatgcaaacaaagactggcctgcaatcagtctgattcattgagggcagccaatttcccatctgcctc

SEQ ID NO: 132306 - DNA, 2116 bp, Homo sapiens
  Payload ID: 5837
  Gene Symbol: FAM186A
  Gene Name: family with sequence similarity 186, member A
  ENST ID: ENST00000543096
  CDS Start-End: 22-1101
ttcaccactaagaagttccaaatgtcggaggtctctgacacttccgaagaaacccagatacttcgagacacttttgctatagaatcatttagaacatttcagtcccatttcaccaaatataggacaccagtataccaaaccccttacactgatgaaagggcccttctcactctcatgaagccaacaacatcaccatcttctctcactactctactcagaacatcacagatttcacctttggaatggtaccagaaatcccgattccctcctatagacaagccctggatactgagttcagtttcagataccaagaaacccaaagtaatggtgcccccttcctctcctcaagaacttgaagaaaagaggtattttgttgatgtggaggctcagaagaagaacctgatactattaaatcaggctataaaaacttgtggactcccttcacagctacacacaatggctaggactctcataattgagatacttcatatggacacagttcagttgggatacttattccgcaagtacattgcctataggctgatccagcatgccaggaacaacataatgaaacgactaaaagccatccaaaatactgggaaaggctatgaggccaggaacctccacatgatgctgagcagacttgatgactacgggaaaaaggtgatgcaggtctggactgagaagcagaagtctctagggcagaaacggaatcagtgcctgaagaaaatgatacacgtattcaaccagctcaaaaagatacatgaattgaatcttagtcaacctatccccttaatcatcgaagaaaagcagatacctgcctctaccacatttgttcaaaagccattcttaaaattactaatggaagaggacagaacctctgacatatgcaagaaatttaggcaacaagaggaccagacagaggccatctggaatgttgatctgtccacttcaagctacccaatagcagagaagacatctatgcattcactctgggcccagctgggtgggtacccagatattcccaggctgcttcagttagaagtgcagtctaccttccgaaaatctcttgcatccctccaatcacgttcttcaggttgaacatcttcatttctgggctactactatgaccactcaagaaagagtatcttctgctctacattactggaaacacaaaggttcaacaaccctggggtaggctgagtcatgaaagggacatcattatgggcccctaacatgatggcaaagtggcacagtctgcctttcccagtctaaacccgaagatgcctcagaaggaagaaataaatgagtataatgaaggaaactaaaaaccagcagacacccctgaagaattagaaggtggttatgattggtaatgaagggaaatcataatgttaccagtagagggttgtgactgcaagttgtccaggttcttggcattttgaacaaagaattgggcaaaatgcccagcaaagcaaataaagaatgaagcaacagaagaacgaaagcagggatttattgagaacaaaagtacactccacagtgcaggagtggcccgagcagctgctcaaggacctggatacagaatcttcttgggtccaaataccctctagaagttgcctattgatcacttcatgctcacctcatgtaaataaagcggtagcctgcaatcagtctgattggttgcagcaaaaagcaaccaatcagaggctagggtgaagttacaaacttatactcctatttttttttttttttgagacagagtttcgctcttgttgcccaggctggagtgccatggtgcgatctcggttcttgaaattctgcctcccaggttcaagcgattctcctgcctcagcttcccgagtagctgggtttacaggcatgcaccaccatgcctggctaattttgtatttttagtagagacagtgtttctccatgttggtcaggcggtttcgaactcccagcctgaggtgatccacctgccttgccgtcccaaagtgctgggattacaggcatgagccaccacgccaggtctcaaagttacacttttatgcaaacaaagactggcctgcaatcagtctgattcattgagggcagccaatttcccatctgcctc

SEQ ID NO: 132307 - DNA, 2944 bp, Homo sapiens
  Payload ID: 5838
  Gene Symbol: FAM186B
  Gene Name: family with sequence similarity 186, member B
  Uniprot ID: Q8IYM0
  ENST ID: ENST00000257894
  CDS Start-End: 163-2844
agttggaacctggtgtttggcagttaccagaggagctgtgcctgggcagagggtacccaggagacaccctggtgcccttaacctccaaagcaggcaacattgtgtgtccaggcctgtggaccagaaacacaggatgttttgtgactgacagagtgatccaaaatggagaaggatgaccccccacagttggtgactcccacatcagtgaaagccatcatcctgaggattgaggctgcccagctaactcgggctcaagaggatatttctacccagctctcagacattttggacaatgtcaattgtgtcatcaaccgcttccaggaagaattaggatatgatttaaaagaaaatgccaaatctcagcagagagatccaaagggcaagaagagattcatcttgctggaaaaaattgcctccttctccaaagatgctatgatgaaggagaagcacctgtatgacattctccgctggctgggtgactggggtgacactctgacctatgagattgggcccaggaagagtgaagaggaagcagcagctctggacgaatggattgaagtgacggagaaagtgttaccgctgtccctcattgccaccaaaagaggcatcgagtcactcactgccctttgctccactctcattgaaggacaaaagaaaaggtcacaagtgtccaaacgcaccttctggcagggctggcagggaagaagcccacagacatctccatcccatcctcagccactaagcccagaacagatgctccaggaccagcataccatgaacacgaaggcctcggaggtgacgtccatgctgcaggagctcctggactctaccatgttcagcaagggggaggtcagggccatcaggtacatggccactgtggtggagaacctcaacaaggccttgatcctccaacacaaggagaacaggagcctggagaccaaatacaggcacctgcaaatgcaggcgaccaaagagctcagcagccagaggctgcacttccagcagttcatggaggtccttgagagcaggagggatgctctgctgaagcaggtagagatcttagggggaaggtaccatgaccttctcctgatgaagcaggccttggagttccagctgaagaaggctcagaatgctacaggtcaggcagaagacctggctgaggtttctgttgactccccaggtccctctgagagagagaccctcccaaggaaagaaacagtcatggaggaaagccaacaggaaccgatgaaggaggagcagttgttctcgccacttcccccaagtcccatggccatgatacgggacagtggtgctatagctgcagggcaccagccactttccaccatgactgtgcgctcgagggtcgcagatgtgttcggcagcaaggacactgagagccttgagcctgtgcttttacccttagtagatcgcaggtttcctaagaaatgggaaagaccggtggcagaaagcttaggccacaaagacaaagaccaggaggactacttccagaagggaggactccaaattaagttccactgtagcaagcagctgtctctagagagctccaggcaggtgacctctgagagccaagaggagccctgggaggaggaattcggccgggagatgcggaggcagctgtggctggaggaggaggagatgtggcagcagcggcagaagaagtgggccctgctggagcaggagcatcaggagaagctgcggcagtggaatctggaagacctggccagggagcaacagcggagatgggtccagctagaaaaggagcaggagagcccacggagagagccagagcagctaggggaggatgtggagaggaggatcttcacacccaccagtcgatggagggacttggagaaggcagagctatcattagtgcctgccccaagccggacccaatctgctcaccaaagcaggaggccacacttgcccatgtctcctagtacccagcagcctgccctgggaaagcagagacctatgagttcagtggagtttacctacagaccacggacccgccgagttcccacaaagcccaagaaatctgcctcctttcctgtcactgggacatccatccgaaggctgacctggccctctttgcagatatcccctgcaaatattaagaagaaggtgtaccacatggacatggaggcccagaggaagaacctgcagctcctgagtgaggagtctgagttgaggctgccccactacctgcgcagcaaagcactggagctcaccaccaccaccatggagctgggcgcgctcaggctgcagtacctgtgccataagtacatcttctatagacgcctccagagcctccggcaagaagcgatcaaccatgtacaaatcatgaaagaaacggaggcttcctacaaggcccagaacctctacatcttcctggaaaacattgaccgcctgcagagtctcaggctgcaggcctggacggacaagcagaaggggctggaggagaagcaccgagagtgcctgagcagcatggtgaccatgttccccaagctccagctggagtggaacgttcacctgaacatccctgaggtcacctcgccaaagccaaagaaatgcaagttgcctgcagcctcaccccggcacatccgccccagtggccccacctacaagcagccctttctgtctaggcaccgggcatgtgtgcccctgcagatggcccgccaacaggggaagcagatggaggctgtctggaagaccgaggtggcctcctccagttacgcaatagaaaaaaagacccctgccagccttccccgggaccagctgaggggacacccagatattccccggctgttgacactggacgtgtagtcctcctgccacaaaagcctgaacttcctgaaggcccagtaaggtgcgaggctgatggtcaatgtggattctccccaataaatctctctccaggctttaa

SEQ ID NO: 132308 - DNA, 3088 bp, Homo sapiens
  Payload ID: 5838
  Gene Symbol: FAM186B
  Gene Name: family with sequence similarity 186, member B
  ENST ID: ENST00000533372
  CDS Start-End: 151-324
gtgtttggcagttaccagaggagctgtgcctgggcagagggtacccaggagacaccctggtgcccttaacctccaaagcaggcaacattgtgtgtccaggcctgtggaccagaaacacaggatgttttgtgactgacagagtgatccaaaatggagaaggatgaccccccacagttggtgactcccacatcagtgaaagccatcatcctgaggattgaggctgcccagctaactcgggctcaagaggtagcccctgagatgaaggaatcactcttacattgggatctgatgcggagactgggggctgatcccaggtttgagtgagattccagctctgggtcctcagaggccctgggatattcagcaacctgggtctgcagacagattagtataaattatctctctcctaaacttggcatatacagggatatttctacccagctctcagacattttggacaatgtcaattgtgtcatcaaccgcttccaggaagaattaggatatgatttaaaagaaaatgccaaatctcagcagagagatccaaagggcaagaagagattcatcttgctggaaaaaattgcctccttctccaaagatgctatgatgaaggagaagcacctgtatgacattctccgctggctgggtgactggggtgacactctgacctatgagattgggcccaggaagagtgaagaggaagcagcagctctggacgaatggattgaagtgacggagaaagtgttaccgctgtccctcattgccaccaaaagaggcatcgagtcactcactgccctttgctccactctcattgaaggacaaaagaaaaggtcacaagtgtccaaacgcaccttctggcagggctggcagggaagaagcccacagacatctccatcccatcctcagccactaagcccagaacagatgctccaggaccagcataccatgaacacgaaggcctcggaggtgacgtccatgctgcaggagctcctggactctaccatgttcagcaagggggaggtcagggccatcaggtacatggccactgtggtggagaacctcaacaaggccttgatcctccaacacaaggagaacaggagcctggagaccaaatacaggcacctgcaaatgcaggcgaccaaagagctcagcagccagaggctgcacttccagcagttcatggaggtccttgagagcaggagggatgctctgctgaagcaggtagagatcttagggggaaggtaccatgaccttctcctgatgaagcaggccttggagttccagctgaagaaggctcagaatgctacaggtcaggcagaagacctggctgaggtttctgttgactccccaggtccctctgagagagagaccctcccaaggaaagaaacagtcatggaggaaagccaacaggaaccgatgaaggaggagcagttgttctcgccacttcccccaagtcccatggccatgatacgggacagtggtgctatagctgcagggcaccagccactttccaccatgactgtgcgctcgagggtcgcagatgtgttcggcagcaaggacactgagagccttgagcctgtgcttttacccttagtagatcgcaggtttcctaagaaatgggaaagaccggtggcagaaagcttaggccacaaagacaaagaccaggaggactacttccagaagggaggactccaaattaagttccactgtagcaagcagctgtctctagagagctccaggcaggtgacctctgagagccaagaggagccctgggaggaggaattcggccgggagatgcggaggcagctgtggctggaggaggaggagatgtggcagcagcggcagaagaagtgggccctgctggagcaggagcatcaggagaagctgcggcagtggaatctggaagacctggccagggagcaacagcggagatgggtccagctagaaaaggagcaggagagcccacggagagagccagagcagctaggggaggatgtggagaggaggatcttcacacccaccagtcgatggagggacttggagaaggcagagctatcattagtgcctgccccaagccggacccaatctgctcaccaaagcaggaggccacacttgcccatgtctcctagtacccagcagcctgccctgggaaagcagagacctatgagttcagtggagtttacctacagaccacggacccgccgagttcccacaaagcccaagaaatctgcctcctttcctgtcactgggacatccatccgaaggctgacctggccctctttgcagatatcccctgcaaatattaagaagaaggtgtaccacatggacatggaggcccagaggaagaacctgcagctcctgagtgaggagtctgagttgaggctgccccactacctgcgcagcaaagcactggagctcaccaccaccaccatggagctgggcgcgctcaggctgcagtacctgtgccataagtacatcttctatagacgcctccagagcctccggcaagaagcgatcaaccatgtacaaatcatgaaagaaacggaggcttcctacaaggcccagaacctctacatcttcctggaaaacattgaccgcctgcagagtctcaggctgcaggcctggacggacaagcagaaggggctggaggagaagcaccgagagtgcctgagcagcatggtgaccatgttccccaagctccagctggagtggaacgttcacctgaacatccctgaggtcacctcgccaaagccaaagaaatgcaagttgcctgcagcctcaccccggcacatccgccccagtggccccacctacaagcagccctttctgtctaggcaccgggcatgtgtgcccctgcagatggcccggctcttggcactgtgcttaaggggcctggtggctgaacttgctctggtgatggaggactttgaccttctgcacgtcctctagcgagctctctggcaagcatgcagagtgtctgacattcttctcctgctttggtaacaatttcatcttcttaaaggcaaagaaagcctgcacgggccaagctgtgaagccaagagggttggaagacaaatatatatgtgtgtgt

SEQ ID NO: 132309 - DNA, 1901 bp, Homo sapiens
  Payload ID: 5838
  Gene Symbol: FAM186B
  Gene Name: family with sequence similarity 186, member B
  ENST ID: ENST00000532262
  CDS Start-End: 1-1521
gggcaccagccactttccaccatgactgtgcgctcgagggtcgcagatgtgttcggcagcaaggacactgagagccttgagcctgtgcttttacccttagtagatcgcaggtttcctaagaaatgggaaagaccggtggcagaaagcttaggccacaaagacaaagaccaggaggactacttccagaagggaggactccaaattaagttccactgtagcaagcagctgtctctagagagctccaggcaggtgacctctgagagccaagaggagccctgggaggaggaattcggccgggagatgcggaggcagctgtggctggaggaggaggagatgtggcagcagcggcagaagaagtgggccctgctggagcaggagcatcaggagaagctgcggcagtggaatctggaagacctggccagggagcaacagcggagatgggtccagctagaaaaggagcaggagagcccacggagagagccagagcagctaggggaggatgtggagaggaggatcttcacacccaccagtcgatggagggacttggagaaggcagagctatcattagtgcctgccccaagccggacccaatctgctcaccaaagcaggaggccacacttgcccatgtctcctagtacccagcagcctgccctgggaaagcagagacctatgagttcagtggagtttacctacagaccacggacccgccgagttcccacaaagcccaagaaatctgcctcctttcctgtcactgggacatccatccgaaggctgacctggccctctttgcagatatcccctgcaaatattaagaagaaggtgtaccacatggacatggaggcccagaggaagaacctgcagctcctgagtgaggagtctgagttgaggctgccccactacctgcgcagcaaagcactggagctcaccaccaccaccatggagctgggcgcgctcaggctgcagtacctgtgccataagtacatcttctatagacgcctccagagcctccggcaagaagcgatcaaccatgtacaaatcatgaaagaaacggaggcttcctacaaggcccagaacctctacatcttcctggaaaacattgaccgcctgcagagtctcaggctgcaggcctggacggacaagcagaaggggctggaggagaagcaccgagagtgcctgagcagcatggtgaccatgttccccaagctccagctggagtggaacgttcacctgaacatccctgaggtcacctcgccaaagccaaagaaatgcaagttgcctgcagcctcaccccggcacatccgccccagtggccccacctacaagcagccctttctgtctaggcaccgggcatgtgtgcccctgcagatggcccgccaacaggggaagcagatggaggctgtctggaagaccgaggtggcctcctccagttacgcaatagaaaaaaagacccctgccagccttccccgggaccagctgaggggacacccagatattccccggctgttgacactggacgtgtagtcctcctgccacaaaagcctgaacttcctgaaggcccagtaagcgcctcagcgaaccaaaggaaggaatgccaggaacctacaaatgaatccgcttagcttgttcaaaaaaagtcaagcgagtcactccctggaacccaaataagccagaaggatcaagacagccccagtctccactgcatccctcagccagtgattctcaaccttctgagggacggaaacccacagagaacttggtcaaaatgcaggttcccagctggtgcttttaaagaaaccctctgggggttgctgagtactcctagaactttgagaaacactgcttccctcctgcagtccccaaactctacattttaataaaatagaggttggtttattttaaaa

SEQ ID NO: 132310 - DNA, 2173 bp, Homo sapiens
  Payload ID: 5838
  Gene Symbol: FAM186B
  Gene Name: family with sequence similarity 186, member B
  ENST ID: ENST00000551047
  CDS Start-End: 142-867
agttaccagaggagctgtgcctgggcagagggtacccaggagacaccctggtgcccttaacctccaaagcaggcaacattgtgtgtccaggcctgtggaccagaaacacaggatgttttgtgactgacagagtgatccaaaatggagaaggatgaccccccacagttggtgactcccacatcagtgaaagccatcatcctgaggattgaggctgcccagctaactcgggctcaagaggatatttctacccagctctcagacattttggacaatgtcaattgtgtcatcaaccgcttccaggaagaattaggatatgatttaaaagaaaatgccaaatctcagcagagagatccaaagggcaagaagagattcatcttgctggaaaaaattgcctccttctccaaagatgctatgatgaaggagaagcacctgtatgacattctccgctggctgggtgactggggtgacactctgacctatgagattgggcccaggaagagtgaagaggaagcagcagctctggacgaatggattgaagtgacggagaaagtgttaccgctgtccctcattgccaccaaaagaggcatcgagtcactcactgccctttgctccactctcattgaaggacaaaagaaaaggtcacaagtgtccaaacgcaccttctggcagggctggcagggaagaagcccacagacatctccatcccatcctcagccactaagcccagaacagatgctccaggaccagcataccatgaacacgaaggcctcggagcgaaccaaaggaaggaatgccaggaacctacaaatgaatccgcttagcttgttcaaaaaaagtcaagcgagtcactccctggaacccaaataagccagaaggatcaagacagccccagtctccactgcatccctcagccagtgattctcaaccttctgagggacggaaacccacagagaacttggtcaaaatgcaggttcccagctggtgcttttaaagaaaccctctgggggttgctgagtactcctagaactttgagaaacactgcttccctcctgcagtccccaaactctacattttaataaaatagaggttggtttattttaaaattctgtctcattgctgaaacccacacctcctcaactcagttttagaaccctctgagtgttgtctgtgtcctttgggagcaaacatgccgagatagctgtgattggcacctggcacttagtaggtgtaactcttcatttaatcaaaatatggacagatatgtcactgacatgccagtgatctgcatgaaagctcagaaggtgagaacaaaaggagataccaaatacagaccagagccaggtgtcataaggtgggaggcaaaggtgagcgtgtctctgaggacaaaggtggaagacatggagacatgaggttcaaatatagacggtgtgggctaaggaggccgtctctggcaagcgtctgtcagttcagttaagacactaattcggttagttcaatcagctcacgagcacctacacaccctcctcttgacacacagctgcttgcctggtccctgctgagtctcccccaccctgtccttctccactcaccagcacccttggcctagggaacaggcatacaaataggaaattaccccatcctcagagaacccatgtccagcggttctcttcctcaggaatggcgcccatccttgcttccagcctaaggctgagactccagaaagctgaggaggatgtggggtgtgaacagctggttctgtggatgatgccaggagtaggatttgttttctgagtcgcagcttaagatatcgcgaggatgcctagtgtgggaggaaggggagttggcatcatgatgcaggacacatgcacagcacagctgtgctggccctgggctgtttccagcctctcgggtcccaggctctttcttttctggaggcctcaccccaatgatacttaacatcttaaaatgccctcacactaaatgtatcgctctaaataattagaaagcatttttataaccttgcttcagaaattaactggctatgagtaagttatttaatgtgtacttagctgtgagtgacatctcagcaatcagaatgcacagagaagaaattgaacaagttttataaatgtaatgagactattttgaatattaaatttgacagtgaatgaaa

SEQ ID NO: 132311 - DNA, 621 bp, Homo sapiens
  Payload ID: 5838
  Gene Symbol: FAM186B
  Gene Name: family with sequence similarity 186, member B
  ENST ID: ENST00000548841
  CDS Start-End: 1-353
agtgcctgagcagcatggtgaccatgttccccaagctccagctggagtggaacgttcacctgaacatccctgaggtcacctcgccaaagccaaagaaatgcaagttgcctgcagcctcaccccggcacatccgccccagtggccccacctacaagcagccctttctgtctaggcaccgggcatgtgtgcccctgcagatggcccgccaacaggggaagcagatggaggctgtctggaagaccgaggtggcctcctccagttacgcaatagaaaaaaagacccctgccagccttccccgggaccagctgaggggacacccagatattccccggctgttgacactggacgtgtagtcctcctgccacaaaagcctgaacttcctgaaggcccagtaaggctcttggcactgtgcttaaggggcctggtggctgaacttgctctggtgatggaggactttgaccttctgcacgtcctctagcgagctctctggcaagcatgcagagtgtctgacattcttctcctgctttggtaacaatttcatcttcttaaaggcaaagaaagcctgcacgggccaagctgtgaagccaagagggttggaagacaaatatatatgtgtgtgta

SEQ ID NO: 132312 - DNA, 3397 bp, Homo sapiens; identical to SEQ ID NO: 120662
  Payload ID: 5839
  Gene Symbol: FAM187A
  Gene Name: family with sequence similarity 187, member A
  Uniprot ID: A6NFU0
  ENST ID: ENST00000331733
  CDS Start-End: 1837-3078

SEQ ID NO: 132313 - DNA, 1748 bp, Homo sapiens
  Payload ID: 5839
  Gene Symbol: FAM187A
  Gene Name: family with sequence similarity 187, member A
  ENST ID: ENST00000412523
  CDS Start-End: 158-886
agttgctaggcaaccacagctgcgggcgtggtctgcgcggggttgccctcctgttctggtttatcaggggatccccaaagaaagcaaggggaccaaggccgggactgctggggtgaaggtccgggaggctgagtaaggggacggaagggcacaggccatggaaaggaatgacatcatcaacttcaaggctttggagaaagagctgcaggctgcactcactgctgatgagaagtacaaacgggagaatgctgccaagttacgggcagtggaacagagggtggcttcctatgaggagttcaggggtattgtccttgcatcacatctgaagccactggagcggaaggataagatgggaggaaagagaactgtgccctggaactgtcacactattcagggaaggaccttccaggatgtggccactgaaatctccccggagaaagcccccctccagcccgagacgtctgctgacttctatcgtgattggcgacgacacttgccaagtgggccagagcgctaccaggctctactgcagcttgggggtccaaggctcggctgcctcttccagacagatgtgggatttggacttcttggggagctgctggtggcactggctgatcacgtggggccggctgaccgggcagcggtgctggggatcctatgcagcctggcgagcactgggcgcttcaccctgaacctaagcctgctgagccgggcagagagagagagctgcaagggcttgtttcagaagctgcaagccatgggcaaccccagatccgtgaaggaggggctcagctgggaggagcagggtctggaggagcagtctggtgggctccaggaggaggagaggctcctgcaggagctgctggagctgtaccaggttgactgatgcggcaagctaccctcagaggtcccagtggtcactggaggcagttttttggttgttgtcttgggggttctgcaggaccataataagaaacccacacctggttcccttctcaacttggaattttcagagcaaaaacaggaatcaagtcttccccacttctccagtccctcagtgtctcgctgttttgaactgtgtgtatccatggacagtcaagagctcaggaagttgagagcggttttgtttcccacccttagagtctgccaagcctctagcccactggccttgagagatgagtgtgtgcccaaccaaatgctggctataccagttacagcctccactcataaaagggaaaaagcaaaatctttatggtaaacaaacactgatctccacagctcttaacaagaatgtttatagccccaaaccaatgaatggacatgtaatcaacaaatgatcaaatactacatcatttgaggtgttgaattttcccctagagactcagttcttgtgcaggttgggcctgggaaagtcccaagccatcagctcaggtccagccagcctcccggatggccagatatgcaggagggtgggtttccttcatcccccaggttgatgaaagacttttccaccaggctggcagggcagggcctggagcactgaggcagagatctccctgcccgagcacctcggcccgcccttctcattccggtttcctttgacccattcttgggtgagcgccagtgttctagaaaggggagtaaaggccaggttctagaatggctttccccccccaccctgagatcaggtctggaatgttagaagggcatcttgtacatccactgggaataaattgccttgcacttgg

SEQ ID NO: 132314 - DNA, 1184 bp, Homo sapiens
  Payload ID: 5840
  Gene Symbol: FAM187B
  Gene Name: family with sequence similarity 187, member B
  Uniprot ID: Q17R55
  ENST ID: ENST00000324675
  CDS Start-End: 50-1159
tcacaatgttcggggtggcaccagcccactgccacagccccagtccaccatgccacccatgctgtggctgctgctccactttgctgccccggcactggggttctacttttccatcagctgccccagtggtaagcagtgccaacaggccctactctcaggcaatgatattctcctgtattgcaactcctcgggggcgcactggtactatttattcacacaaggcaagaagggcaggctcaccagcctcaccaatatttccaatatggaaataatgcccgagggcagccttctcattaaagatccattgccctcccagacgggcctctaccactgctggaacaagaatggccgccaagtggtgcagtatgaaattgactttcaggatgtcaccaccctgcatataacacacaaggacctgggtcagaggcccctgcagaacgagaccctgcatttgggcagcaaacagctcatttttacctggtgggagccctggcaggactgcaaccgctgtgaggagccgggcgagtgtaaacgcctggggtaccgctacattgaggagcctctggaggaagccatgccctgctggctctatctgggagaggtgctggtgtggtctagccgcttgcggcctgagctgcaggtggaagcctgccacgtccagtgcaccaataacacacagttaagggtggattacgtcatttttgacaacttcaggctcgatgagaagacagaatttgtgtggctcgactgtcccttaggatccatgtacaggcccgtcaactggcgtgccaacgacacccccctgacgtgggagagccagctctccggccaggacttcaccacctttctggacccctccaccggcggcaggcagctgcaggttttccagccggccgtctacaagtgcttcgtgcagcaggagctcgtggcccagttcaaacccgccgccagtctggagacgctggaggctcagtggagagagaacgatgcccagtggcgggaggcaaggaaggccctgcggggcagggcggactccgtgctcaaggggctgaagctggtgctgctcgtggtcaccgtcctggccctgctgggggcgctgctcaagtgcatccacccttccccgggcaggagaagcacacaggtgctggtggtgaaataaagcgagcccccggtgcacaagcgga

SEQ ID NO: 132315 - DNA, 2381 bp, Homo sapiens
  Payload ID: 5841
  Gene Symbol: FAM188A
  Gene Name: family with sequence similarity 188, member A
  Uniprot ID: Q9H8M7
  ENST ID: ENST00000277632
  CDS Start-End: 222-1559
aagtggcaccagcacttccggtacggaaaactcgctgctgccccaacctggcttgacaggcttggtctctgcaagtggctctcagccccttcttctttcctgcctcaccttccaattcgtttgccgccgccgtcccgcagctgctgtttccggagttgccccttccccatgttccggggcaggagtccgcaaagcgaagatccgcccgccggttcctcatcatgtccgaactgactaaagagctgatggagctggtgtggggcaccaagagcagccccggtctctcggacaccattttctgccgctggacgcaagggtttgtgtttagtgaatcagagggatctgcattagaacagtttgaaggtggcccctgtgctgttattgcacctgttcaggcatttcttttgaagaagctcctgttttcttcggagaagtcttcttggcgggattgttcagaggaagagcagaaggaactcctttgtcataccttgtgtgatattttagaaagtgcttgttgtgaccactctggatcatactgcttggtttcatggttaagaggaaagacaactgaggaaactgctagtatttctgggagtcctgcagagtctagttgccaagtggaacattcttctgccttggctgtcgaagagcttggctttgagcgatttcatgcattaattcaaaaaagatcgttcagaagtttaccagaattaaaagatgctgtcttggaccagtattcaatgtggggaaataaatttggagtattgctttttctgtattctgtattactgacaaagggcattgaaaacataaaaaacgaaattgaagatgcaagtgaacccttgatagatcctgtatatggacatggcagccaaagtttaattaatctcctgctgacgggacatgctgtttctaatgtatgggatggtgatagagagtgctcaggaatgaaacttcttggtatacatgaacaagcagcagtaggatttttaacactaatggaagctttaagatactgtaaggttggttcttacttgaaatctccaaaattccctatttggattgttggcagtgagactcacctcaccgtattttttgccaaggatatggctttagttgcccctgaagctccttcagaacaagccagaagagtttttcaaacctacgacccagaagataatggattcatacccgattcacttctggaagatgtgatgaaagcattggaccttgtttcagatcctgaatatataaatctcatgaagaataaattagatccagaaggattaggaatcatattattgggcccatttcttcaagaattttttcctgatcagggctccagtggtccagaatcttttactgtctaccactacaatggattgaagcagtcaaattataatgaaaaggtcatgtacgtagaagggactgcagttgtgatgggttttgaagatcccatgctacagacagatgacactcctattaaacgctgtctgcaaaccaaatggccatacattgagttactctggaccacagatcgctctccttcactaaattaatttgtctaagtatttataaggaagatcttaataacagatgttgaaagaaggagtcaagactggcaattggctggattaagctaaacactggtatcactgattaactgtaaataacaattaaaaacacattttcagtgtttatgatatgtttaaattatttgtcctaaagctttatgttaaagattatcctattttaccccttcgtgtgaaatttactagcaaaattaagctttcatcaaagttcatcacttttgcattcagatacttggtcatttacttaccaaattacaaacgcaatactacagcatttgtatattaagtatcacagttactattgataaactacttttgggttttatttcattgaggcactttttttattgtttgaatgattccggcttgtaatatatcagcctctacaatgaaatgcagaagagttcatttttctaagatctgtttttcattagaaatattgacaaataacacattgtcaacctggatcctttgacaatttacttaactctggcatgttcacaaaaagtagaaactctaagagaccattaccatttattcacagatgtataggggatgtattctaaaaactgacagaaaagagaatctgatagtcaacactgttaacttttactgtgtaattgccaaatacacttttccaaatttgtcccaacagccctgtaagccagctttcttctatatttataaacacgataaatgcatgagaagatctgttattacattagtatattacgttatttattatgatcctagttgatggcctaaataaacacctttttctttaactgt

SEQ ID NO: 132316 - DNA, 2452 bp, Homo sapiens
  Payload ID: 5841
  Gene Symbol: FAM188A
  Gene Name: family with sequence similarity 188, member A
  ENST ID: ENST00000378036
  CDS Start-End: 1178-1630
ctctgctgttcccaaaccatccttcctactttactggctcaacattgccacattagcacatctaactcatccctcccatcataggacaaaaatactagtttctctgtccatggatacaaaagagtacctattttccacttccctcctagtgataagaataaattccacagggccagggtggtggttgaagcaggggctgctggctgattaggaaagaatttttggcctgactgccacaaacagccacttggaattccccaattataggcagtctgtaagaaaaaggaaaatgcagcaaattgtattgctaagattcgtcatttttaagttaaagtttctgtcttcatatgagagtggaattgagtggtgtgaacgtgttgggtttcataagtctattctgtttgtttagtattaaactttttttttctcagtcacacacacacaatcgtgttctcaagtttttggtatagtaatgttcacagattatgtaaccttgagagcagagtacaaatacagctttttatacattttaaagagactgttcatactgtgaaactttgaacctaccttctatcatgaagagtcaaataacaggacacttacatacttaaatggtttaaattgtaatttttcttgattatttgggagcaaagatgttctttccctttgattattcataaatctactcatttgataaactataattattttccttataaagttattatcgtcaagtttatagttttagggtttgaggtttcatgctgaaattctaagaagtggtcattttatctaggaactttagcaaaacctgagaatgactcttagggctaaatagttatctccagctgtgttaaatctatattgttgttgttttaatgtcaaagcacaatataagctcagtactgacagtcttctaacactcatttttacattcagcatttgatctctatgggtgaagtgctcgggcacaatacattatttcagttaaatacaaattggacactttatgcttcagatatttatgggcaaataagaggcagtataaatttttaatttgtttatttgttttattttgctacatttgttctaggttggttcttacttgaaatctccaaaattccctatttggattgttggcagtgagactcacctcaccgtattttttgccaaggatatggctttagttgcccctgaagctccttcagaacaagccagaagagtttttcaaacctacgacccagaagataatggattcatacccgattcacttctggaagatgtgatgaaagcattggaccttgtttcagatcctgaatatataaatctcatgaagaataaattagatccagaaggattaggaatcatattattgggcccatttcttcaagaattttttcctgatcagggctccagtggtccagaatcttttactgtctaccactacaatggattgaagcagtcaaattataatgaaaaggtcatgtacgtagaagggactgcagttgtgatgggttttgaagatcccatgctacagacagatgacactcctattaaacgctgtctgcaaaccaaatggccatacattgagttactctggaccacagatcgctctccttcactaaattaatttgtctaagtatttataaggaagatcttaataacagatgttgaaagaaggagtcaagactggcaattggctggattaagctaaacactggtatcactgattaactgtaaataacaattaaaaacacattttcagtgtttatgatatgtttaaattatttgtcctaaagctttatgttaaagattatcctattttaccccttcgtgtgaaatttactagcaaaattaagctttcatcaaagttcatcacttttgcattcagatacttggtcatttacttaccaaattacaaacgcaatactacagcatttgtatattaagtatcacagttactattgataaactacttttgggttttatttcattgaggcactttttttattgtttgaatgattccggcttgtaatatatcagcctctacaatgaaatgcagaagagttcatttttctaagatctgtttttcattagaaatattgacaaataacacattgtcaacctggatcctttgacaatttacttaactctggcatgttcacaaaaagtagaaactctaagagaccattaccatttattcacagatgtataggggatgtattctaaaaactgacagaaaagagaatctgatagtcaacactgttaacttttactgtgtaattgccaaatacacttttccaaatttgtcccaacagccctgtaagccagctttcttctatatttataaacacgataaatgcatgagaagatctgttattacattagtatattacgttatttattatgatcctagttgatggcctaaataaacacctttttctttaactgt

SEQ ID NO: 132317 - DNA, 967 bp, Homo sapiens
  Payload ID: 5841
  Gene Symbol: FAM188A
  Gene Name: family with sequence similarity 188, member A
  ENST ID: ENST00000418767
  CDS Start-End: 1-549
ttaccagaattaaaagatgctgtcttggaccagtattcaatgtggggaaataaatttggagtattgctttttctgtattctgtattactgacaaagggcattgaaaacataaaaaacgaaattgaagatgcaagtgaacccttgatagatcctgtatatggacatggcagccaaagtttaattaatctcctgctgacgggacatgctgtttctaatgtatgggatggtgatagagagtgctcaggaatgaaacttcttggtatacatgaacaagcagcagtaggatttttaacactaatggaagctttaagatactgtaaggttggttcttacttgaaatctccaaaattccctatttggattgttggcagtgagactcacctcaccgtattttttgccaaggatatggctttagttgcccctgaagctccttcagaacaagccagaagagtttttcaaacctacgacccagaagataatggattcatacccgattcacttctggaagatgtgatgaaagcattggaccttgtttcagatcctgaatagtaagctaaataggaagtgttatttagccaactcaaaaagattcgattaagtttaagacatattgtacattttttgcctttttaaaaatctatatctgcatatatgaagcatagcaatctatgtaaggcaaagattaagaaatcgaactaatccaatattatagcagacttgacatacttaaattgagtttcctttcccacccagcaattactgtcctgctttttaaaaaatgctaaaagtgtctttctataaactttaaaaagtttctctgcaaacacttccccacgtcttaaaattttatgtgacattagtatcttcagtaaagtaatgacggttctgtgtagatggtgctagttgccctgcttaaataaccagcaggcctctgactttccctcttaaataaagatgatcaaagata

SEQ ID NO: 132318 - DNA, 618 bp, Homo sapiens
  Payload ID: 5841
  Gene Symbol: FAM188A
  Gene Name: family with sequence similarity 188, member A
  ENST ID: ENST00000436829
  CDS Start-End: 125-618
ctgccttggctgtcgaagagcttggctttgagcgatttcatgcattaattcaaaggccactctattctttaaataactgtatattattgaagaatttactgatgccagacagttcacctaagagatgaagaggttccctgccaaaaaaagatcgttcagaagtttaccagaattaaaagatgctgtcttggaccagtattcaatgtggggaaataaatttggagtattgctttttctgtattctgtattactgacaaagggcattgaaaacataaaaaacgaaattgaagatgcaagtgaacccttgatagatcctgtatatggacatggcagccaaagtttaattaatctcctgctgacgggacatgctgtttctaatgtatgggatggtgatagagagtgctcaggaatgaaacttcttggtatacatgaacaagcagcagtaggatttttaacactaatggaagctttaagatactgtaaggttggttcttacttgaaatctccaaaattccctatttggattgttggcagtgagactcacctcaccgtattttttgccaaggatatggctttagttgcccctgaagctccttcagaacaagccagaagagtttt

SEQ ID NO: 132319 - DNA, 2733 bp, Homo sapiens
  Payload ID: 5842
  Gene Symbol: FAM188B
  Gene Name: family with sequence similarity 188, member B
  Uniprot ID: Q4G0A6
  ENST ID: ENST00000265299
  CDS Start-End: 78-2351
atactgcgccggacagacccagttgcctggtgctgcggcccggcgtgggcctcgtgggcagagccagagccagagccatggacagcctcttcgtggaggaggtggccgcctccttggtcagggagttcctcagcagaaagggcttaaagaagacatgtgtgaccatggaccaggaacgcccacgctctgacctcagcataaacaacagaaatgatcttcgaaaggttttgcatcttgaatttctctataaggagaacaaggcaaaggaaaatcctctaaaaacaagccttgaactcatcaccagatactttctggatcactttggaaatacggctaacaatttcactcaagataccccaatccctgcactctcagttccaaagaaaaataacaaagtgccatcaagatgctcagagactacactggtaaatatatatgacctttcagatgaagatgcaggatggagaacatcattgtcagaaacaagcaaagccagacatgacaatcttgatggagatgtacttggtaattttgtatcatctaaaaggcccccgcacaaaagtaagcccatgcagacggtcccgggtgaaactcctgtgttgacttctgcatgggagaagatagacaagcttcactcggagccttccttggatgtgaagaggatgggagagaattccaggccaaagtctggtctgattgtgcgaggcatgatgtctgggcccatcgccagctccccacaggattcttttcacagacactatctgagacggtcctcaccgtcaagcagctccacccaaccccaagaagagagccggaaggtccctgagctctttgtctgcacccaacaggacattctggcttcgagcaacagctccccctccaggacctccctgggtcagcttagtgaactgaccgtagaaaggcagaaaaccactgccagcagccctccccatctgcccagcaaacggctgcccccatgggacagggccaggccgagggatccctccgaggacaccccagcagtggacggcagcacagacacggacaggatgcccttgaagctctacttgcctggtggtaattccaggatgacccaggagaggctggaaagagcgttcaaacggcagggcagccagcccgcacctgtcaggaaaaatcagttgctgccgtctgacaaggtggatggtgagctgggtgccctgcggctcgaggatgtggaggatgagttgataagggaagaggtcatcctgtcgccagtcccatcagtgctcaagttgcagacagcatcaaaaccaattgacctctcagtagcaaaggaaataaagacccttctgtttggttccagcttttgctgtttcaatgaagaatggaaacttcagagtttttcctttagtaacacagcctcattaaaatacggcatagtgcagaacaagggtggtccttgcggagtcctggcagctgtccaaggctgtgtcctacagaaactcctgtttgaaggagatagcaaagccgactgtgctcagggactgcagccttcagatgcccaccggacccgctgcctcgtcctggccctcgcagacattgtgtggcgggcagggggccgagagagagccgttgttgcactggcttcgagaacacagcagttcagtccaacagggaaatacaaagcagatggagtcttagaaacacttacgcttcacagtttgacctgctatgaggacctggtgacttttcttcaacaaagcattcatcagtttgaagtgggcccctatggctgcatcctgctcaccctttctgccatcctgtccaggtctacagagctcatccgccaggactttgatgtccccaccagccacctgattggagcacatggctactgtacacaggaacttgtcaatctgctcctgactgggaaagctgtgtccaacgttttcaacgatgtggttgagctggattctggggatgggaacatcacacttctcagaggcattgctgcacgcagtgatattggcttcttatctctctttgagcattacaacatgtgccaggttggctgcttcctgaagaccccgaggttccccatctgggtggtttgcagtgagagccacttcagcatcctctttagcctgcagccggggctcctgcgtgactggaggactgagaggctctttgacttgtactactacgatggcctggccaaccagcaggagcagatccggctgaccattgacaccacccaaaccatctctgaggacacagacaacgaccttgtcccacccctcgagctctgcatcagaaccaagtggaagggggcatcagtgaactggaacggctcagaccccatcctgtgaccgttggatgtgggtaaaccctgtggtccaccactcatcacctcatcaccgaggatgacagctgaaccccaagcctctggggcaggtctcatgtaccccaacctgggtcagcatgactgcagaagcatccagagcctccctgccccttccatgaagggcccacccaagactgtgctggggacccagtgtgttgctgggtcccctcccagctgagctgtgactgctgagtactggaaggaggttgccagggtctctgctacctttgtctgcatccctcccttgctccctgctgggtggtccctcacccaggcctccaatgtggttggccctggggactcattacttctggtagctggctttctataaaaatgggtcaaaccca

SEQ ID NO: 132320 - DNA, 4705 bp, Homo sapiens
  Payload ID: 5843
  Gene Symbol: FAM189A1
  Gene Name: family with sequence similarity 189, member A1
  Uniprot ID: O60320
  ENST ID: ENST00000261275
  CDS Start-End: 1-1620
atgcctccggccggcggcccccgagcgccgcgtcccgccgcgctgccccgcagcctgtcccgcctgcgcgagtgcccgggccgctcccgcatcgtgctggcgctcggggccacgcagatggcgctcggatgcctcatcgtggcagtcagcttcgccgcgctggcgctcaccacctcggcccgcgtccgccactcctgccccttctgggcaggcttctcggtgctgctgtcgggactcataggtgtcgtctcctggaagaggcctctctcccttgtgataacctttttcatgctgctttctgcagtgtgtgtaatgctgaatttggctggttcaattctctcttgtcagaatgctcagctagtcaactccctagaaggctgccagttgattaagtttgacagtgtggaggtgtgtgtctgctgtgagctgcagcaccagtcgtccggctgcagcaacctcggggagacgctgaagctgaacccgctgcaggagaactgcaacgctgtgaggctgaccttgaaggatctcctcttcagcgtgtgtgccctcaacgtcctgtccactatcgtgtgtgcgctggccacagccatgtgctgtatgcagatggtctcctccgatgtcctgcagatgttccttccgcagaggtcacatcctgccaaccccacctgcgtgactcctcacggcaccgttctccaccagaccctggatttcgacgagttcatccccccactcccgcctccaccctattaccccccagagtacacctgcacaccgtccactgaggcccagaggggcctccacctggactttgctccgtctccattcggcactttgtatgacgtggccatcaatagccccggcctgctctatcctgctgagctcccccctccgtacgaggcggtggtgggccagccccctgccagccaggttacaagtataggtcagcaggtggccgagtccagctccggggacccaaacaccagtgctggcttcagcactccagtaccagctgacagcacaagcctcctggtgtccgagggcactgctacgccaggttccagcccatcccccgatggccctgtgggcgccccagcaccctccgaacctgcccttccccctggccatgtgtctccagaggatcctggcatgggctcacaggtgcagccaggtcccgggcgtgtgtcccgctccaccagcgaccccaccttgtgcacatctagcatggcaggcgatgcctcttcacacaggccgtcgtgtagccaggacctggaagcgggactgtctgaggctgtgcctgggagcgcttccatgtctcgctctgccacggctgcctgtcgggcccagctttcaccagcgggggacccagatacctggaaaactgaccaacggccaacaccagagcccttcccagcgacctccaaagagcggccacgctctttagtggacagcaaggcctatgcggatgccagggttttggtggccaagtttttggaacactcacactgtgccctccccaccgaggcacagcacatggtgggtgccatgcgcttggctgtcaccaacgaggagcgcctcgaggaggaggccgtcttcggcgctgacgttctggaccaggtatgaaggagccacatttctgaccgtggacaccaacgcctggcgccacagatgttcttggcagaagccatcatgcctgacaaagaggccttcaggcccagcttggcggaggataaatgtgggggggacacccaggatgatctgggggcggtgtgggcagggaactgttaccccctctctcgaggggagccgagcagtgtctctttggggattgcatttcctgcctagcccagtaattcggaaagatgactttcacgtccacagtgaactctctggttttatctggcgtgcagcaccttgaactgagcagtgttgcacaaatgtgaatacagcaacaggcgacacttacgtcacctaaagactcaaagtatctccaaaatcagggccttccaaagcaggagtctcccatcccccatttaacttagtgttcagtggacagagggtgacatcgagtcatgaaacattttctcatgtggctcgatggctctatcattaggcgttcatcacgctctggcctatttcctgtgaaaggaaataggtagtgttagcacagatggcagcctgggcccaactttctgtccacagggctattgtgcaaacaaatgtgcagtgcgggcctctgccatagcccggccccccccagggaacaggccggtgttgcgggggttggaggaacccaccatctcctgggccttgagctcggcctccctccgtggggtgccttccccccctcctcttgggccccctttctccaggctcccatcctgtccctggagcagttgtgtgatccgtaacaacaagtgccgattcccagctcctttgtgtctgagctcacttgattgagctcagcgggtcacagttctgcaggagagaggccggtttctctgagaagtagcccctcctgataaagcaggtccctttgacccagagctgacctttccccgggcatgcggcagcagacacacctgcgcaggaggatcataaaccacttacaaacccacacgagaagggaagcagacacccaacgtgctgcttatggagaagcagacacgcccagcttggggacagcctggggaccttggactttcttagcccccatccccttgttttctggtggcatcagtggcagctgctcccaacaatggccgtggaacagcgccatccacgagaactttgtgcagtgatggaaatgcctgttcagggccactagcagccacagcccctgagctgcgttgggtgggccctgcggtgaacaaaacagcctagaggccaaggtctccccagagagcccatgagcctggcatgggggcgcagggggaccagagggtgtcttccactcctgggtgccagggcagggggctcacgctgctgttccctcggctttgtggggcttgtccttgagctcccccaattccctaatgccactgtggccagtgtgctggggagcttctgtgtggctggaagctgggaagggggtgaggttccaatccaggtgcccagagccttcctccagtcctttatccctgccctgggggctgcggtgtgggactccttcagctgtggtcggctgaaaaggcttcgattgctttagagagctgaaaacacataagccaggccttttgatgacaacctgcacttttgcaggagagacgtactagagatgaatttttgagcactttattcagactataaaacaggaaatctctaattttcctcaagtgggggcttttgaattccctcaaggcaagtccctttgcaggtgaaattaattggtggattttcagaatggccgccctggagccgagcttcagccacgcctgacgccctggcctctgaatctccactgtctctgaggtgcgctggggccacgccgcaggggtttcacctgcttgggggggtccacactagggcttgggggttcacacagcattgtccctgggctgagcccttgggtgggctagagctgcagtcctcagacatggctgcaattccagcgaggccaagaccaccagccacccagtggactcggtctctggggtgttctcctcatgcagccggggcagaggcctactggaccccctcagcctgctgctcagcatccttcccttctctgcagcagggcccggtcccaatggccaatggggctgctgccccagcagtgcctccctgtaggcccctcacctgcaccccaccttcacccagctctgggtttgcgctggtggcagctctgttttgtggatacggaaactgtacccaacttgatgccgctgggctggaaccttctgccccttcgaaatgaggcagtcagggacggggtggggtgcccccatcagccccgctgctcagggccactcatggactctaggagggtccaggttctgggcttcctgggaaggtccccagaagagagaggtgctggtagactagggaatgtgctggcaacttgacccagaagctgtggtccccttggccccggctccacggcatccgggtaccagcagcaagagcccaggccccgggctgcacgtcagctcacagcccaggagaaagctggctgcttcccctccctatgcgtctttcccccgctccaatcatgttccatctgggatctgaaatgggccaactgtggctgctttgggggtgacacgctccttctccaactcagctgggccccgggcatcccctgccctcccctgagacccaaagggggttggcacctgctgtgacaccaccgttgaccccagcctgggggccacaaggttgctgagtggggagaacatggaccccaactctatggcaagcaagatcgcagaagggggagcatcatccgcaaggacttcaggtctcccttggctggagatgaggatccacattaaatgcttgtaacacaccaggccacagaaagctcgctacacacacatgcttctccccacccatgctgactctcagaggctgctaaggcagaatttataggaaattgttttcaagccaccagagacctgtctgtacaactggaaaggctgtatttatttaatgtacctcaaggtgttttaataatgatccgtgttttaataaaaagaagtatttctgg

SEQ ID NO: 132321 - DNA, 533 bp, Homo sapiens
  Payload ID: 5843
  Gene Symbol: FAM189A1
  Gene Name: family with sequence similarity 189, member A1
  ENST ID: ENST00000560082
  CDS Start-End: 300-533
gctttaagtgttatgttgagacaccagttaaatatattccttcagatatgagaaatgcattctgtattttaaagatgagagagctcccagtagcagaaaagacgtggatttgggcagcatgcttgcagaagcatctctggagcctggagcgcagactcacacctaccctgtgacgctaaaggattcccgtctgttcttcttaagaatctgcacttaggactcagaggcaggtgctgctgtcgggactcataggtgtcgtctcctggaagaggcctctctcccttgtgataacctttttcatgctgctttctgcagtgtgtgtaatgctgaatttggctggttcaattctctcttgtcagaatgctcagctagtcaactccctagaaggctgccagttgattaagtttgacagtgtggaggtgtgtgtctgctgtgagctgcagcaccagtcgtccggctgcagcaacctcggggagacgctgaagctgaacccgctgcaggagaactgcaacgctgtgaggctgaccttgaag

SEQ ID NO: 132322 - DNA, 4705 bp, Homo sapiens
  Payload ID: 5843
  Gene Symbol: FAM189A1
  Gene Name: family with sequence similarity 189, member A1
  ENST ID: ENST00000622117
  CDS Start-End: 1-1620
atgcctccggccggcggcccccgagcgccgcgtcccgccgcgctgccccgcagcctgtcccgcctgcgcgagtgcccgggccgctcccgcatcgtgctggcgctcggggccacgcagatggcgctcggatgcctcatcgtggcagtcagcttcgccgcgctggcgctcaccacctcggcccgcgtccgccactcctgccccttctgggcaggcttctcggtgctgctgtcgggactcataggtgtcgtctcctggaagaggcctctctcccttgtgataacctttttcatgctgctttctgcggtgtgtgtaatgctgaatttggctggttcaattctctcttgtcagaatgctcagctagtcaactccctagaaggctgccagttgattaagtttgacagtgtggaggtgtgtgtctgctgtgagctgcagcaccagtcgtccggctgcagcaacctcggggagacgctgaagctgaacccgctgcaggagaactgcaacgctgtgaggctgaccttgaaggatctcctcttcagcgtgtgtgccctcaacgtcctgtccactatcgtgtgtgcgctggccacagccatgtgctgtatgcagatggtctcctccgatgtcctgcagatgttccttccgcagaggtcacatcctgccaaccccacctgcgtgactcctcacggcaccgttctccaccagaccctggatttcgacgagttcatccccccactcccgcctccaccctattaccccccagagtacacctgcacaccgtccactgaggcccagaggggcctccacctggactttgctccgtctccattcggcactttgtatgacgtggccatcaatagccccggcctgctctatcctgctgagctcccccctccgtacgaggcggtggtgggccagccccctgccagccaggttacaagtataggtcagcaggtggccgagtccagctccggggacccaaacaccagtgctggcttcagcactccagtaccagctgacagcacaagcctcctggtgtccgagggcactgctacgccaggttccagcccatcccccgatggccctgtgggcgccccagcaccctccgaacctgcccttccccctggccgcgtgtctccagaggatcctggcatgggctcacaggtgcagccaggtcccgggcatgtgtcccgctccaccagcgaccccaccttgtgcacatctagcatggcaggcgatgcctcttcacacaggccgtcgtgtagccaggacctggaagcgggactgtctgaggctgtgcctgggagcgcttccatgtctcgctctgccacggctgcctgtcgggcccagctttcaccagcgggggacccagatacctggaaaactgaccaacggccaacaccagagcccttcccagcgacctccaaagagcggccacgctctttagtggacagcaaggcctatgcggacgccagggttttggtggccaagtttttggaacactcacactgtgccctccccaccgaggcacagcacatggtgggtgccatgcgcttggctgtcaccaacgaggagcgcctcgaggaggaggccgtcttcggcgctgatgttctggaccaggtatgaaggagccacatttctgaccgtggacaccaacgcctggcgccacagatgttcttggcagaagccatcatgcctgacaaagaggccttcaggcccagcttggcggaggataaatgtgggggggacacccaggatgatctgggggcggtgtgggcagggaactgttaccccctctctcgaggggagccgagcagtgtctctttggggattgcatttcctgcctagcccagtaattcggaaagatgactttcacgtccacagtgaactctctggttttatctggcgtgcagcaccttgaactgagcagtgttgcacaaatgtgaatacagcaacaggcgacacttacgtcacctaaagactcaaagtatctccaaaatcagggccttccaaagcaggagtctcccatcccccatttaacttagtgttcagtggacagagggtgacatcgagtcatgaaacattttctcatgtggctcgatggctctatcattaggcgttcatcacgctctggcctatttcctgtgaaaggaaataggtagtgttagcacagatggcagcctgggcccaactttctgtccacagggctattgtgcaaacaaatgtgcagtgcgggcctctgccatagcccggccccccccagggaacaggccggtgttgcgggggttggaggaacccaccatctcctgggccttgagctcggcctccctccgtggggtgccttccccccctcctcttgggccccctttctccaggctcccatcctgtccctggagcagttgtgtgatccgtaacaacaagtgccgattcccagctcctttgtgtctgagctcacttgattgagctcagcgggtcacagttctgcaggagagaggccggtttctctgagaagtagcccctcctgataaagcaggtccctttgacccagagctgacctttccccgggcatgcggcagcagacacacctgcgcaggaggatcataaaccacttacaaacccacgcgagaagggaagcagacacccaacgtgctgcttatggagaagcagacacgcccagcttggggacagcctggggaccttggactttcttagcccccatccccttgttttctggtggcatcagtggcagctgctcccaacaatggccgtggaacagcgccatccacgagaactttgtgcagtgatggaaatgcctgttcagggccactagcagccacagcccctgagctgcgttgggtgggccctgcggtgaacaaaacagcctagaggccaaggtctccccagagagcccatgagcctggcatgggggcacagggggaccagagggtgtcttccactcctgggtgccagggcagggggctcacgctgctgttccctcggctttgtggggcttgtccttgagctcccccaattccctaatgccactgtggccagtgtgctggggagcttctgtgtggctggaagctgggaagggggtgaggttccaatccaggtgcccagagccttcctccagtcctttatccctgccctgggggctgcggtgtgggactccttcagctgtggtcggctgaaaaggcttcgattgctttagagagctgaaaacacataagccaggccttttgatgacaacctgcacttttgcaggagagacgtactagagatgaatttttgagcactttattcagactataaaacaggaaatctctaattttcctcaagtgggggcttttgaattccctcaaggcaagtccctttgcaggtgaaattaattggtggattttcagaatggccgccctggagccgagcttcagccacgcctgacgccctggcctctgaatctccactgtctctgaggtgcgctggggccacaccgcaggggtttcacctgcttgggggggtccacactagggcttgggggttcacacagcattgtccctgggctgagcccttgggtgggctagagctgcagtcctcagacatggctgcaattccagcgaggccaagaccaccagccacccagtggactcggtctctggggtgttctcctcatgcagccggggcagaggcctactggaccccctcagcctgctgctcagcatccttcccttctctgcagcagggcccggtcccaatggccaatggggctgctgccccagcagtgcctccctgcgggcccctcacctgcaccccaccttcacccagctctgggtttgcgctggtggcagctctgttttgtggatacggaaactgtacccaacttgatgccgctgggctggaaccttctgccccttcgaaatgaggcagtcagggacggggtggggtgcccccatcagccccgctgctcagggccactcatggactctaggagggtccaggttctgggcttcctgggaaggtccccagaagagagaggtgctggtagactagggaatgtgctggcaacttgacccagcagctgtggtccccttggccccggctccacggtatccgggtaccagcagcaagagcccaggccccgggctgcacgtcagctcacagcccaggagaaagctggctgcttcccctccctatgcgtctttcccccgctccaatcatgctccctctgggatctgaaatgggccaactgtggctgctttgggggtgacacgctccttctccaactcagctgggccccgggcatcccctgccctcccctgagacccaaagggggttggcacctgctgtgacaccaccgttgaccccagcctgggggccacaaggttgctgagtggggagaacatggaccccaactctatggcaagcaagatcgcagaagggggagcatcatccgcaaggacttcaggtctcccttggctggagatgaggatccacattaaatgtttgtaacacaccaggccacagaaagctcgctacacacagatgcttctccccacccatgctgactctcagaggctgctaaggcagaatttataggaaattgttttcaagccaccagagacctgtctgtacaactggaaaggctgtatttatttaatgtacctcaaggtgttttaataatgatccgtgttttaataaaaagaagtatttctgg

SEQ ID NO: 132323 - DNA, 2423 bp, Homo sapiens
  Payload ID: 5844
  Gene Symbol: FAM189A2
  Gene Name: family with sequence similarity 189, member A2
  Uniprot ID: Q15884
  ENST ID: ENST00000257515
  CDS Start-End: 421-1773
atttatttgaaatgactatttgttgaacacagtatagttcaaggatattttttcatatgtatttccttaagagagccctgagcctgagattttggaggcttctttcacttgtttgaactttgaaggtatattttatctattttaaaaaacacttaagaattaacaaattctataaagcatcttttttcatagttttcattcatactttcagcaacttgaagggagagtttttaacgtagtctgtgtttttgagcactctgagcatttgatttcttcctggtatcaccggtaaatcactcaatatattattattcccaaaattcgtgaagctaagagatgagccatcttgaaaaacaacctggcatttgactggaggtgatactctctggaatcataggattaacaacttggaaaaggcctatgatactcctggtaaacctctttgtgctgctctctgtggtttgtgtcctcttaaatctagctggatttatcctaggctgccaaggggcccagtttgtgtccagcgtgcccaggtgtgatctggtggacttaggtgaaggcaagatttgcttctgttgtgaagaatttcaaccagccaagtgcacagacaaagaaaatgccttgaaactctttccggttcagccctgtagtgctgttcaccttctacttaagaaagtcctctttgccctgtgtgccttgaatgccctgaccaccaccgtctgcttggtggccgctgccctccgctacctccagatattcgcaaccaggagatcctgcatcgatgaatcccagatttctgctgaagaagcggaggatcatggacgcatccccgaccctgatgattttgtgccgcctgtgcctcccccttcctattttgccacgttttactcgtgcacaccccggatgaaccgcaggatggttggtcctgatgttattcccctgccacacatctacggagctcgaatcaaaggtgtggaagtgttctgtcctctggatcccccgccgccatatgaagctgtggtgagccagatggaccaggagcagggatcttcattccaaatgtcagaaggatcagaagctgctgtgatcccattggatctgggctgcacacaagtgactcaagatggggacattcctaacatacctgccgaagaaaatgcatccacctcaactcccagttcaaccctggtgcgtcctatcagaagccggagagccctcccacccttgaggaccaggtcgaagagtgaccctgtgctccatccttctgaggagagagctgccccagtgctcagctgtgaagctgcaacacagactgaaaggagactggatctggctgcagtgactctgaggagaggcttgagatctagagcttcgcgatgcagaccgcggtctttgatagattacaaatcctacatggacaccaagctgctggtggcgaggttcctggagcagtcctcttgtaccatgaccccagacatccatgaacttgtagaaaacattaaatctgttttgaaatctgatgaggagcacatggaggaagccatcacaagtgccagttttctagaacagataatggccccattgcagcccagcacatccagggcccacaagctgccctcgcggagacagcctggcctgctgcacctccagagctgcggcgaccttcacaccttcacaccagcggggaggccccgagccgagaggaggccccggcgagtggaggctgagcggccacacagcctcattggggtcatccgagagactgtcctgtgaaccctggaagacagaaggccactccaaggggaaggatccctctcctctctgccatttcttggctgggagctgtggtccacctcaaaaaaaaggagcactctggaggacacgttttcccacctgttggctcccgtgtctgctgactgagggcattcaggagtaaatgcacaggtcggtccaggcccgtctgggtttgggatgcactgagttggaggttatgaaagctttgatcctcttcttcctctgctgggcctcgcagcattcccaagggtcacatgccctggcatgggcagaaactgggctaatgattctttgcccacttcacccctcgtgtctctctttgttgctaagttctttccctcttggaaggacagatctgccgggctgctatttatagttgcctttggcctttcactgctctgcgatttggcaggaaataaggcgattaaccctatgtgtccacaagcctcaagccttgtttcaggtcaccctcaaatcacactctctttaggcaaaacaggaaacttcttaagtgacaaattttaatgccagacatttaaggagaggattattgttgattccatttactcatgcttgcaaaactagagacccctaaggcagaactgagaataaacatgtttactttgggc

SEQ ID NO: 132324 - DNA, 2051 bp, Homo sapiens
  Payload ID: 5844
  Gene Symbol: FAM189A2
  Gene Name: family with sequence similarity 189, member A2
  ENST ID: ENST00000303068
  CDS Start-End: 543-1400
agaaaaataaggacttgaggttattgagaagacttaagagtcagtggcatccctcagcacaattttaagaagtctaaaatgtgaaaaaaagtttgtacattgaaaacacggttctgatctttttttaaaaaaatgttctcttggaagggaatatgagtttttaaaatcaggtggacttaggtgaaggcaagatttgcttctgttgtgaagaatttcaaccagccaagtgcacagacaaagaaaatgccttgaaactctttccggttcagccctgtagtgctgttcaccttctacttaagaaagtcctctttgccctgtgtgccttgaatgccctgaccaccaccgtctgcttggtggccgctgccctccgctacctccagatattcgcaaccaggagatcctgcatcgatgaatcccagatttctgctgaagaagcggaggatcatggacgcatccccgaccctgatgattttgtgccgcctgtgcctcccccttcctattttgccacgttttactcgtgcacaccccggatgaaccgcaggatggttggtcctgatgttattcccctgccacacatctacggagctcgaatcaaaggtgtggaagtgttctgtcctctggatcccccgccgccatatgaagctgtggtgagccagatggaccaggagcagggatcttcattccaaatgtcagaaggatcagaagctgctgtgatcccattggatctgggctgcacacaagtgactcaagatggggacattcctaacatacctgccgaagaaaatgcatccacctcaactcccagttcaaccctggtgcgtcctatcagaagccggagagccctcccacccttgaggaccaggtcgaagagtgaccctgtgctccatccttctgaggagagagctgccccagtgctcagctgtgaagctgcaacacagactgaaaggagactggatctggctgcagtgactctgaggagaggcttgagatctagagcttcgcgatgcagaccgcggtctttgatagattacaaatcctacatggacaccaagctgctggtggcgaggttcctggagcagtcctcttgtaccatgaccccagacatccatgaacttgtagaaaacattaaatctgttttgaaatctgatgaggagcacatggaggaagccatcacaagtgccagttttctagaacagataatggccccattgcagcccagcacatccagggcccacaagctgccctcgcggagacagcctggcctgctgcacctccagagctgcggcgaccttcacaccttcacaccagcggggaggccccgagccgagaggaggccccggcgagtggaggctgagcggccacacagcctcattggggtcatccgagagactgtcctgtgaaccctggaagacagaaggccactccaaggggaaggatccctctcctctctgccatttcttggctgggagctgtggtccacctcaaaaaaaaggagcactctggaggacacgttttcccacctgttggctcccgtgtctgctgactgagggcattcaggagtaaatgcacaggtcggtccaggcccgtctgggtttgggatgcactgagttggaggttatgaaagctttgatcctcttcttcctctgctgggcctcgcagcattcccaagggtcacatgccctggcatgggcagaaactgggctaatgattctttgcccacttcacccctcgtgtctctctttgttgctaagttctttccctcttggaaggacagatctgccgggctgctatttatagttgcctttggcctttcactgctctgcgatttggcaggaaataaggcgattaaccctatgtgtccacaagcctcaagccttgtttcaggtcaccctcaaatcacactctctttaggcaaaacaggaaacttcttaagtgacaaattttaatgccagacatttaaggagaggattattgttgattccatttactcatgcttgcaaaactagagacccctaaggcagaactgagaataaacatgtttactttgggcc

SEQ ID NO: 132325 - DNA, 1385 bp, Homo sapiens
  Payload ID: 5844
  Gene Symbol: FAM189A2
  Gene Name: family with sequence similarity 189, member A2
  ENST ID: ENST00000377216
  CDS Start-End: 21-734
gtggtgtcgtacatgacacaatgacgtgtttcgggccatatcctattggaactggacttcagggaataaccttgtgttgttttccctccttctgcaagatgaaaagcaggatgtgcatggctatcagcatttgtcagatgctttccatgttgagttttgtggtctgtgctttcaggtacaggcatatgttcaaaaggggttggccaatgggtacatgttgtttgtttctgcccacagctgccccagtgctcagctgtgaagctgcaacacagactgaaaggagactggatctggctgcagtgactctgaggagaggcttgagatctagagcttcgcgatgcagaccgcggtctttgatagattacaaatcctacatggacaccaagctgctggtggcgaggttcctggagcagtcctcttgtaccatgaccccagacatccatgaacttgtagaaaacattaaatctgttttgaaatctgatgaggagcacatggaggaagccatcacaagtgccagttttctagaacagataatggccccattgcagcccagcacatccagggcccacaagctgccctcgcggagacagcctggcctgctgcacctccagagctgcggcgaccttcacaccttcacaccagcggggaggccccgagccgagaggaggccccggcgagtggaggctgagcggccacacagcctcattggggtcatccgagagactgtcctgtgaaccctggaagacagaaggccactccaaggggaaggatccctctcctctctgccatttcttggctgggagctgtggtccacctcaaaaaaaaggagcactctggaggacacgttttcccacctgttggctcccgtgtctgctgactgagggcattcaggagtaaatgcacaggtcggtccaggcccgtctgggtttgggatgcactgagttggaggttatgaaagctttgatcctcttcttcctctgctgggcctcgcagcattcccaagggtcacatgccctggcatgggcagaaactgggctaatgattctttgcccacttcacccctcgtgtctctctttgttgctaagttctttccctcttggaaggacagatctgccgggctgctatttatagttgcctttggcctttcactgctctgcgatttggcaggaaataaggcgattaaccctatgtgtccacaagcctcaagccttgtttcaggtcaccctcaaatcacactctctttaggcaaaacaggaaacttcttaagtgacaaattttaatgccagacatttaaggagaggattattgttgattccatttactcatgcttgcaaaactagagacccctaaggcagaactgagaataaacatgtttactttgggcc

SEQ ID NO: 132326 - DNA, 2107 bp, Homo sapiens
  Payload ID: 5844
  Gene Symbol: FAM189A2
  Gene Name: family with sequence similarity 189, member A2
  Uniprot ID: Q15884
  ENST ID: ENST00000455972
  CDS Start-End: 105-1457
agtcctttcattcccgctcctaccgagatgccgggaaagcactcccgcgccgatgcgaggtgatactctctggaatcataggattaacaacttggaaaaggcctatgatactcctggtaaacctctttgtgctgctctctgtggtttgtgtcctcttaaatctagctggatttatcctaggctgccaaggggcccagtttgtgtccagcgtgcccaggtgtgatctggtggacttaggtgaaggcaagatttgcttctgttgtgaagaatttcaaccagccaagtgcacagacaaagaaaatgccttgaaactctttccggttcagccctgtagtgctgttcaccttctacttaagaaagtcctctttgccctgtgtgccttgaatgccctgaccaccaccgtctgcttggtggccgctgccctccgctacctccagatattcgcaaccaggagatcctgcatcgatgaatcccagatttctgctgaagaagcggaggatcatggacgcatccccgaccctgatgattttgtgccgcctgtgcctcccccttcctattttgccacgttttactcgtgcacaccccggatgaaccgcaggatggttggtcctgatgttattcccctgccacacatctacggagctcgaatcaaaggtgtggaagtgttctgtcctctggatcccccgccgccatatgaagctgtggtgagccagatggaccaggagcagggatcttcattccaaatgtcagaaggatcagaagctgctgtgatcccattggatctgggctgcacacaagtgactcaagatggggacattcctaacatacctgccgaagaaaatgcatccacctcaactcccagttcaaccctggtgcgtcctatcagaagccggagagccctcccacccttgaggaccaggtcgaagagtgaccctgtgctccatccttctgaggagagagctgccccagtgctcagctgtgaagctgcaacacagactgaaaggagactggatctggctgcagtgactctgaggagaggcttgagatctagagcttcgcgatgcagaccgcggtctttgatagattacaaatcctacatggacaccaagctgctggtggcgaggttcctggagcagtcctcttgtaccatgaccccagacatccatgaacttgtagaaaacattaaatctgttttgaaatctgatgaggagcacatggaggaagccatcacaagtgccagttttctagaacagataatggccccattgcagcccagcacatccagggcccacaagctgccctcgcggagacagcctggcctgctgcacctccagagctgcggcgaccttcacaccttcacaccagcggggaggccccgagccgagaggaggccccggcgagtggaggctgagcggccacacagcctcattggggtcatccgagagactgtcctgtgaaccctggaagacagaaggccactccaaggggaaggatccctctcctctctgccatttcttggctgggagctgtggtccacctcaaaaaaaaggagcactctggaggacacgttttcccacctgttggctcccgtgtctgctgactgagggcattcaggagtaaatgcacaggtcggtccaggcccgtctgggtttgggatgcactgagttggaggttatgaaagctttgatcctcttcttcctctgctgggcctcgcagcattcccaagggtcacatgccctggcatgggcagaaactgggctaatgattctttgcccacttcacccctcgtgtctctctttgttgctaagttctttccctcttggaaggacagatctgccgggctgctatttatagttgcctttggcctttcactgctctgcgatttggcaggaaataaggcgattaaccctatgtgtccacaagcctcaagccttgtttcaggtcaccctcaaatcacactctctttaggcaaaacaggaaacttcttaagtgacaaattttaatgccagacatttaaggagaggattattgttgattccatttactcatgcttgcaaaactagagacccctaaggcagaactgagaataaacatgtttactttgggc

SEQ ID NO: 132327 - DNA, 2379 bp, Homo sapiens
  Payload ID: 5845
  Gene Symbol: FAM189B
  Gene Name: family with sequence similarity 189, member B
  Uniprot ID: P81408
  ENST ID: ENST00000350210
  CDS Start-End: 84-1802
aaaggacggggccttgggcgcctctgagatgctcccaagtgccagggagggccgagcgaggcgcaggcaaccgggcagcaggcatgatgccctcgcctagtgactccagccgctcgctgaccagccggcccagcaccaggggccttacccacctccgcctccaccgaccctggctgcaggccctgcttacgctggggctggtccaagtgctcctgggcatcctggtggtcaccttcagcatggtggcctcttccgtcaccaccaccgagagcatcaagaggtcctgcccgtcttgggctgggttctcgaacctgctcttcagcgtctgtgggctcaccatttgtgccgctataatctgtacactctctgctattgtctgctgcatccaaatcttctccctggacctcgtgcatacgctggcccctgagcggtcagtctcaggcccactgggacctctgggctgcacgtccccgcccccagcccctctcctacacaccatgctggacctggaggaatttgtcccgcctgtgcccccaccgccctactatcccccagagtatacctgcagctcagaaacagatgcacagagcatcacgtacaatggctccatggacagcccagtgcccttgtaccctaccgattgccccccttcttatgaggcagtcatgggactacgaggagacagccaggccactctctttgaccctcagcttcacgatggctcgtgcatctgtgaacgagtggcctccattgtagacgtgtccatggacagcgggtctctggtgctgtcagccattggtgacctccctgggggctctagcccgtcggaggactcgtgcctgctggagctgcagggctccgtgcgctccgtggactacgttctctttcgctccatccagcgcagccgtgccggctactgcctcagcctggactgtggcctgcggggccccttcgaggaaagccccctgccacggcgccccccacgggctgcccgctcctattcctgctctgcccctgaagctccacccccactgggtgcccccacagctgcccgcagctgccaccggttggagggctggccgccctgggtgggaccctgcttccccgagctgaggcggcgggtcccccggggagggggccgcccagccgcagccccgcccacccgagccccgactcgtcgcttcagcgatagctcaggttccctcaccccaccggggcaccggcctcctcatccggcatccccaccaccgctgctgctgccacggtcccacagcgacccaggcatcacgacctccagtgacactgctgacttcagggacctttataccaaagtgcttgaggaagaagctgcttctgtttcctctgcagatacagggctctgctctgaagcctgcctcttccgcctagcccgctgcccttcccccaagttgctacgtgcccggtcagccgagaaacggcgccctgtgcccaccttccaaaaagttcccctgccctcgggccctgcacctgcccactccctgggggacctaaagggcagctggccaggtcggggcctggtcactcgtttcctccagatatccaggaaagccccagaccccagtgggactggagctcatggacataagcaggtgccccggagcctgtggggccggcctggccgagagagcctccaccttcgcagctgcggagatctgagctctagctcttccctgcggcgtctcctgtctggccgcaggctggagcgtggtacccgcccccacagcctcagcctcaacgggggcagccgggagactgggctctgacctaggcttcttgtcacactgaacacatccagccacaggcaccagctggttgggaccagcagcccccagcatcctcttgcactggctggcacaaaaagaaacctgctgtataccccccaaagtgtccctttccctcctacctctggggtctcttgctgcttgcctctgctgctctggactgggagagcttctgtcctgtgctgcatgggtatttagactgtgggggagatgccccttcttatagcactggaggaggaaaacaaattcttgtccccctcagaatgagagtggctctttctgatttgcaagggcactatggtcagggcaaaggcatggcccaggtgtttaagtacagggtgacgtgtgcctatgcaatggggtggtaaggcaggcacgaagagtccaaaaaatctaggtggcctctcagctctgccacctctagctgcatgaccttgggcaagctatgtaaccccaattgcctgctccattaaagactgtgaaggtagaatgtttgtaaagctcttaacagtatgtaagccttcaataaatttcagttttccccttgttttcttgatca

SEQ ID NO: 132328 - DNA, 3082 bp, Homo sapiens
  Payload ID: 5845
  Gene Symbol: FAM189B
  Gene Name: family with sequence similarity 189, member B
  Uniprot ID: P81408
  ENST ID: ENST00000361361
  CDS Start-End: 511-2517
cagcggcgccgcggcctctccccaccaggcggccccggatcctactggacgccctgagggcacaccgaccgcgcctctagagtcaccccacgccgacccctcccctcttctctagacttatttccatccttcccgcttttaccctccccacccctccctgggctccaggccgccgccccctcctcactcctggaccggcccttctcggtgcccctcttccctagggagatgcgatgagccggtgcccccgcgtcctcatcgtcgccccgggcacggtgcccgtccagtgcccgtggtggggagggagcactccgcggtccctccgtgacgcccctcgcttggccccccccacagctggcgtccctcggccatgccccaggggacccagccagggggtgggctctagagcgagtggggtggagaggagaaaggacggggccttgggcgcctctgagatgctcccaagtgccagggagggccgagcgaggcgcaggcaaccgggcagcaggcatgatgccctcgcctagtgactccagccgctcgctgaccagccggcccagcaccaggggccttacccacctccgcctccaccgaccctggctgcaggccctgcttacgctggggctggtccaagtgctcctgggcatcctggtggtcaccttcagcatggtggcctcttccgtcaccaccaccgagagcatcaagaggtcctgcccgtcttgggctgggttctcgctggcgttctccggggtggttggcattgtgtcctggaagcggccattcactctagtgatctccttcttctccttgctttcggtgctctgtgtcatgcttagcatggctggctctgttctctcctgtaagaatgctcaactggcccgagacttccaacagtgctctctggaaggaaaggtctgtgtgtgctgtccctctgttcccctcctccggccctgtccagagtcggggcaggaactgaaagttgcccctaactccacctgtgatgaagcccgaggggccctcaagaacctgctcttcagcgtctgtgggctcaccatttgtgccgctataatctgtacactctctgctattgtctgctgcatccaaatcttctccctggacctcgtgcatacgctggcccctgagcggtcagtctcaggcccactgggacctctgggctgcacgtccccgcccccagcccctctcctacacaccatgctggacctggaggaatttgtcccgcctgtgcccccaccgccctactatcccccagagtatacctgcagctcagaaacagatgcacagagcatcacgtacaatggctccatggacagcccagtgcccttgtaccctaccgattgccccccttcttatgaggcagtcatgggactacgaggagacagccaggccactctctttgaccctcagcttcacgatggctcgtgcatctgtgaacgagtggcctccattgtagacgtgtccatggacagcgggtctctggtgctgtcagccattggtgacctccctgggggctctagcccgtcggaggactcgtgcctgctggagctgcagggctccgtgcgctccgtggactacgttctctttcgctccatccagcgcagccgtgccggctactgcctcagcctggactgtggcctgcggggccccttcgaggaaagccccctgccacggcgccccccacgggctgcccgctcctattcctgctctgcccctgaagctccacccccactgggtgcccccacagctgcccgcagctgccaccggttggagggctggccgccctgggtgggaccctgcttccccgagctgaggcggcgggtcccccggggagggggccgcccagccgcagccccgcccacccgagccccgactcgtcgcttcagcgatagctcaggttccctcaccccaccggggcaccggcctcctcatccggcatccccaccaccgctgctgctgccacggtcccacagcgacccaggcatcacgacctccagtgacactgctgacttcagggacctttataccaaagtgcttgaggaagaagctgcttctgtttcctctgcagatacagggctctgctctgaagcctgcctcttccgcctagcccgctgcccttcccccaagttgctacgtgcccggtcagccgagaaacggcgccctgtgcccaccttccaaaaagttcccctgccctcgggccctgcacctgcccactccctgggggacctaaagggcagctggccaggtcggggcctggtcactcgtttcctccagatatccaggaaagccccagaccccagtgggactggagctcatggacataagcaggtgccccggagcctgtggggccggcctggccgagagagcctccaccttcgcagctgcggagatctgagctctagctcttccctgcggcgtctcctgtctggccgcaggctggagcgtggtacccgcccccacagcctcagcctcaacgggggcagccgggagactgggctctgacctaggcttcttgtcacactgaacacatccagccacaggcaccagctggttgggaccagcagcccccagcatcctcttgcactggctggcacaaaaagaaacctgctgtataccccccaaagtgtccctttccctcctacctctggggtctcttgctgcttgcctctgctgctctggactgggagagcttctgtcctgtgctgcatgggtatttagactgtgggggagatgccccttcttatagcactggaggaggaaaacaaattcttgtccccctcagaatgagagtggctctttctgatttgcaagggcactatggtcagggcaaaggcatggcccaggtgtttaagtacagggtgacgtgtgcctatgcaatggggtggtaaggcaggcacgaagagtccaaaaaatctaggtggcctctcagctctgccacctctagctgcatgaccttgggcaagctatgtaaccccaattgcctgctccattaaagactgtgaaggtagaatgtttgtaaagctcttaacagtatgtaagccttcaataaatttcagttttccccttg

SEQ ID NO: 132329 - DNA, 2609 bp, Homo sapiens
  Payload ID: 5845
  Gene Symbol: FAM189B
  Gene Name: family with sequence similarity 189, member B
  Uniprot ID: P81408
  ENST ID: ENST00000368368
  CDS Start-End: 92-2044
gagaggagaaaggacggggccttgggcgcctctgagatgctcccaagtgccagggagggccgagcgaggcgcaggcaaccgggcagcaggcatgatgccctcgcctagtgactccagccgctcgctgaccagccggcccagcaccaggggccttacccacctccgcctccaccgaccctggctgcaggccctgcttacgctggggctggtccaagtgctcctgggcatcctggtggtcaccttcagcatggtggcctcttccgtcaccaccaccgagagcatcaagaggtcctgcccgtcttgggctgggttctcgatctccttcttctccttgctttcggtgctctgtgtcatgcttagcatggctggctctgttctctcctgtaagaatgctcaactggcccgagacttccaacagtgctctctggaaggaaaggtctgtgtgtgctgtccctctgttcccctcctccggccctgtccagagtcggggcaggaactgaaagttgcccctaactccacctgtgatgaagcccgaggggccctcaagaacctgctcttcagcgtctgtgggctcaccatttgtgccgctataatctgtacactctctgctattgtctgctgcatccaaatcttctccctggacctcgtgcatacgcagctggcccctgagcggtcagtctcaggcccactgggacctctgggctgcacgtccccgcccccagcccctctcctacacaccatgctggacctggaggaatttgtcccgcctgtgcccccaccgccctactatcccccagagtatacctgcagctcagaaacagatgcacagagcatcacgtacaatggctccatggacagcccagtgcccttgtaccctaccgattgccccccttcttatgaggcagtcatgggactacgaggagacagccaggccactctctttgaccctcagcttcacgatggctcgtgcatctgtgaacgagtggcctccattgtagacgtgtccatggacagcgggtctctggtgctgtcagccattggtgacctccctgggggctctagcccgtcggaggactcgtgcctgctggagctgcagggctccgtgcgctccgtggactacgttctctttcgctccatccagcgcagccgtgccggctactgcctcagcctggactgtggcctgcggggccccttcgaggaaagccccctgccacggcgccccccacgggctgcccgctcctattcctgctctgcccctgaagctccacccccactgggtgcccccacagctgcccgcagctgccaccggttggagggctggccgccctgggtgggaccctgcttccccgagctgaggcggcgggtcccccggggagggggccgcccagccgcagccccgcccacccgagccccgactcgtcgcttcagcgatagctcaggttccctcaccccaccggggcaccggcctcctcatccggcatccccaccaccgctgctgctgccacggtcccacagcgacccaggcatcacgacctccagtgacactgctgacttcagggacctttataccaaagtgcttgaggaagaagctgcttctgtttcctctgcagatacagggctctgctctgaagcctgcctcttccgcctagcccgctgcccttcccccaagttgctacgtgcccggtcagccgagaaacggcgccctgtgcccaccttccaaaaagttcccctgccctcgggccctgcacctgcccactccctgggggacctaaagggcagctggccaggtcggggcctggtcactcgtttcctccagatatccaggaaagccccagaccccagtgggactggagctcatggacataagcaggtgccccggagcctgtggggccggcctggccgagagagcctccaccttcgcagctgcggagatctgagctctagctcttccctgcggcgtctcctgtctggccgcaggctggagcgtggtacccgcccccacagcctcagcctcaacgggggcagccgggagactgggctctgacctaggcttcttgtcacactgaacacatccagccacaggcaccagctggttgggaccagcagcccccagcatcctcttgcactggctggcacaaaaagaaacctgctgtataccccccaaagtgtccctttccctcctacctctggggtctcttgctgcttgcctctgctgctctggactgggagagcttctgtcctgtgctgcatgggtatttagactgtgggggagatgccccttcttatagcactggaggaggaaaacaaattcttgtccccctcagaatgagagtggctctttctgatttgcaagggcactatggtcagggcaaaggcatggcccaggtgtttaagtacagggtgacgtgtgcctatgcaatggggtggtaaggcaggcacgaagagtccaaaaaatctaggtggcctctcagctctgccacctctagctgcatgaccttgggcaagctatgtaaccccaattgcctgctccattaaagactgtgaaggtagaatgtttgtaaagctcttaacagtatgtaagccttcaataaatttcagttttccccttg

SEQ ID NO: 132330 - DNA, 1006 bp, Homo sapiens
  Payload ID: 5845
  Gene Symbol: FAM189B
  Gene Name: family with sequence similarity 189, member B
  ENST ID: ENST00000491082
  CDS Start-End: 32-1006
cgagcgaggcgcaggcaaccgggcagcaggcatgatgccctcgcctagtgactccagccgctcgctgaccagccggcccagcaccaggggccttacccacctccgcctccaccgaccctggctgcaggccctgcttacgctggggctggtccaagtgctcctgggcatcctggtggtcaccttcagcatggtggcctcttccgtcaccaccaccgagagcatcaagaggtcctgcccgtcttgggctgggttctcgaacctgctcttcagcgtctgtgggctcaccatttgtgccgctataatctgtacactctctgctattgtctgctgcatccaaatcttctccctggacctcgtgcatacgctggcccctgagcggtcagtctcaggcccactgggacctctgggctgcacgtccccgcccccagcccctctcctacacaccatgctggacctggaggaatttgtcccgcctgtgcccccaccgccctactatcccccagagtatacctgcagctcagaaacagatgcacagagcatcacgtacaatggctccatggacagcccagtgcccttgtaccctaccgattgccccccttcttatgaggcagtcatgggactacgaggagacagccaggccactctctttgaccctcagcttcacgatggctcgtgcatctgtgaacgagtggcctccattgtagacgctgacttcagggacctttataccaaagtgcttgaggaagaagctgcttctgtttcctctgcagatacagggctctgctctgaagcctgcctcttccgcctagcccgctgcccttcccccaagttgctacgtgcccggtcagccgagaaacggcgccctgtgcccaccttccaaaaagttcccctgccctcgggccctgcacctgcccactccctgggggacctaaagggcagctggccaggtcggggcctggtcactcgtttcctccagatatccaggaaagccccagaccccagtggg

SEQ ID NO: 132331 - DNA, 1499 bp, Homo sapiens
  Payload ID: 5845
  Gene Symbol: FAM189B
  Gene Name: family with sequence similarity 189, member B
  ENST ID: ENST00000487649
  CDS Start-End: 315-749
ggcccttctcggtgcccctcttccctagggagatgcgatgagccggtgcccccgcgtcctcatcgtcgccccgggcacggtgcccgtccagtgcccgtggtggggagggagcactccgcggtccctccgtgacgcccctcgcttggccccccccacagctggcgtccctcggccatgccccaggggacccagccagggggtgggctctagagcgagtggggtggagaggagaaaggacggggccttgggcgcctctgagatgctcccaagtgccagggagggccgagcgaggcgcaggcaaccgggcagcaggcatgatgccctcgcctagtgactccagccgctcgctgaccagccggcccagcaccaggggccttacccacctccgcctccaccgaccctggctgcaggccctgcttacgctggggctggtccaagtgctcctgggcatcctggtggtcaccttcagcatggtggcctcttccgtcaccaccaccgagagcatcaagaggtcctgcccgtcttgggctgggttctcgaacctgctcttcagcgtctgtgggctcaccatttgtgccgctataatctgtacactctctgctattgtctgctgcatccaaatcttctccctggacctcgtgcatacgctgacttcagggacctttataccaaagtgcttgaggaagaagctgcttctgtttcctctgcagatacagggctctgctctgaagcctgcctcttccgcctagcccgctgcccttcccccaagttgctacgtgcccggtcagccgagaaacggcgccctgtgcccaccttccaaaaagttcccctgccctcgggccctgcacctgcccactccctgggggacctaaagggcagctggccaggtcggggcctggtcactcgtttcctccagatatccaggaaagccccagaccccagtgggactggagctcatggacataagcaggtgccccggagcctgtggggccggcctggccgagagagcctccaccttcgcagctgcggagatctgagctctagctcttccctgcggcgtctcctgtctggccgcaggctggagcgtggtacccgcccccacagcctcagcctcaacgggggcagccgggagactgggctctgacctaggcttcttgtcacactgaacacatccagccacaggcaccagctggttgggaccagcagcccccagcatcctcttgcactggctggcacaaaaagaaacctgctgtataccccccaaagtgtccctttccctcctacctctggggtctcttgctgcttgcctctgctgctctggactgggagagcttctgtcctgtgctgcatgggtatttagactgtgggggagatgccccttcttatagcactggaggaggaaaacaaattcttgtccccctcagaatgagagtggctctttctgatttgcaagggcactatggtcagggcaaaggcatggcccaggtgtttaagtacag

SEQ ID NO: 132332 - DNA, 2609 bp, Homo sapiens; identical to SEQ ID NO: 132329
  Payload ID: 5845
  Gene Symbol: FAM189B
  Gene Name: family with sequence similarity 189, member B
  Uniprot ID: P81408
  ENST ID: ENST00000572488
  CDS Start-End: 92-2044

SEQ ID NO: 132333 - DNA, 1006 bp, Homo sapiens; identical to SEQ ID NO: 132330
  Payload ID: 5845
  Gene Symbol: FAM189B
  Gene Name: family with sequence similarity 189, member B
  ENST ID: ENST00000574503
  CDS Start-End: 32-1006

SEQ ID NO: 132334 - DNA, 2379 bp, Homo sapiens; identical to SEQ ID NO: 132327
  Payload ID: 5845
  Gene Symbol: FAM189B
  Gene Name: family with sequence similarity 189, member B
  Uniprot ID: P81408
  ENST ID: ENST00000574749
  CDS Start-End: 84-1802

SEQ ID NO: 132335 - DNA, 3082 bp, Homo sapiens; identical to SEQ ID NO: 132328
  Payload ID: 5845
  Gene Symbol: FAM189B
  Gene Name: family with sequence similarity 189, member B
  Uniprot ID: P81408
  ENST ID: ENST00000575430
  CDS Start-End: 511-2517

SEQ ID NO: 132336 - DNA, 1499 bp, Homo sapiens; identical to SEQ ID NO: 132331
  Payload ID: 5845
  Gene Symbol: FAM189B
  Gene Name: family with sequence similarity 189, member B
  ENST ID: ENST00000573675
  CDS Start-End: 315-749

SEQ ID NO: 132337 - DNA, 1386 bp, Homo sapiens
  Payload ID: 5845
  Gene Symbol: FAM189B
  Gene Name: family with sequence similarity 189, member B
  ENST ID: ENST00000619949
  CDS Start-End: 471-1199
cctactggacgccctgagggcacaccgaccgcgcctctagagtcaccccacgccgacccctcccctcttctctagacttatttccatccttcccgcttttaccctccccacccctccctgggctccaggccgccgccccctcctcactcctggaccggcccttctcggtgcccctcttccctagggagatgcgatgagccggtgcccccgcgtcctcatcgtcgccccgggcacggtgcccgtccagtgcccgtggtggggagggagcactccgcggtccctccgtgacgcccctcgcttggccccccccacagctggcgtccctcggccatgccccaggggacccagccagggggtgggctctagagcgagtggggtggagaggagaaaggacggggccttgggcgcctctgagatgctcccaagtgccagggagggccgagcgaggcgcaggcaaccgggcagcaggcatgatgccctcgcctagtgactccagccgctcgctgaccagccggcccagcaccaggggccttacccacctccgcctccaccgaccctggctgcaggccctgcttacgctggggctggtccaagtgctcctgggcatcctggtggtcaccttcagcatggtggcctcttccgtcaccaccaccgagagcatcaagaggtcctgcccgtcttgggctgggttctcgaacctgctcttcagcgtctgtgggctcaccatttgtgccgctataatctgtacactctctgctattgtctgctgcatccaaatcttctccctggacctcgtgcatacgctggcccctgagcggtcagtctcaggcccactgggacctctgggctgcacgtccccgcccccagcccctctcctacacaccatgctggacctggaggaatttgtcccgcctgtgcccccaccgccctactatcccccagagtatacctgcagctcagaaacagatgcacagagcatcacgtacaatggctccatggacagcccagtgcccttgtaccctaccgattgccccccttcttatgaggcagtcatgggactacgaggaggaaaacaaattcttgtccccctcagaatgagagtggctctttctgatttgcaagggcactatggtcagggcaaaggcatggcccaggtgtttaagtacagggtgacgtgtgcctatgcaatggggtggtaaggcaggcacgaagagtccaaaaaatctaggtggcctctcagctctgccacctctagctgcatgaccttgggcaagctatgtaaccccaattgcctgctccattaaagactgtgaaggtagaatgtttgtaaagctcttaacagtatgtaagccttcaataaatttcagttttccccttgttttcttg

SEQ ID NO: 132338 - DNA, 1335 bp, Homo sapiens
  Payload ID: 5845
  Gene Symbol: FAM189B
  Gene Name: family with sequence similarity 189, member B
  ENST ID: ENST00000621094
  CDS Start-End: 607-1335
attcccatcccccttctctagtccccgacctgcggcagccggagctcggggagcggagcgtggtggggaggggagcgggacaggcgacacaggagacagcggcgccgcggcctctccccaccaggcggccccggatcctactggacgccctgagggcacaccgaccgcgcctctagagtcaccccacgccgacccctcccctcttctctagacttatttccatccttcccgcttttaccctccccacccctccctgggctccaggccgccgccccctcctcactcctggaccggcccttctcggtgcccctcttccctagggagatgcgatgagccggtgcccccgcgtcctcatcgtcgccccgggcacggtgcccgtccagtgcccgtggtggggagggagcactccgcggtccctccgtgacgcccctcgcttggccccccccacagctggcgtccctcggccatgccccaggggacccagccagggggtgggctctagagcgagtggggtggagaggagaaaggacggggccttgggcgcctctgagatgctcccaagtgccagggagggccgagcgaggcgcaggcaaccgggcagcaggcatgatgccctcgcctagtgactccagccgctcgctgaccagccggcccagcaccaggggccttacccacctccgcctccaccgaccctggctgcaggccctgcttacgctggggctggtccaagtgctcctgggcatcctggtggtcaccttcagcatggtggcctcttccgtcaccaccaccgagagcatcaagaggtcctgcccgtcttgggctgggttctcgaacctgctcttcagcgtctgtgggctcaccatttgtgccgctataatctgtacactctctgctattgtctgctgcatccaaatcttctccctggacctcgtgcatacgctggcccctgagcggtcagtctcaggcccactgggacctctgggctgcacgtccccgcccccagcccctctcctacacaccatgctggacctggaggaatttgtcccgcctgtgcccccaccgccctactatcccccagagtatacctgcagctcagaaacagatgcacagagcatcacgtacaatggctccatggacagcccagtgcccttgtaccctaccgattgccccccttcttatgaggcagtcatgggactacgaggaggaaaacaaattcttgtccccctcagaatgagagtggctctttctgatttgcaagggcactatggtcagggcaaaggcatggcccaggtgtttaagtacagggtgacgtgtgcctatgcaatggggtggtaa

SEQ ID NO: 132339 - DNA, 1917 bp, Homo sapiens
  Payload ID: 5846
  Gene Symbol: FAM19A1
  Gene Name: family with sequence similarity 19 (chemokine (C-C motif)-like), member A1
  Uniprot ID: Q7Z5A9
  ENST ID: ENST00000496687
  CDS Start-End: 398-799
agacttgcaatgaagttagaatgaacaggaggagtctgcagcttttcagtgcctgggataactatagtttaaagatcattgtgtaaaataggatttttagtcagcatgcattgttttaaaccgactaactgatagcctaaaactttatttttgcattttgccaatccttggagttttgttttgcagaattaagaaaaaaatgaatgtatgatcatctgaaaagggctttctctcaatcccacttcatggcatgacctctgctggatcattagttctagccagagaagtagcaaaggaacatgacgtctgagacctcccttccctcatcagtggggctgactgagctgggggcttgaagccggaggtaacctttcctgtcgaatgttctctttagagaatggcaatggtctctgcgatgtcctgggtcctgtatttgtggataagtgcttgtgcaatgctactctgccatggatcccttcagcacactttccagcagcatcacctgcacagaccagaaggagggacgtgtgaagtgatagcagcacaccgatgttgtaacaagaatcgcattgaggagcggtcacaaacagtaaagtgttcctgtctacctggaaaagtggctggaacaacaagaaaccggccttcttgcgtcgatgcctccatagtgattgggaaatggtggtgtgagatggagccttgcctagaaggagaagaatgtaagacactccctgacaattctggatggatgtgcgcaacaggcaacaaaattaagaccacgagaattcacccaagaacctaacagaagcatttgtggtagtaaaggaaaaccaaccctctggaaaatacattttgagaatctcaaacatctcacatatatacaagccaaatggatttcttacttgcactttgactggctaccagataatcacagtgcgtttactgtgtgtaacgaaatatcctacagtgagaagacacagcgttttggcaacaccatggaaagtgggcttaaaaaagggttttctcagtgaaatttttgggcatcatgaagaacgatcaactatcttctaatttgaatctatagttactttgtaccatttgaaatatatgtatatatatatatataatattttgaaatattatctattctcttcaagaaatgaacagtaccacagtttgagacggctggtgtacccctttgagttttggatgttttgtctgttttgctttgttttgttagtcatttctttttctaacggcaaggaagatatgtgcccttttgagaattcaagatggcactgacacgggaaggccagctacaggtggactcctggaatttgaggcatcataatgatactgaatcaagaacttccttctgcttctaccagatggcccaaggaagcacatcgtcctgttttattgctttctaccctgtgcaatattagcatgcaagcttggcttacatagtcatactttatattcaattgatatataataaccgttctaacctcttccaggaaaatatttttagaactactagcttttccacttagaagaaaatgaggattcttaagggagccactccaccatgctattaagactctggcagagttatgggtaggatatggatccctacatgaataagtcctgtaaatacaatgtcttaaggctttgtatagctgtcctagactgcagaaatgtcctctgattaaatccaaagtctggcatcgttaactacatagtgctgtagcaacaagtcttatcatggcatctctttctatgtttggtttgctttttccaagagtattcaggtctcctcttgtgagataggaaggccatgaaaacaattagatttcaagatgatctatgtgaccaaatgttggacagccctattaaagtggtaaacaacttctttctaaa

SEQ ID NO: 132340 - DNA, 2014 bp, Homo sapiens
  Payload ID: 5846
  Gene Symbol: FAM19A1
  Gene Name: family with sequence similarity 19 (chemokine (C-C motif)-like), member A1
  Uniprot ID: Q7Z5A9
  ENST ID: ENST00000478136
  CDS Start-End: 491-892
gatactttagagcggagggatgtattgaaacagactactgctacttacagcaccgtatagcagccctgctcctacattttgctgccttactctgccccgaatgcactggagtggggatggtccatcggcaactataaactgattctcatcaggaaactgcacattatctccccatcacttcaaaggtctcgtcaggcagaggtgacgccaggagatgatttaaaggtgaaaatgacaaggtttccacccctcaaaccttggctccttttctgacaatacagtctgaatgaacccgatgtctttttttttactgtggaaataggatcggaagagagtaacatttttttttttttaatcctgataaagaagattgttgggaagctctttgaaaaaaaattttaaattgtggcacagatggattttaaaaagtgttagatctttccaatgaacactaatagagtactctgctcttggctggatttttcagagaatggcaatggtctctgcgatgtcctgggtcctgtatttgtggataagtgcttgtgcaatgctactctgccatggatcccttcagcacactttccagcagcatcacctgcacagaccagaaggagggacgtgtgaagtgatagcagcacaccgatgttgtaacaagaatcgcattgaggagcggtcacaaacagtaaagtgttcctgtctacctggaaaagtggctggaacaacaagaaaccggccttcttgcgtcgatgcctccatagtgattgggaaatggtggtgtgagatggagccttgcctagaaggagaagaatgtaagacactccctgacaattctggatggatgtgcgcaacaggcaacaaaattaagaccacgagaattcacccaagaacctaacagaagcatttgtggtagtaaaggaaaaccaaccctctggaaaatacattttgagaatctcaaacatctcacatatatacaagccaaatggatttcttacttgcactttgactggctaccagataatcacagtgcgtttactgtgtgtaacgaaatatcctacagtgagaagacacagcgttttggcaacaccatggaaagtgggcttaaaaaagggttttctcagtgaaatttttgggcatcatgaagaacgatcaactatcttctaatttgaatctatagttactttgtaccatttgaaatatatgtatatatatatatataatattttgaaatattatctattctcttcaagaaatgaacagtaccacagtttgagacggctggtgtacccctttgagttttggatgttttgtctgttttgctttgttttgttagtcatttctttttctaacggcaaggaagatatgtgcccttttgagaattcaagatggcactgacacgggaaggccagctacaggtggactcctggaatttgaggcatcataatgatactgaatcaagaacttccttctgcttctaccagatggcccaaggaagcacatcgtcctgttttattgctttctaccctgtgcaatattagcatgcaagcttggcttacatagtcatactttatattcaattgatatataataaccgttctaacctcttccaggaaaatatttttagaactactagcttttccacttagaagaaaatgaggattcttaagggagccactccaccatgctattaagactctggcagagttatgggtaggatatggatccctacatgaataagtcctgtaaatacaatgtcttaaggctttgtatagctgtcctagactgcagaaatgtcctctgattaaatccaaagtctggcatcgttaactacatagtgctgtagcaacaagtcttatcatggcatctctttctatgtttggtttgctttttccaagagtattcaggtctcctcttgtgagataggaaggccatgaaaacaattagatttcaagatgatctatgtgaccaaatgttggacagccctattaaagtggtaaacaacttctttctaaaccta

SEQ ID NO: 132341 - DNA, 159 bp, Homo sapiens
  Payload ID: 5846
  Gene Symbol: FAM19A1
  Gene Name: family with sequence similarity 19 (chemokine (C-C motif)-like), member A1
  ENST ID: ENST00000617084
  CDS Start-End: 1-159
ccagaaggagggacgtgtgaagtgatagcagcacaccgatgttgtaacaagaatcgcattgaggagcggtcacaaacagtaaagtgttcctgtctacctggaaaagtggctggaacaacaagaaaccggccttcttgcgtcgatggtgctattatttga

SEQ ID NO: 132342 - DNA, 4128 bp, Homo sapiens
  Payload ID: 5847
  Gene Symbol: FAM19A2
  Gene Name: family with sequence similarity 19 (chemokine (C-C motif)-like), member A2
  Uniprot ID: Q8N3H0
  ENST ID: ENST00000416284
  CDS Start-End: 1586-1981
ttttataccagttgcctcctcatcttttactgtctcgttctttttctgcaggaccgttgtttgctctcaacggcagttgctggggctaacagaactggctgttgggagagagaggcgaggcaacgccgcccggccctgccattccattttactgcttaactcaacctggagtgtcaggacctattctcctgcattctcgctgcactatacgggggagccaagtcactctgtactcactggacagccaggctgggtggaatagggttctagagtggagcaggggctctgccctttatggcgactttctaaaagattagcatcagtgtcttttgacagtatagcatctggggtgggacgcggagaggaggctttgcttgctaaacggcttctttctccgccggtgatctggatttgtttcctcggccccctccccccgctcctttctttctcccctcccgcctttagcaaagtgacacaggcgacacctgctcgcttgtgttcgatgttggaactcgcacctcctcggtggtgacggtgccagggcactgctaccagggggacatcggcgggtttcccttccttccagcccacgatgcctagaagggcagcgggtgggctgcgtggggctctgcccgcagcacttcgaggcgggattgaggggctgaagctggccaggagttgctgctaagtggattcgagtggaaggcgccaagtctccgcgagggcaccagcggggacctatctgcgagcagtgggaacaggggcacctggacggaggaacgcgggcgtctggaggggggacatcggctgagctcagagcctctcctccttcctgtcccgagcttcccagcaactccgccacgttggagacccggtacctgcgagagccagggaactcgagaagtgcgtggccgaggctgctttcctgaaggtgaatcattctgtccaattgcctttccccagagaacaagagggagggcgggagagagggaacggaggatgtgtgagtgtgtgtgtgtgtgagagggagagacgacgtgaggcgagaggaaaagtctttagtcggccttaaaagcaaacaaatcagagatggaataagagcggtaattgcagcaagaccgccttgattcttgcagtccagggagctgagcgcaccgcgcgcatccggcgaggacaggaggcgaccgcgggcgctgccaagggctgcgggactttggcttttcctcagtaaacaaatcttttgattactttgacactgtggaataaagaagcggggagaaggatcaggctcaccttcacccgcttcagggggattccagcttggatgtcagattcctgaaccgtctttgccatcggaggaggaaacacatccacacacgcgcgcgcacactcgcacgctcagggccacactcacacgccgccctccacgatcacacagcaccagacttcggttccctatgcccctggatggtgacggcggattggcatcttggaagcgatgcgagagcgataaggctggcgccggcccgcaaaagctgcaggagcatcgctaggtgttgccgccaccgggaagcggggctgcaggatgagtaagagatacttacagaaagcaacaaaaggaaaactgctaataataatatttattgtaaccttgtgggggaaagttgtatccagtgcaaaccatcataaagctcaccatgttaaaacgggaacttgtgaggtggtggcactccacagatgctgtaataagaacaagatagaagaacggtcacaaacagtcaagtgctcctgcttccctgggcaggtggcaggcaccacgcgagctgctccatcatgtgtggatgcttcaatagtggaacagaaatggtggtgccatatgcagccatgtctagagggagaagaatgtaaagttcttccggatcggaaaggatggagctgttcctctgggaataaagtcaaaacaactagggtaacccattaacccaggagaaatcaagtgatcctcaaggctgatgacattgaacatgcgcatagaaacttaactcaactcctgaggtgatcttgaagatttttataccacttgaaagaggcgctcaatagtctatttccaagggatttcatggcctcttcttgaaatcaagactttttaaaagtcagacatgaacttgcatgtcatgaagatttcagcagatttgaactgtgttcaacttgtaaattgttaaaagaatttgaagtcactgtctgaggagctggtgaagagttgtttttttcagggtgatgttagagacagtcaccttttgagttattggctccagatgtgactacttttcttgtttctgcaagctgtatcccaagtgcactgtccttctgtcctggatgtgttcctgggtcctatgttcatttgctagtgggactacacatggctttaatgacatttcctttgagaacttttcctctggcatggtgtagactgagacaattttatttatatcctaatcttggagctcagaaagcctacatgttttaacatcttaaagttgcttttgttaaaggaatggaaatatatatccattggtaataatgttggcaagtaatagttatctgaataaatcaatcatataagaatgtatagacaagctgacatatttccctaaggctaacaacaccctgctgaagctctttgtcaaataggtagtagttagaactggattgccattttcattatataatactttgtacctctagagcactctccctttctgtttttttttaagtgagcttttctttaattttttatgtttacttattcccttcacagaaatcagcagtgagcagtcaagttaatgggtagccttcagtttcaaaaaaattgacagggatgcatgtgagtttctgatttcttagcttgaacattattcacttagatttcttccagtattttttaaaaaactgtcctatctcattttaaaagactttcttttgcttgatcccaatgactgtttgaatgcttatatatttgttcaatctgttgatagaaaaaattgttcattttcctcagtctcaaatttataaatatttgcttacagttttcctattcaaacaatttgttaggccaatattttgtgacatttttgtagcgattttaacgtttatggttttggttctacaggaaagtcataaatatttaaaggccttaaacatgtatgtactttttttttctaagttatagaatgtataattttgtactacatttattttgtttcatttgtgatatgaagggagagaagaaagaaaagtgcatagccattctgtaacaatattgtgtaaacctatagtttgaaggaatgcaaggagaaggatttctgtgttttactcattttaggctgttcagaagatgcttcaaaaattgtcctgttagaatttccatcatggaaggtggtatggaagaaggtatggaaatactttgtattctaaaaactcactgacgtggtcagttagacatacgttggtttccaggatagaggcccatatatcctggggagctttggtctattagtttgtgacaatattcaaaggccaaaacactactcagacactttcctgggaagagcaactaaaaatgtaaaattggttaaaaataaaatctgaaaagtatgtatctcacattgaactaaaatccactgtctcataagttcatggaatgaaatggctttctgcctccattttaatcatgcataaaatgaattagatggctttgagtggattttcacaatggctcaagactatatgaaattataaaaaaaaagttgccctggggtttctgcatcaattagaatatcattaatttctttgtaaccaagtgaaaaactatactttttggaaattatgaatttgtcctaggtttgtttgagatttgaaattatacatcatgcttctcattttttaaactatgttctttaaatcaacactggaaactctgtattatatacaagtgtaatacatgcatataatagaaaaaaaacatggaatttcaaatatactaactagattatccccagtagattaatgttgtgactattcagaaaaggtgaataaaattgggatataaaatggactctctttcataaa

SEQ ID NO: 132343 - DNA, 468 bp, Homo sapiens
  Payload ID: 5847
  Gene Symbol: FAM19A2
  Gene Name: family with sequence similarity 19 (chemokine (C-C motif)-like), member A2
  ENST ID: ENST00000549958
  CDS Start-End: 166-468
aggacttggcagccaacgttttgaaatgtaaacatccagggagatagcaactcaatctctcagtttctgtgagacgtaggagccaaacttgagcctcaaaatcaccttgtcataaagagatgagaagtttgctctcccctagagaaagccagttagcttacaccgatggtcaccccgattaccaggatgagtaagagatacttacagaaagcaacaaaaggaaaactgctaataataatatttattgtaaccttgtgggggaaagttgtatccagtgcaaaccatcataaagctcaccatgttaaaacgggaacttgtgaggtggtggcactccacagatgctgtaataagaacaagatagaagaacggtcacaaacagtcaagtgctcctgcttccctgggcaggtggcaggcaccacgcgagctgctccatcatgtgtggatgcttcaatagtggaacagaaatgg

SEQ ID NO: 132344 - DNA, 2718 bp, Homo sapiens
  Payload ID: 5847
  Gene Symbol: FAM19A2
  Gene Name: family with sequence similarity 19 (chemokine (C-C motif)-like), member A2
  Uniprot ID: Q8N3H0
  ENST ID: ENST00000551619
  CDS Start-End: 191-586
aaagtaattttctgaagggaagctgcagaatatggaaaacatatattggagctacatggatcatgtcaagttcagactgtaaggagtagatgcagtagtgaagctgtccatctcaggtgaattgaaaaagtaaagaactacaaaatgccatcattccctctctgtgttgatttctggtgaagctcagaggatgagtaagagatacttacagaaagcaacaaaaggaaaactgctaataataatatttattgtaaccttgtgggggaaagttgtatccagtgcaaaccatcataaagctcaccatgttaaaacgggaacttgtgaggtggtggcactccacagatgctgtaataagaacaagatagaagaacggtcacaaacagtcaagtgctcctgcttccctgggcaggtggcaggcaccacgcgagctgctccatcatgtgtggatgcttcaatagtggaacagaaatggtggtgccatatgcagccatgtctagagggagaagaatgtaaagttcttccggatcggaaaggatggagctgttcctctgggaataaagtcaaaacaactagggtaacccattaacccaggagaaatcaagtgatcctcaaggctgatgacattgaacatgcgcatagaaacttaactcaactcctgaggtgatcttgaagatttttataccacttgaaagaggcgctcaatagtctatttccaagggatttcatggcctcttcttgaaatcaagactttttaaaagtcagacatgaacttgcatgtcatgaagatttcagcagatttgaactgtgttcaacttgtaaattgttaaaagaatttgaagtcactgtctgaggagctggtgaagagttgtttttttcagggtgatgttagagacagtcaccttttgagttattggctccagatgtgactacttttcttgtttctgcaagctgtatcccaagtgcactgtccttctgtcctggatgtgttcctgggtcctatgttcatttgctagtgggactacacatggctttaatgacatttcctttgagaacttttcctctggcatggtgtagactgagacaattttatttatatcctaatcttggagctcagaaagcctacatgttttaacatcttaaagttgcttttgttaaaggaatggaaatatatatccattggtaataatgttggcaagtaatagttatctgaataaatcaatcatataagaatgtatagacaagctgacatatttccctaaggctaacaacaccctgctgaagctctttgtcaaataggtagtagttagaactggattgccattttcattatataatactttgtacctctagagcactctccctttctgtttttttttaagtgagcttttctttaattttttatgtttacttattcccttcacagaaatcagcagtgagcagtcaagttaatgggtagccttcagtttcaaaaaaattgacagggatgcatgtgagtttctgatttcttagcttgaacattattcacttagatttcttccagtattttttaaaaaactgtcctatctcattttaaaagactttcttttgcttgatcccaatgactgtttgaatgcttatatatttgttcaatctgttgatagaaaaaattgttcattttcctcagtctcaaatttataaatatttgcttacagttttcctattcaaacaatttgttaggccaatattttgtgacatttttgtagcgattttaacgtttatggttttggttctacaggaaagtcataaatatttaaaggccttaaacatgtatgtactttttttttctaagttatagaatgtataattttgtactacatttattttgtttcatttgtgatatgaagggagagaagaaagaaaagtgcatagccattctgtaacaatattgtgtaaacctatagtttgaaggaatgcaaggagaaggatttctgtgttttactcattttaggctgttcagaagatgcttcaaaaattgtcctgttagaatttccatcatggaaggtggtatggaagaaggtatggaaatactttgtattctaaaaactcactgacgtggtcagttagacatacgttggtttccaggatagaggcccatatatcctggggagctttggtctattagtttgtgacaatattcaaaggccaaaacactactcagacactttcctgggaagagcaactaaaaatgtaaaattggttaaaaataaaatctgaaaagtatgtatctcacattgaactaaaatccactgtctcataagttcatggaatgaaatggctttctgcctccattttaatcatgcataaaatgaattagatggctttgagtggattttcacaatggctcaagactatatgaaattataaaaaaaaagttgccctggggtttctgcatcaattagaatatcattaatttctttgtaaccaagtgaaaaactatactttttggaaattatgaatttgtcctaggtttgtttgagatttgaaattatacatcatgcttctcattttttaaactatgttctttaaatcaacactggaaactctgtattatatacaagtgtaatacatgcatataatagaaaaaaaacatggaatttcaaatatactaactagattatccccagtagattaatgttgtgactattcagaaaaggtgaataaaattgggatataaaatgg

SEQ ID NO: 132345 - DNA, 3252 bp, Homo sapiens
  Payload ID: 5847
  Gene Symbol: FAM19A2
  Gene Name: family with sequence similarity 19 (chemokine (C-C motif)-like), member A2
  ENST ID: ENST00000549379
  CDS Start-End: 490-885
gagggctctggctctctctcgctagagggatgccaccgccctgtcctcccgtcctcagcgttgccttcccctccctctttcccactgacgccttgaaaacccttatttgcgcattcactcacgcttgagggttaaaagattaagagtttctctaaccacggctaccctctaaaagtcacattttccccctttttccagtcactctctgaaagagaacaaagtaattttctgaagggaagctgcagaatatggaaaacatatattggagctacatggatcatgtcaagttcagactgtaaggagtagatgcagtagtgaagctgtccatctcaggtgaattgaaaaagtaaagaactacaaaatgccatcattccctctctgtgttgatttctggtgaagctcagagctgcatttcagagtcagaatgcactgggtgactgggggaagctgtgatgtatgaagcagaaagaagattgatttttcacaaggatgagtaagagatacttacagaaagcaacaaaaggaaaactgctaataataatatttattgtaaccttgtgggggaaagttgtatccagtgcaaaccatcataaagctcaccatgttaaaacgggaacttgtgaggtggtggcactccacagatgctgtaataagaacaagatagaagaacggtcacaaacagtcaagtgctcctgcttccctgggcaggtggcaggcaccacgcgagctgctccatcatgtgtggatgcttcaatagtggaacagaaatggtggtgccatatgcagccatgtctagagggagaagaatgtaaagttcttccggatcggaaaggatggagctgttcctctgggaataaagtcaaaacaactagggcaaacgtgtaaaactcttcaagttcgaatggagaagtagaaagagaaggtttctgctgtgcctgatgacaatttttgatttctccacactcaaaaaagttttggctccatgttggagcactagttgtggcgaatcctagtgttggtcggattctaaggaagggacagaagtttcattgagaagtaaagattcaaaacaactccagaaatgagctcccgtcttggtttaaagcagcaggtaacccattaacccaggagaaatcaagtgatcctcaaggctgatgacattgaacatgcgcatagaaacttaactcaactcctgaggtgatcttgaagatttttataccacttgaaagaggcgctcaatagtctatttccaagggatttcatggcctcttcttgaaatcaagactttttaaaagtcagacatgaacttgcatgtcatgaagatttcagcagatttgaactgtgttcaacttgtaaattgttaaaagaatttgaagtcactgtctgaggagctggtgaagagttgtttttttcagggtgatgttagagacagtcaccttttgagttattggctccagatgtgactacttttcttgtttctgcaagctgtatcccaagtgcactgtccttctgtcctggatgtgttcctgggtcctatgttcatttgctagtgggactacacatggctttaatgacatttcctttgagaacttttcctctggcatggtgtagactgagacaattttatttatatcctaatcttggagctcagaaagcctacatgttttaacatcttaaagttgcttttgttaaaggaatggaaatatatatccattggtaataatgttggcaagtaatagttatctgaataaatcaatcatataagaatgtatagacaagctgacatatttccctaaggctaacaacaccctgctgaagctctttgtcaaataggtagtagttagaactggattgccattttcattatataatactttgtacctctagagcactctccctttctgtttttttttaagtgagcttttctttaattttttatgtttacttattcccttcacagaaatcagcagtgagcagtcaagttaatgggtagccttcagtttcaaaaaaattgacagggatgcatgtgagtttctgatttcttagcttgaacattattcacttagatttcttccagtattttttaaaaaactgtcctatctcattttaaaagactttcttttgcttgatcccaatgactgtttgaatgcttatatatttgttcaatctgttgatagaaaaaattgttcattttcctcagtctcaaatttataaatatttgcttacagttttcctattcaaacaatttgttaggccaatattttgtgacatttttgtagcgattttaacgtttatggttttggttctacaggaaagtcataaatatttaaaggccttaaacatgtatgtactttttttttctaagttatagaatgtataattttgtactacatttattttgtttcatttgtgatatgaagggagagaagaaagaaaagtgcatagccattctgtaacaatattgtgtaaacctatagtttgaaggaatgcaaggagaaggatttctgtgttttactcattttaggctgttcagaagatgcttcaaaaattgtcctgttagaatttccatcatggaaggtggtatggaagaaggtatggaaatactttgtattctaaaaactcactgacgtggtcagttagacatacgttggtttccaggatagaggcccatatatcctggggagctttggtctattagtttgtgacaatattcaaaggccaaaacactactcagacactttcctgggaagagcaactaaaaatgtaaaattggttaaaaataaaatctgaaaagtatgtatctcacattgaactaaaatccactgtctcataagttcatggaatgaaatggctttctgcctccattttaatcatgcataaaatgaattagatggctttgagtggattttcacaatggctcaagactatatgaaattataaaaaaaaagttgccctggggtttctgcatcaattagaatatcattaatttctttgtaaccaagtgaaaaactatactttttggaaattatgaatttgtcctaggtttgtttgagatttgaaattatacatcatgcttctcattttttaaactatgttctttaaatcaacactggaaactctgtattatatacaagtgtaatacatgcatataatagaaaaaaaacatggaatttcaaatatactaactagattatccccagtagattaatgttgtgactattcagaaaaggtgaataaaattgggatataaaa

SEQ ID NO: 132346 - DNA, 555 bp, Homo sapiens
  Payload ID: 5847
  Gene Symbol: FAM19A2
  Gene Name: family with sequence similarity 19 (chemokine (C-C motif)-like), member A2
  ENST ID: ENST00000548780
  CDS Start-End: 294-555
gcagtgatgagtcaaatattgtctcatcagcattcatcatgatgcgtctggcataaaaaagagcattcttctcctgagacacatggggagcagggaaaagtcaatcagggtgaagaagccatgcatttcttctatacatgtatgatttctcctgagatttatgttgtttatcagttcacatcacagaataagaaaatcctcactttttaactgtctactgaccagccaaaagctcctggtaatctctattctactttctgtctcaacgaatttgactattctaggtatctctcatgatgagtaagagatacttacagaaagcaacaaaaggaaaactgctaataataatatttattgtaaccttgtgggggaaagttgtatccagtgcaaaccatcataaagctcaccatgttaaaacgggaacttgtgaggtggtggcactccacagatgctgtaataagaacaagatagaagaacggtcacaaacagtcaagtgctcctgcttccctgggcaggtggcaggcaccacgcgagctgctccatcatgtgtggatg

SEQ ID NO: 132347 - DNA, 2499 bp, Homo sapiens
  Payload ID: 5847
  Gene Symbol: FAM19A2
  Gene Name: family with sequence similarity 19 (chemokine (C-C motif)-like), member A2
  Uniprot ID: Q8N3H0
  ENST ID: ENST00000550003
  CDS Start-End: 266-370
ctctcttgttgctcaagccccttagtgtgatctcctcatctccatcatcccagatggcaaaaatgcaggggaaggagaagctcaccatgttaaaacgggaacttgtgaggtggtggcactccacagatgctgtaataagaacaagatagaagaacggtcacaaacagtcaagtgctcctgcttccctgggcaggtggcaggcaccacgcgagctgctccatcatgtgtggatgcttcaatagtggaacagaaatggtggtgccatatgcagccatgtctagagggagaagaatgtaaagttcttccggatcggaaaggatggagctgttcctctgggaataaagtcaaaacaactagggtaacccattaacccaggagaaatcaagtgatcctcaaggctgatgacattgaacatgcgcatagaaacttaactcaactcctgaggtgatcttgaagatttttataccacttgaaagaggcgctcaatagtctatttccaagggatttcatggcctcttcttgaaatcaagactttttaaaagtcagacatgaacttgcatgtcatgaagatttcagcagatttgaactgtgttcaacttgtaaattgttaaaagaatttgaagtcactgtctgaggagctggtgaagagttgtttttttcagggtgatgttagagacagtcaccttttgagttattggctccagatgtgactacttttcttgtttctgcaagctgtatcccaagtgcactgtccttctgtcctggatgtgttcctgggtcctatgttcatttgctagtgggactacacatggctttaatgacatttcctttgagaacttttcctctggcatggtgtagactgagacaattttatttatatcctaatcttggagctcagaaagcctacatgttttaacatcttaaagttgcttttgttaaaggaatggaaatatatatccattggtaataatgttggcaagtaatagttatctgaataaatcaatcatataagaatgtatagacaagctgacatatttccctaaggctaacaacaccctgctgaagctctttgtcaaataggtagtagttagaactggattgccattttcattatataatactttgtacctctagagcactctccctttctgtttttttttaagtgagcttttctttaattttttatgtttacttattcccttcacagaaatcagcagtgagcagtcaagttaatgggtagccttcagtttcaaaaaaattgacagggatgcatgtgagtttctgatttcttagcttgaacattattcacttagatttcttccagtattttttaaaaaactgtcctatctcattttaaaagactttcttttgcttgatcccaatgactgtttgaatgcttatatatttgttcaatctgttgatagaaaaaattgttcattttcctcagtctcaaatttataaatatttgcttacagttttcctattcaaacaatttgttaggccaatattttgtgacatttttgtagcgattttaacgtttatggttttggttctacaggaaagtcataaatatttaaaggccttaaacatgtatgtactttttttttctaagttatagaatgtataattttgtactacatttattttgtttcatttgtgatatgaagggagagaagaaagaaaagtgcatagccattctgtaacaatattgtgtaaacctatagtttgaaggaatgcaaggagaaggatttctgtgttttactcattttaggctgttcagaagatgcttcaaaaattgtcctgttagaatttccatcatggaaggtggtatggaagaaggtatggaaatactttgtattctaaaaactcactgacgtggtcagttagacatacgttggtttccaggatagaggcccatatatcctggggagctttggtctattagtttgtgacaatattcaaaggccaaaacactactcagacactttcctgggaagagcaactaaaaatgtaaaattggttaaaaataaaatctgaaaagtatgtatctcacattgaactaaaatccactgtctcataagttcatggaatgaaatggctttctgcctccattttaatcatgcataaaatgaattagatggctttgagtggattttcacaatggctcaagactatatgaaattataaaaaaaaagttgccctggggtttctgcatcaattagaatatcattaatttctttgtaaccaagtgaaaaactatactttttggaaattatgaatttgtcctaggtttgtttgagatttgaaattatacatcatgcttctcattttttaaactatgttctttaaatcaacactggaaactctgtattatatacaagtgtaatacatgcatataatagaaaaaaaacatggaatttcaaatatactaactagattatccccagtagattaatgttgtgactattcagaaaaggtgaataaaattgggatataaaa

SEQ ID NO: 132348 - DNA, 570 bp, Homo sapiens
  Payload ID: 5847
  Gene Symbol: FAM19A2
  Gene Name: family with sequence similarity 19 (chemokine (C-C motif)-like), member A2
  ENST ID: ENST00000552075
  CDS Start-End: 240-570
gccgggttttagctttcctcgccgccgagggctctggctctctctcgctagagggatgccaccgccctgtcctcccgtcctcagcgttgccttcccctccctctttcccactgacgccttgaaaacccttatttgcgcattcactcacgcttgagggtgagtcactctctgaaagagaacaaagtaattttctgaagggaagctgcagaatatggaaaacatatattggagctacatggatgatgagtaagagatacttacagaaagcaacaaaaggaaaactgctaataataatatttattgtaaccttgtgggggaaagttgtatccagtgcaaaccatcataaagctcaccatgttaaaacgggaacttgtgaggtggtggcactccacagatgctgtaataagaacaagatagaagaacggtcacaaacagtcaagtgctcctgcttccctgggcaggtggcaggcaccacgcgagctgctccatcatgtgtggatgcttcaatagtggaacagaaatggtggtgccatatgcagccatgtctagagggagaagaatgtaaagttc

SEQ ID NO: 132349 - DNA, 580 bp, Homo sapiens
  Payload ID: 5847
  Gene Symbol: FAM19A2
  Gene Name: family with sequence similarity 19 (chemokine (C-C motif)-like), member A2
  ENST ID: ENST00000551449
  CDS Start-End: 180-329
acactcacacgccgccctccacgatcacacagcaccagacttcggttccctatgcccctggatggtgacggcggattggcatcttggaagcgatgcgagagcgataaggctggcgccggcccgcaaaagctgcaggagcatcgctaggtgttgccgccaccgggaagcggggctgcaggatgagtaagagatacttacagaaagcaacaaaaggaaaactgctaataataatatttattgtaaccttgtgggggaaagttgtatccagtgcaaaccatcataaaggtaacccattaacccaggagaaatcaagtgatcctcaaggctgatgacattgaacatgcgcatagaaacttaactcaactcctgaggtgatcttgaagatttttataccacttgaaagaggcgctcaatagtctatttccaagggatttcatggcctcttcttgaaatcaagactttttaaaagtcagacatgaacttgcatgtcatgaagatttcagcagatttgaactgtgttcaacttgtaaattgttaaaagaatttgaagtcactgtctgaggagctggtgaagagttgt

SEQ ID NO: 132350 - DNA, 1056 bp, Homo sapiens
  Payload ID: 5848
  Gene Symbol: FAM19A3
  Gene Name: family with sequence similarity 19 (chemokine (C-C motif)-like), member A3
  Uniprot ID: Q7Z5A8
  ENST ID: ENST00000361886
  CDS Start-End: 60-461
gtggagtgagtctgaggacagcagatgaacagacagaaactgaaagatccccaaaaaggatgagtgagagggtcgagcggaactggagcacgggcggctggctgctggcactgtgcctggcctggctgtggacccacctgaccttggctgccttgcagcctcccactgccacagtgcttgtgcagcagggcacctgcgaggtgattgcggctcaccgctgctgcaaccggaaccgcatcgaggagcgctcccagacggtgaaatgctcctgtttttctggccaggtggccggcaccacgcgggcaaagccctcctgcgtggacgcctccatcgtcctgcagagatggtggtgtcagatggagccctgcctgccgggggaggagtgtaaggtgctcccggacctgtcgggatggagctgcagcagtggacacaaagtcaaaaccaccaaggtcacacgatagctcttgggggtcacggcctggacaagaaaggcttgactgagccgtgaactgaagaatggtatccagtcatcagccaggaaagatggggattcacttacatgcctcatgtcaaatgcagcatcagtctttccggggcatttcagttaagctgctcagcagatatggatggatctgcaatcacatacctaatgtggagctgggcttttctggagacacgaaggtcaacacacaattcctgcccttaaggaatgtccagttgaattggagagttgatgacagacaatttagataatttaggttaaagtacttgataccagactgcggcttctgggccacatgctatggcatgatgggggtttgggaatgagattcccacagttcttcagataccctgtggccacagggcatagaaacaagaggtcacattcagcacccaccacctccctctttcgcatcagttctgaatccccagcaagctgttaacatgttgcaggaaaacactctccccttatgccagaccagcagtatctcatttggatgggattggattgacttgcggaaggaaagtaaaaataaagccaaataacttcccaaa

SEQ ID NO: 132351 - DNA, 1282 bp, Homo sapiens
  Payload ID: 5848
  Gene Symbol: FAM19A3
  Gene Name: family with sequence similarity 19 (chemokine (C-C motif)-like), member A3
  Uniprot ID: Q7Z5A8
  ENST ID: ENST00000369630
  CDS Start-End: 218-727
gtccctgccctggcacctgagaacagcttcagaattgggctgaacttcagtgcccagcccacccccttgccctctcccaggttctccttcaccccctgcagagccatcggctccctctatcctttgcaaccccctatgaatctttcctacttgtccaggtggagtgagtctgaggacagcagatgaacagacagaaactgaaagatccccaaaaaggatgagtgagagggtcgagcggaactggagcacgggcggctggctgctggcactgtgcctggcctggctgtggacccacctgaccttggctgccttgcagcctcccactgccacagtgcttgtgcagcagggcacctgcgaggtgattgcggctcaccgctgctgcaaccggaaccgcatcgaggagcgctcccagacggtgaaatgctcctgtttttctggccaggtggccggcaccacgcgggcaaagccctcctgcgtggacgacctgctcttggctgcccactgtgctcgtagagaccctagagctgcactccgcctcctgctcccacagcctccatcgtcctgcagagatggtggtgtcagatggagccctgcctgccgggggaggagtgtaaggtgctcccggacctgtcgggatggagctgcagcagtggacacaaagtcaaaaccaccaaggtcacacgatagctcttgggggtcacggcctggacaagaaaggcttgactgagccgtgaactgaagaatggtatccagtcatcagccaggaaagatggggattcacttacatgcctcatgtcaaatgcagcatcagtctttccggggcatttcagttaagctgctcagcagatatggatggatctgcaatcacatacctaatgtggagctgggcttttctggagacacgaaggtcaacacacaattcctgcccttaaggaatgtccagttgaattggagagttgatgacagacaatttagataatttaggttaaagtacttgataccagactgcggcttctgggccacatgctatggcatgatgggggtttgggaatgagattcccacagttcttcagataccctgtggccacagggcatagaaacaagaggtcacattcagcacccaccacctccctctttcgcatcagttctgaatccccagcaagctgttaacatgttgcaggaaaacactctccccttatgccagaccagcagtatctcatttggatgggattggattgacttgcggaaggaaagtaaaaataaagccaaataacttcccaaa

SEQ ID NO: 132352 - DNA, 2292 bp, Homo sapiens
  Payload ID: 5849
  Gene Symbol: FAM19A4
  Gene Name: family with sequence similarity 19 (chemokine (C-C motif)-like), member A4
  Uniprot ID: Q96LR4
  ENST ID: ENST00000295569
  CDS Start-End: 494-916
aatcagcgcgttccgcggcgggcccggcccctcctggtcagcgcgctagctgggctcggctccgcactgctagctgcgcgccgccctggacggggcgcaccgactgcgcgcgcggctgcgggcaaacatcgggagtcctgcctcagctgccgcttctccagcagcagcttcaggcttctcccgcaggagcttcgggcttctcctggtagagacgtgggaacttttcttctcctggcgaggctgcagaggtgatgggccgctcccggggctcccgcggggaggcggcacggtgagcgtcctcgggctccggtgcggcgatcagtacctagttccggacgcgccggtccgacttggatgccggctctagtcgagtcttctgagctacgataattttttggaacggcagaaatgattggttctagcaacagatgggaatttggagtcactctgaaatatatcctggaataagtgtgtttgactagaaccacatcttatgaggtccccaaggatgagagtctgtgctaagtcagtgttgctgtcgcactggctctttctagcctacgtgttaatggtgtgctgtaagctgatgtccgcctcaagccagcacctccggggacatgcaggtcaccaccaaatcaagcaagggacctgtgaggtggtcgccgtgcacaggtgctgcaataagaaccgcatagaagagcggtcacaaacggtcaagtgctcttgcttcccgggacaggtggcgggcacaactcgggctcaaccttcttgtgttgaagcttccattgtgattcagaaatggtggtgtcacatgaatccgtgtttggaaggagaggattgtaaagtgctgccagattactcaggttggtcctgtagcagtggcaataaagtcaaaactacgaaggtaacgcggtagcgaagagagaggtgtgcttcaatcctggaggggcagcaggaggcggagctcttttgcttggattcccatcatggcccctttgcagaaaattgtctaggatttcagcaacttcatatttgtatatgtgagctgtgagaggtggcattcacttaactggcccagccctctctgcttcgtgattttatttcattgaattataaccacaagccaccacccatttgacatcctctctggattcccaaggagcatacctccaaaatccgagaagagcaaatcagagtcttcaaaatggatcaccactaagggcatgttcattcttcactttctttctgcttttacaaaagaacttggatgtatgttccaaagggtcctcattctgttcctcttttgaacttttccttttgtccttgtattaaagtggttttaaaggggtctaaaaagattttggcaaaacatatttgcagatgtagattagctggtgaagaaaattactgctagagatcaactgattaactggtaaagaacgtttattttataacccttgaagaatagaaggacatagttggattattgtgtgtgcattgtatttttacttctattttttttttgctttccattttccagttagcagagataaaatgagagcgttttaacttcaatgtaccattttactgagtgctaaggaagcatatcaattccaatattttataaccaaagctctatcagaacatatttataaaacttgttggaatttttacggcttttgtgtagtcatgtaggtaaatcatttaaaatataaaacaatctcaatttagatcaagggttatttcttagatcaaatttatgccaattatatgaaaagattttaactccgagacaggagtctttcagtgctgaatttttagactgtaaatgagttcttcttaacttagctgtttccctacttctgtgacttctgtgttagccatcttatttctttaaaatctgagtcctgattggcttaatgattttgcagcagacatgtctccacatattctcaaatgctgtcatgcggaaacgtatgaaacagatgaagaatgactgacccagattttagatgtataatgttgttaaagtacatactactgtaaaaatatgggatgaattttatatattaagaaatgccaaaaacatagtttctgcaccaagttaattatccctgtcctttcacatttatagggggaaaataaatactttaatgttgtttatagcctaacagttatttgattttattcttgcagagggaatggaaaggaatggaaagatttgttggcgtaatttttgaatatttgttatgatcatatgaataagtaaaaaaattcatcctgctgatggca

SEQ ID NO: 132353 - DNA, 602 bp, Homo sapiens
  Payload ID: 5849
  Gene Symbol: FAM19A4
  Gene Name: family with sequence similarity 19 (chemokine (C-C motif)-like), member A4
  ENST ID: ENST00000495737
  CDS Start-End: 370-602
gcgctagctgggctcggctccgcactgctagctgcgcgccgccctggacggggcgcaccgactgcgcgcgcggctgcgggcaaacatcgggagtcctgcctcagctgccgcttctccagcagcagcttcaggcttctcccgcaggagcttcgggcttctcctggtagagacgtgggaacttttcttctcctggcgaggctgcagaggtgatgggccgctcccggggctcccgcggggaggcggcacggtcttctgagctacgataattttttggaacggcagaaatgattggttctagcaacagatgggaatttggagtcactctgaaatatatcctggaataagtgtgtttgactagaaccacatcttatgaggtccccaaggatgagagtctgtgctaagtcagtgttgctgtcgcactggctctttctagcctacgtgttaatggtgtgctgtaagctgatgtccgcctcaagccagcacctccggggacatgcaggtcaccaccaaatcaagcaagggacctgtgaggtggtcgccgtgcacaggtgctgcaataagaaccgcatagaagagcggtcacaaacggtcaagtgctcttg

SEQ ID NO: 132354 - DNA, 1300 bp, Homo sapiens
  Payload ID: 5849
  Gene Symbol: FAM19A4
  Gene Name: family with sequence similarity 19 (chemokine (C-C motif)-like), member A4
  ENST ID: ENST00000634242
  CDS Start-End: 1128-1300
gggggcagtgaatgaatttggcatttatttccttaaacttgtaaggaaagtgaaagtgtaaagataagaaatatgactttaaaataaaaaagtctttggttgtaatcattcgtcatgcctctgatacagatttccagtcttagatataaatatttcaggatcgagacgctttcatctttctctgccttgcaagaagggaagattggaaacaatcttccttaaagtaagcagctttaatcattgtttctaaatcaactgaactgtgtagggaaaaaaagaagatgtaagaatcctataatccctggtttagttgtaatgaaaatgtccaggctgagaagggaacagatggattttgattaatttctactaagaccagcaagtatcaacctcaatattctttataaacttgtcagggtaaatgttatgtagtcataagagaatgaagaaaaaaagatttataactgggttatgaagagttaaagaggatatacttaaaaacacgatccttagcaacatgtcaaaaatgcagattcattgaatcacggcaatttttttcagagactgtttcagatttgttcctttaaaacgaagttgatatttttaagaagaggacttgtacccattgccttgggtatccagtgcagtgggccacaacatacccactacataggcttaacggtatagagtgatatatttacatagaggaaatggagaattattaatgaactatgtgatcgttgtgcctcccatcactggaatgtggaaacgtatatttactgcctgaaatgacttcacttgctgagctctgaaccacagtatttcataaatgattaacattagatggagtcagtgggaacctcacaacatttcttaaacagcattccacaagaaagaatttctcacaattgtaaggacttgcatgctggagagaaggcaagcaaggaacaaacagcactgtaaattgaataccagcagctcacgacttgaactgccattggaacccaggtcttctgagctacgataattttttggaacggcagaaatgattggttctagcaacagatgggaatttggagtcactctgaaatatatcctggaataagtgtgtttgactagaaccacatcttatgaggtccccaaggatgagagtctgtgctaagtcagtgttgctgtcgcactggctctttctagcctacgtgttaatggtgtgctgtaagctgatgtccgcctcaagccagcacctccggggacatgcaggtcaccaccaaatcaagcaagggacctgtgaggtggtcgccgt

SEQ ID NO: 132355 - DNA, 546 bp, Homo sapiens
  Payload ID: 5850
  Gene Symbol: FAM19A5
  Gene Name: family with sequence similarity 19 (chemokine (C-C motif)-like), member A5
  ENST ID: ENST00000336769
  CDS Start-End: 2-546
aatggcgccatcgcccaggaccggcagccggcaagatgcgaccgccctgcccagcatgtcctcaactttctgggcgttcatgatcctggccagcctgctcatcgcctactgcagtcagctggccgccggcacctgtgagattgtgaccttggaccgggacagcagccagcctcggaggacgatcgcccggcagaccgcccgctgtgcgtgtagaaaggggcagatcgccggcaccacgagagcccggcccgcctgtgtggacgcaagaatcatcaagaccaagcagtggtgtgacatgcttccgtgtctggagggggaaggctgcgacttgttaatcaaccggtcaggctggacgtgcacgcagcccggcgggaggataaagaccaccacgtcaccctccaaacctcccaagagggcaccgccaggaatccccagctgcagacagagggctggcggctccctgggctccagagatcttcgcacatccctgctctgccagggctcccaccttgcagacaggagaaggtggctgaggcccagccagag

SEQ ID NO: 132356 - DNA, 2638 bp, Homo sapiens
  Payload ID: 5850
  Gene Symbol: FAM19A5
  Gene Name: family with sequence similarity 19 (chemokine (C-C motif)-like), member A5
  Uniprot ID: Q7Z5A7
  ENST ID: ENST00000358295
  CDS Start-End: 176-553
aaagacacaaatcgcctcccggagtggcgcctccagtcgcggcggagcgcggcgttggcggcggatggagggcgcgagcgggcggccgcggaggctgcacccggcggggcgctgatgcggcgcctggaccttcgctgcgcgacttcgggggcgtcggccgagttgggactccgcgatgcagctcctgaaggcgctctgggcactggcaggggccgcgctctgctgcttcctcgtcctagtgatccacgcgcagttcctcaaagaaggtcagctggccgccggcacctgtgagattgtgaccttggaccgggacagcagccagcctcggaggacgatcgcccggcagaccgcccgctgtgcgtgtagaaaggggcagatcgccggcaccacgagagcccggcccgcctgtgtggacgcaagaatcatcaagaccaagcagtggtgtgacatgcttccgtgtctggagggggaaggctgcgacttgttaatcaaccggtcaggctggacgtgcacgcagcccggcgggaggataaagaccaccacggtctcctgacaaacacagcccctgaggggccccgggagtggccttggctccctggagagcccacgtctcagccacagttctccactcgcctcggacttcacccgttctctgccgcccgcccactccgtttccctgtggtccgtgaaggacggcctcaggccttggcatcctgagcttcggtctgtccagccgacccgaggaggccggactcagacacataggcggggggcggcacctggcatcagcaatacgcagtctgtgggagcccggccgcgcccagcccccgccgaccgtggcgttggccctgctgtcctcagaggaggaggaggaggaggcagctccggcagccacagaaggctgcagcccagcccgcctgagacacgacgcctgccccaggggactgtcaggcacagaagcggcctcctcccgtgccccagactgtccgaattgcttttattttcttatactttcagtatactccatagaccaaagagcaaaatctatctgaacctggacgcaccctcactgtcagggtccctggggtcgcttgtgcgggcgggagggcaatggtggcagagacatgctggtggccccggcggagcggagagggcggccgtggtggaggcctccaccccaggagcaccccgcgcaccctcggaggacgggcttcggctgcgcggaggccgtggcacacctgcgggaggcagcgacggcccccacgcagacgccgggaacgcaggccgctttattcctctgtacttagatcaacttgaccgtactaaaatccctttctgttttaaccagttaaacatgcctcttctacagctccatttttgatagttggataatccagtatctgccaagagcatgttgggtctcccgtgactgctgcctcatcgataccccatttagctccagaaagcaaagaaaactcgagtaacacttgtttgaaagagatcattaaatgtattttgcaaagcctaaagttatatatttaacagtttttatatgttgtatatttgtagaaaatcctatttaacaattaacgtggcagtcccggccgtcctgagagtcgggccgagccccgtgtgtttctgaagactctgggggtgggacacggcggggaggtggtgccccgcggaccccggggtgccaggcacggaaggcgggactctgggagaagcgtgcggaggaccgtggcgtcggcgtcccggatgtgtcggtcgtgcccggggaggccgggttcccctcgctgcgggccaggcttggctcctgattccctctctggtccctgtattggtcaacacttgagcgtacaatatcttgaacatgcttcttccaatgggttttgtttcccatttcctgcccctttcgccactcacggaccttgaggccagttgacggcccttctccccacgcctgtgtccccgcgttctgagaagtcctctgtcttcgtgtcactaggtccagaaagtcgcgccgggcagaggcgcaggcggggccggcagggccgaggaataagcgacaattctggtttttctcccctggccgtcgttcgccagcctccttcattttcctgagttcccgctgaagtatatactacctatgagtccaattaacatgagtattatgctagttctatcctactaaaaaaaacgtaaaaaaataactatatagaagctgttccagcaaccatagactgaagatacgaaagaaaatccatttatttaagacctgttccggtatccatgaggacataatttacctttcagtcaccacaaatttataggcatttgtatcctggactaaaagaaggggctgaggttgggtttgtcatcacagagggggtgggcctggaaagggtccttcccaagctgccccggctccggcggcccgggccggcagcctctgccagccagcgtcctcacggcctccccctcgcctgtttcttttgaaagcaagtgtagacaccttcgagggcagagatcgggagatttaagatgttacagcatatttttttttcttgttttacagtattcaattttgtgttgattcagctaaattatgaaaaataaagaaaaactcctttgataa

SEQ ID NO: 132357 - DNA, 1508 bp, Homo sapiens
  Payload ID: 5850
  Gene Symbol: FAM19A5
  Gene Name: family with sequence similarity 19 (chemokine (C-C motif)-like), member A5
  Uniprot ID: Q7Z5A7
  ENST ID: ENST00000402357
  CDS Start-End: 134-532
gggcccgggcgcggcggcggcggcggcggaggatggcgcgcgcggggcccgcacgtggaggccggcgcgggggcgcgggcagggccggctgctgagacgcgctgctgccccccgcgcgggcgccgcggcttcaatggcgccatcgcccaggaccggcagccggcaagatgcgaccgccctgcccagcatgtcctcaactttctgggcgttcatgatcctggccagcctgctcatcgcctactgcagtcagctggccgccggcacctgtgagattgtgaccttggaccgggacagcagccagcctcggaggacgatcgcccggcagaccgcccgctgtgcgtgtagaaaggggcagatcgccggcaccacgagagcccggcccgcctgtgtggacgcaagaatcatcaagaccaagcagtggtgtgacatgcttccgtgtctggagggggaaggctgcgacttgttaatcaaccggtcaggctggacgtgcacgcagcccggcgggaggataaagaccaccacggtctcctgacaaacacagcccctgaggggccccgggagtggccttggctccctggagagcccacgtctcagccacagttctccactcgcctcggacttcacccgttctctgccgcccgcccactccgtttccctgtggtccgtgaaggacggcctcaggccttggcatcctgagcttcggtctgtccagccgacccgaggaggccggactcagacacataggcggggggcggcacctggcatcagcaatacgcagtctgtgggagcccggccgcgcccagcccccgccgaccgtggcgttggccctgctgtcctcagaggaggaggaggaggaggcagctccggcagccacagaaggctgcagcccagcccgcctgagacacgacgcctgccccaggggactgtcaggcacagaagcggcctcctcccgtgccccagactgtccgaattgcttttattttcttatactttcagtatactccatagaccaaagagcaaaatctatctgaacctggacgcaccctcactgtcagggtccctggggtcgcttgtgcgggcgggagggcaatggtggcagagacatgctggtggccccggcggagcggagagggcggccgtggtggaggcctccaccccaggagcaccccgcgcaccctcggaggacgggcttcggctgcgcggaggccgtggcacacctgcgggaggcagcgacggcccccacgcagacgccgggaacgcaggccgctttattcctctgtacttagatcaacttgaccgtactaaaatccctttctgttttaaccagttaaacatgcctcttctacagctccatttttgatagttggataatccagtatctgccaagagcatgttgggtctcccgtgactgctgcctcatcgataccccatttagctccagaaagcaaagaaaactcgagtaacacttgtttgaaagagatcattaaatgtattttgcaaagcctaaa

SEQ ID NO: 132358 - DNA, 833 bp, Homo sapiens
  Payload ID: 5850
  Gene Symbol: FAM19A5
  Gene Name: family with sequence similarity 19 (chemokine (C-C motif)-like), member A5
  Uniprot ID: Q7Z5A7
  ENST ID: ENST00000406880
  CDS Start-End: 111-272
gccatgaaaatgctcagaccttttcatcccataattctgctcccagaaatttgccctaagagagtaattgaaaggaagagggaaaaaccaggaaagcacaaacacccgaaatgtaccaccaccgggaatggccagcaagaatcatcaagaccaagcagtggtgtgacatgcttccgtgtctggagggggaaggctgcgacttgttaatcaaccggtcaggctggacgtgcacgcagcccggcgggaggataaagaccaccacggtctcctgacaaacacagcccctgaggggccccgggagtggccttggctccctggagagcccacgtctcagccacagttctccactcgcctcggacttcacccgttctctgccgcccgcccactccgtttccctgtggtccgtgaaggacggcctcaggccttggcatcctgagcttcggtctgtccagccgacccgaggaggccggactcagacacataggcggggggcggcacctggcatcagcaatacgcagtctgtgggagcccggccgcgcccagcccccgccgaccgtggcgttggccctgctgtcctcagaggaggaggaggaggaggcagctccggcagccacagaaggctgcagcccagcccgcctgagacacgacgcctgccccaggggactgtcaggcacagaagcggcctcctcccgtgccccagactgtccgaattgcttttattttcttatactttcagtatactccatagaccaaagagcaaaatctatctgaacctggacgcaccctcactgtcagggtccctggggtcgcttgtgcgggcgggagggcaatgg

SEQ ID NO: 132359 - DNA, 2848 bp, Homo sapiens
  Payload ID: 5851
  Gene Symbol: FAM192A
  Gene Name: family with sequence similarity 192, member A
  Uniprot ID: Q9GZU8
  ENST ID: ENST00000309137
  CDS Start-End: 260-1024
gtcgccggaagtggggcgggactctattgtggcggtgaggaacaggaagccctgaagggtcaaaagaaatacaaaagcaaaggctattttctttttttttttctttctttcattcattccttcctctgtttctttctttcttcctttcatttttttttcttttttaagagcgagcggctctgcggtggcggtttggggtgggcgccgccgaggtgaggtcgtctcgcctcccgcgcgccggtagattggttgtttcattatggatggaggggatgatggtaaccttattatcaaaaagaggtttgtgtctgaggcagaactagatgaacggcgcaaaaggaggcaagaagaatgggagaaagttcgaaaacctgaagatccagaagaatgtccagaggaggtttatgaccctcgatctctatatgaaaggctacaggaacagaaggacaggaagcagcaggagtacgaggaacagttcaaattcaaaaacatggtaagaggcttagatgaagatgagaccaacttccttgatgaggtttctcgacagcaggaactaatagaaaagcaacgaagagaagaagaactgaaagaactgaaggaatacagaaataacctcaagaaggttggaatttctcaagagaacaagaaggaagtggaaaagaaactgactgtgaagcctatagaaaccaagaacaagttctcccaggcgaagctgttggcaggagctgtgaagcataagagctcagagagtggcaacagtgtgaaaagactgaaaccggaccctgagccagatgacaagaatcaagagccctcatcctgcaagtctctcggaaacacctccctgagtggcccctccatccactgcccctctgctgcagtatgtatcggcatcctcccaggcctgggtgcctactctgggagcagcgactccgagtccagctcagacagcgaaggcaccatcaatgccaccggaaagattgtctcctccatcttccgaaccaacaccttcctcgaggccccctagtttctccgtccctacacagggagctcctccccaagggtagatcggaccgttcatgctgcctataggcattatgtccctcaaaaaaaaactcctttgcctgcatcctgtgtacaacatgacatttttaaccaatccaatctaaaaatgtgccagaatccacctgtggcccgaatcgtgtttggttcctctttctactccactgcagatgaccaaacctgtcccgctgccactttcctcactgatattgggaggagggcaaggcccagccgaagttccactaaaaatgccccaggagaataggcaccggctggcttgccaaagggtttgggttttattgctttctgttttttcttttcccgacagcacaaagaagtaagggcagttattggacaggtgttatttaaacattctattgtaaatgaatgtgttgtttggttctactgcattgtggagcatgcgggggaagagaactgacccaggtagtgaaatggagcccttccctggaactaaccagtccttgatgttgtgtgactaagtaaagatgataaaccccatctgctgggggtgtcacttcacactcggcatgcattgtgaaagctttccatacccttggccattccctctctcctctctctccaaccccatttatgcaggaagggactgctaacaagaacgcttccatctcaaaccttttctctgcctgggaaattattttatgtttgtttttgaaataaaggatttagtttaagattctaaattttagagaaacaaacgtaggccttgtttactaatagccagacatcagaactgcaggtaggtatgttaatgagatgacttatttctggcagctcctggaatcctaatattgtaaatgagtgggacacacttgcatattgtgaccattctattgaggcccttctctgtttaatgcatattatacttgtgcttttaactgtggaatctatttctaacctaaaggtgctgccctagtacttttctttgctgcctctgctgctctttttcctttccaaacagcaactctgaggccatgagcagccaaaaactagaggtactgctccacctcgtctcataaagggaaacgggctcatcccttggattctggaggagggagagggagatggtgtggaggcctcgaggacagagatagacatgagctttgacaacaatctgtaggctctcctgctttagaataagcatgtaccattctttatccattccccttattcctacatcaattgtttttactttcttgggtgtgagactgagtgagacacacacaaaatgtgttgacactgtgatgccggcaggcagagcagctactgactttgaacatgggcagagaggcccctggatctcatccagcccactccttttccccttccagtacagtgacactctggtgcccattggcagatggcgacttccctgcacccataactgatgctttgtgaattcttcctccttttcagaactactctgtgctaattgttctgccagtatgggcgcatcagctccatcctgacaaacaagacatttaggtaaaactttgtaggcaccttctgcttctctgcttcattgttcctgtgatagtcctgttgttattacagcatgtacccaaaacagcctcacattgttacaggaggcaggccaggacatcaaagtcatcatctttatgtggcatgactcttaagaggccattactgtatctcatggcctcttgatgtggaaagaagttgacagagggttgcagggtttaaaaacatccattaacatgaaagctaataaacctgtcagagaacaaga

SEQ ID NO: 132360 - DNA, 1017 bp, Homo sapiens
  Payload ID: 5851
  Gene Symbol: FAM192A
  Gene Name: family with sequence similarity 192, member A
  Uniprot ID: Q9GZU8
  ENST ID: ENST00000389447
  CDS Start-End: 28-792
tttgttttgtagattggttgtttcattatggatggaggggatgatggtaaccttattatcaaaaagaggtttgtgtctgaggcagaactagatgaacggcgcaaaaggaggcaagaagaatgggagaaagttcgaaaacctgaagatccagaagaatgtccagaggaggtttatgaccctcgatctctatatgaaaggctacaggaacagaaggacaggaagcagcaggagtacgaggaacagttcaaattcaaaaacatggtaagaggcttagatgaagatgagaccaacttccttgatgaggtttctcgacagcaggaactaatagaaaagcaacgaagagaagaagaactgaaagaactgaaggaatacagaaataacctcaagaaggttggaatttctcaagagaacaagaaggaagtggaaaagaaactgactgtgaagcctatagaaaccaagaacaagttctcccaggcgaagctgttggcaggagctgtgaagcataagagctcagagagtggcaacagtgtgaaaagactgaaaccggaccctgagccagatgacaagaatcaagagccctcatcctgcaagtctctcggaaacacctccctgagtggcccctccatccactgcccctctgctgcagtatgtatcggcatcctcccaggcctgggtgcctactctgggagcagcgactccgagtccagctcagacagcgaaggcaccatcaatgccaccggaaagattgtctcctccatcttccgaaccaacaccttcctcgaggccccctagtttctccgtccctacacagggagctcctccccaagggtagatcggaccgttcatgctgcctataggcattatgtccctcaaaaaaaaactcctttgcctgcatcctgtgtacaacatgacatttttaaccaatccaatctaaaaatgtgccagaatgaaatggagcccttccctggaactaaccagtccttgatgttgtgtgactaagtaaagatgataaacccc

SEQ ID NO: 132361 - DNA, 597 bp, Homo sapiens
  Payload ID: 5851
  Gene Symbol: FAM192A
  Gene Name: family with sequence similarity 192, member A
  ENST ID: ENST00000562324
  CDS Start-End: 102-597
accggatttccatcgggctcccggggaggaagagctccgcggattgggttacgtcgccggaagtggggcgggactctattgtggcgattggttgtttcattatggatggaggggatgatggtaaccttattatcaaaaagaggtttgtgtctgaggcagaactagatgaacggcgcaaaaggaggcaagaagaatgggagaaagttcgaaaacctgaagatccagaagaatgtccagaggaggtttatgaccctcgatctctatatgaaaggctacaggaacagaaggacaggaagcagcaggagtacgaggaacagttcaaattcaaaaacatggtaagaggcttagatgaagatgagaccaacttccttgatgaggtttctcgacagcaggaactaatagaaaagcaacgaagagaagaagaactgaaagaactgaaggaatacagaaataacctcaagaaggttggaatttctcaagagaacaagaaggaagtggaaaagaaactgactgtgaagcctatagaaaccaagaacaagttctcccaggcgaagctgttggcaggagctgtgaagcataagagctcagagagtggca

SEQ ID NO: 132362 - DNA, 593 bp, Homo sapiens
  Payload ID: 5851
  Gene Symbol: FAM192A
  Gene Name: family with sequence similarity 192, member A
  ENST ID: ENST00000570184
  CDS Start-End: 401-593
gtcgccggaagtggggcgggactctattgtggcgaataaacagccattggactcttcaaacaaaaacgctgtctccatcaagtactgctttcgcaggataagtgaccatttttaatcagttgaaattaacggaaagtagcagttatttttgaaagatgacatcaattatataatatagtaaagagatttaatttttagtcctttgtttcttactgcacaaattgtatggcgtttgaatagaattcccatgatactgacacttcagcaaatacttgcttgatggctaccaatctctataacttacattgcacagtacctaggaatattcatgtgagttcattcctccctgctcagattcttcagctcctcgtggttggtttattcaattggttgtttcattatggatggaggggatgatggtaaccttattatcaaaaagaggtttgtgtctgaggcagaactagatgaacggcgcaaaaggaggcaagaagaatgggagaaagttcgaaaacctgaagatccagaagaatgtccagaggaggtttatgaccctcgatctctatatgaaaggctacaggaacagaaggacagga

SEQ ID NO: 132363 - DNA, 618 bp, Homo sapiens
  Payload ID: 5851
  Gene Symbol: FAM192A
  Gene Name: family with sequence similarity 192, member A
  ENST ID: ENST00000565956
  CDS Start-End: 1-463
gaacggcgcaaaaggaggcaagaagaatgggagaaagttcgaaaacctgaagatccagaaggttggaatttctcaagagaacaagaaggaagtggaaaagaaactgactgtgaagcctatagaaaccaagaacaagttctcccaggcgaagctgttggcaggagctgtgaagcataagagctcagagagtggcaacagtgtgaaaagactgaaaccggaccctgagccagatgacaagaatcaagagccctcatcctgcaagtctctcggaaacacctccctgagtggcccctccatccactgcccctctgctgcagtatgtatcggcatcctcccaggcctgggtgcctactctgggagcagcgactccgagtccagctcagacagcgaaggcaccatcaatgccaccggaaagattgtctcctccatcttccgaaccaacaccttcctcgaggccccctagtttctccgtccctacacagggagctcctccccaagggtagatcggaccgttcatgctgcctataggcattatgtccctcaaaaaaaaactcctttgcctgcatcctgtgtacaacatgacatttttaaccaatccaatctaaaaatgtgccagaa

SEQ ID NO: 132364 - DNA, 1396 bp, Homo sapiens
  Payload ID: 5851
  Gene Symbol: FAM192A
  Gene Name: family with sequence similarity 192, member A
  ENST ID: ENST00000566403
  CDS Start-End: 168-413
ggttctcagctctaccattcaccacctgtatcaccttagacaaataatctaactcctctggacctcaacttcatctgtaaacagataatatttctcatagggtcaatgatcatgtaaattagataatatccataaaaggaatataatacatgattggttgtttcattatggatggaggggatgatggtaaccttattatcaaaaagaggtttgtgtctgaggcagaactagatgaacggcgcaaaaggaggcaagaagaatgggagaaagttcgaaaacctgaagatccagaagaatgtccagaggaggtttatgaccctcgatctctatatgaaaggctacaggaacagaaggacaggaagcagcaggagtacgaggaacagttcaaattcaaaaacatgtttgacccttaactggtaactcacaataacctcaagaaggttggaatttctcaagagaacaagaaggaagtggaaaagaaactgactgtgaagcctatagaaaccaagaacaagttctcccaggcgaagctgttggcaggagctgtgaagcataagagctcagagagtggcaacagtgtgaaaagactgaaaccggaccctgagccagatgacaagaatcaagagccctcatcctgcaagtctctcggaaacacctccctgagtggcccctccatccactgcccctctgctgcagtatgtatcggcatcctcccaggcctgggtgcctactctgggagcagcgactccgagtccagctcagacagcgaaggcaccatcaatgccaccggaaagattgtctcctccatcttccgaaccaacaccttcctcgaggccccctagtttctccgtccctacacagggagctcctccccaagggtagatcggaccgttcatgctgcctataggcattatgtccctcaaaaaaaaactcctttgcctgcatcctgtgtacaacatgacatttttaaccaatccaatctaaaaatgtgccagaatccacctgtggcccgaatcgtgtttggttcctctttctactccactgcagatgaccaaacctgtcccgctgccactttcctcactgatattgggaggagggcaaggcccagccgaagttccactaaaaatgccccaggagaataggcaccggctggcttgccaaagggtttgggttttattgctttctgttttttcttttcccgacagcacaaagaagtaagggcagttattggacaggtgttatttaaacattctattgtaaatgaatgtgttgtttggttctactgcattgtggagcatgcgggggaagagaactgacccaggtagtgaaatggagcccttccctggaactaaccagtccttgatgttgtgtgactaagtaaagatgataaacccca

SEQ ID NO: 132365 - DNA, 1029 bp, Homo sapiens
  Payload ID: 5851
  Gene Symbol: FAM192A
  Gene Name: family with sequence similarity 192, member A
  ENST ID: ENST00000565458
  CDS Start-End: 586-1029
attgtggcggtgaggaacaggaagccctgaagggtcaaaagaaatacaaaagcaaaggctattttctttttttttttctttctttcattcattccttcctctgtttctttctttcttcctttcatttttttttcttttttaagagcgagcggctctgcggtggcggtttggggtgggcgccgccgaggtgaggtcgtctcgcctcccgcgcgccggtagaataaacagccattggactcttcaaacaaaaacgctgtctccatcaagtactgctttcgcaggataagtgaccatttttaatcagttgaaattaacggaaagtagcagttatttttgaaagatgacatcaattatataatatagtaaagagatttaatttttagtcctttgtttcttactgcacaaattgtatggcgtttgaatagaattcccatgatactgacacttcagcaaatacttgcttgatggctaccaatctctataacttacattgcacagtacctaggaatattcatgtgagttcattcctccctgctcagattcttcagctcctcgtggttggtttattcaattggttgtttcattatggatggaggggatgatggtaaccttattatcaaaaagaggtttgtgtctgaggcagaactagatgaacggcgcaaaaggaggcaagaagaatgggagaaagttcgaaaacctgaagatccagaagaatgtccagaggaggtttatgaccctcgatctctatatgaaaggctacaggaacagaaggacaggaagcagcaggagtacgaggaacagttcaaattcaaaaacatggtaagaggcttagatgaagatgagaccaacttccttgatgaggtttctcgacagcaggaactaatagaaaagcaacgaagagaagaagaactgaaagaactgaaggaatacagaaataacctcaagaaggttggaatttctcaagagaacaagaaggaagtggaaaagaaactgactgtgaagcctatagaaaccaagaacaagttctcc

SEQ ID NO: 132366 - DNA, 621 bp, Homo sapiens
  Payload ID: 5851
  Gene Symbol: FAM192A
  Gene Name: family with sequence similarity 192, member A
  ENST ID: ENST00000566681
  CDS Start-End: 540-621
attgtggcggtgaggaacaggaagccctgaagggtcaaaagaaatacaaaagcaaaggctattttctttttttttttctttctttcattcattccttcctctgtttctttctttcttcctttcatttttttttcttttttaagagcgagcggctctgcggtggcggtttggggtgggcgccgccgaggtgaggtcgtctcgcctcccgcgcgccggtagaataaacagccattggactcttcaaacaaaaacgctgtctccatcaagtactgctttcgcaggataagtgaccatttttaatcagttgaaattaacggaaagtagcagttatttttgaaagatgacatcaattatataatatagcctggatttggttctcagctctaccattcaccacctgtatcaccttagacaaataatctaactcctctggacctcaacttcatctgtaaacagataatatttctcatagggtcaatgatcatgtaaattagataatatccataaaaggaatataatacatgattggttgtttcattatggatggaggggatgatggtaaccttattatcaaaaagaggtttgtgtctgaggcagaactagatgaacggcgcaaaagga

SEQ ID NO: 132367 - DNA, 356 bp, Homo sapiens
  Payload ID: 5851
  Gene Symbol: FAM192A
  Gene Name: family with sequence similarity 192, member A
  ENST ID: ENST00000564424
  CDS Start-End: 283-356
gggagtgagaaaagagaaggattgaagttcaaatcttaaatggcacagacaaggggtttacagggaggaaggtcagaagagatataaatgaagagtcagattagtattcaggaaagtacgtggaactgaagttgggagatctgttcttccagtctcactttctccattcatggtttgtgcaccttccctgctatacagactggacttgaacactaagtcttcaatagctgagattctccatcttaatctacttggaggcaagagcagattggttgtttcattatggatggaggggatgatggtaaccttattatcaaaaagaggtttgtgtctgaggcagaactagatgaacggcg

SEQ ID NO: 132368 - DNA, 658 bp, Homo sapiens
  Payload ID: 5851
  Gene Symbol: FAM192A
  Gene Name: family with sequence similarity 192, member A
  ENST ID: ENST00000565760
  CDS Start-End: 369-658
agtggggcgggactctattgtggcggtgaggaacaggaagccctgaagggtcaaaagaaatacaaaagcaaaggctattttctttttttttttctttctttcattcattccttcctctgtttctttctttcttcctttcatttttttttcttttttaagagcgagcggctctgcggtggcggtttggggtgggcgccgccgaggtgaggtcgtctcgcctcccgcgcgccggtagaatcttgccctgtcgctcaagctggggtgcagcggtgtgatcttggctcactgcaacctccgcctcccaggttcaagcgattctcctgcctcagcctcctgagtagctgggattacagattggttgtttcattatggatggaggggatgatggtaaccttattatcaaaaagaggtttgtgtctgaggcagaactagatgaacggcgcaaaaggaggcaagaagaatgggagaaagttcgaaaacctgaagatccagaagaatgtccagaggaggtttatgaccctcgatctctatatgaaaggctacaggaacagaaggacaggaagcagcaggagtacgaggaacagttcaaattcaaaaacatggtaagaggcttagatgaagatgagaccaacttccttgatgaggtttctcgacagca

SEQ ID NO: 132369 - DNA, 1055 bp, Homo sapiens
  Payload ID: 5851
  Gene Symbol: FAM192A
  Gene Name: family with sequence similarity 192, member A
  Uniprot ID: Q9GZU8
  ENST ID: ENST00000564108
  CDS Start-End: 280-1044
cggtgaggaacaggaagccctgaagggtcaaaagaaatacaaaagcaaaggctattttctttttttttttctttctttcattcattccttcctctgtttctttctttcttcctttcatttttttttcttttttaagagcgagcggctctgcggtggcggtttggggtgggcgccgccgaggtgaggtcgtctcgcctcccgcgcgccggtagggtcaatgatcatgtaaattagataatatccataaaaggaatataatacatgattggttgtttcattatggatggaggggatgatggtaaccttattatcaaaaagaggtttgtgtctgaggcagaactagatgaacggcgcaaaaggaggcaagaagaatgggagaaagttcgaaaacctgaagatccagaagaatgtccagaggaggtttatgaccctcgatctctatatgaaaggctacaggaacagaaggacaggaagcagcaggagtacgaggaacagttcaaattcaaaaacatggtaagaggcttagatgaagatgagaccaacttccttgatgaggtttctcgacagcaggaactaatagaaaagcaacgaagagaagaagaactgaaagaactgaaggaatacagaaataacctcaagaaggttggaatttctcaagagaacaagaaggaagtggaaaagaaactgactgtgaagcctatagaaaccaagaacaagttctcccaggcgaagctgttggcaggagctgtgaagcataagagctcagagagtggcaacagtgtgaaaagactgaaaccggaccctgagccagatgacaagaatcaagagccctcatcctgcaagtctctcggaaacacctccctgagtggcccctccatccactgcccctctgctgcagtatgtatcggcatcctcccaggcctgggtgcctactctgggagcagcgactccgagtccagctcagacagcgaaggcaccatcaatgccaccggaaagattgtctcctccatcttccgaaccaacaccttcctcgaggccccctagtttctccgtcc

SEQ ID NO: 132370 - DNA, 538 bp, Homo sapiens
  Payload ID: 5851
  Gene Symbol: FAM192A
  Gene Name: family with sequence similarity 192, member A
  ENST ID: ENST00000566481
  CDS Start-End: 274-538
ggtgaggaacaggaagccctgaagggtcaaaagaaatacaaaagcaaaggctattttctttttttttttctttctttcattcattccttcctctgtttctttctttcttcctttcatttttttttcttttttaagagcgagcggctctgcggtggcggtttggggtgggcgccgccgaggtgaggtcgtctcgcctcccgcgcgccggtagaataaacagccattggactcttcaaacaaaaacgctgtctccatcaaattggttgtttcattatggatggaggggatgatggtaaccttattatcaaaaagaggtttgtgtctgaggcagaactagatgaacggcgcaaaaggaggcaagaagaatgggagaaagttcgaaaacctgaagatccagaagaatgtccagaggaggtttatgaccctcgatctctatatgaaaggctacaggaacagaaggacaggaagcagcaggagtacgaggaacagttcaaattcaaaaacatggtaagaggcttagatgaagatgagaccaact

SEQ ID NO: 132371 - DNA, 519 bp, Homo sapiens
  Payload ID: 5851
  Gene Symbol: FAM192A
  Gene Name: family with sequence similarity 192, member A
  ENST ID: ENST00000562406
  CDS Start-End: 98-519
agtgcggcctcggtcctggcctggcggcgacacctgggttccagcttccttacggaagagatgagctgcggctgctgttaggattggttgtttcattatggatggaggggatgatggtaaccttattatcaaaaagaggtttgtgtctgaggcagaactagatgaacggcgcaaaaggaggcaagaagaatgggagaaagttcgaaaacctgaagatccagaagaatgtccagaggaggtttatgaccctcgatctctatatgaaaggctacaggaacagaaggacaggaagcagcaggagtacgaggaacagttcaaattcaaaaacatggtaagaggcttagatgaagatgagaccaacttccttgatgaggtttctcgacagcaggaactaatagaaaagcaacgaagagaagaagaactgaaagaactgaaggaatacagaaataacctcaagaaggttggaatttctcaagagaacaagaaggaagtggaaaagaaactgactgtgaagcctat

SEQ ID NO: 132372 - DNA, 608 bp, Homo sapiens
  Payload ID: 5851
  Gene Symbol: FAM192A
  Gene Name: family with sequence similarity 192, member A
  ENST ID: ENST00000568671
  CDS Start-End: 289-608
agtgcggcctcggtcctggcctggcggcgacacctgggttccagcttccttacggaagagatgagctgcggctgctgttagggttagggccaggcctgttctcagtccgcgcacccgctccttgtccggagtagccgaagcctggggcttgcgggcccagcctgaggggagctgagggtgcccgcgggaaggcatctgggtcgcggcgaggaccctttcaggcgggcccaacactgccgggcgtttaatggggtttccccaattttctgctagattggttgtttcattatggatggaggggatgatggtaaccttattatcaaaaagaggtttgtgtctgaggcagaactagatgaacggcgcaaaaggaggcaagaagaatgggagaaagttcgaaaacctgaagatccagaagaatgtccagaggaggtttatgaccctcgatctctatatgaaaggctacaggaacagaaggacaggaagcagcaggagtacgaggaacagttcaaattcaaaaacatggtaagaggcttagatgaagatgagaccaacttccttgatgaggtttctcgacagcaggaactaatagaaaagcaacgaagagaaga

SEQ ID NO: 132373 - DNA, 676 bp, Homo sapiens
  Payload ID: 5851
  Gene Symbol: FAM192A
  Gene Name: family with sequence similarity 192, member A
  ENST ID: ENST00000566584
  CDS Start-End: 287-676
caggaagccctgaagggtcaaaagaaatacaaaagcaaaggctattttctttttttttttctttctttcattcattccttcctctgtttctttctttcttcctttcatttttttttcttttttaagagcgagcggctctgcggtggcggtttggggtgggcgccgccgaggtgaggtcgtctcgcctcccgcgcgccggtagactggacttgaacactaagtcttcaatagctgagattctccatcttaatctacttggaggcaagagcagattggttgtttcattatggatggaggggatgatggtaaccttattatcaaaaagaggtttgtgtctgaggcagaactagatgaacggcgcaaaaggaggcaagaagaatgggagaaagttcgaaaacctgaagatccagaagaatgtccagaggaggtttatgaccctcgatctctatatgaaaggctacaggaacagaaggacaggaagcagcaggagtacgaggaacagttcaaattcaaaaacatggtaagaggcttagatgaagatgagaccaacttccttgatgaggtttctcgacagcaggaactaatagaaaagcaacgaagagaagaagaactgaaagaactgaaggaatacagaaataacctcaagaaggttggaatttctcaagagaacaagaag

SEQ ID NO: 132374 - DNA, 1066 bp, Homo sapiens
  Payload ID: 5851
  Gene Symbol: FAM192A
  Gene Name: family with sequence similarity 192, member A
  ENST ID: ENST00000566077
  CDS Start-End: 386-919
cggtgaggaacaggaagccctgaagggtcaaaagaaatacaaaagcaaaggctattttctttttttttttctttctttcattcattccttcctctgtttctttctttcttcctttcatttttttttcttttttaagagcgagcggctctgcggtggcggtttggggtgggcgccgccgaggtgaggtcgtctcgcctcccgcgcgccggtagaactagatgaacggcgcaaaaggaggcaagaagaatgggagaaagttcgaaaacctgaagatccagaagaatgtccagaggaggtttatgaccctcgatctctatatgaaaggctacaggaacagaaggacaggaagcagcaggagtacgaggaacagttcaaattcaaaaacatggtaagaggcttagatgaagatgagaccaacttccttgatgaggtttctcgacagcaggaactaatagaaaagcaacgaagagaagaagaactgaaagaactgaaggaatacagaaataacctcaagaaggttggaatttctcaagagaacaagaaggaagtggaaaagaaactgactgtgaagcctatagaaaccaagaacaagttctcccaggcgaagctgttggcaggagctgtgaagcataagagctcagagagtggcaacagtgtgaaaagactgaaaccggaccctgagccagatgacaagaatcaagagccctcatcctgcaagtctctcggaaacacctccctgagtggcccctccatccactgcccctctgctgcagtatgtatcggcatcctcccaggcctgggtgcctactctgggagcagcgactccgagtccagctcagacagcgaaggcaccatcaatgccaccggaaagattgtctcctccatcttccgaaccaacaccttcctcgaggccccctagtttctccgtccctacacagggagctcctccccaagggtagatcggaccgttcatgctgcctataggcattatgtccctcaaaaaaaaactcctttgcctgcatcctgtgtacaacatgacatttttaaccaatccaatctaaaaatg

SEQ ID NO: 132375 - DNA, 893 bp, Homo sapiens
  Payload ID: 5851
  Gene Symbol: FAM192A
  Gene Name: family with sequence similarity 192, member A
  ENST ID: ENST00000567044
  CDS Start-End: 412-893
aggtgagtgcggcctcggtcctggcctggcggcgacacctgggttccagcttccttacggaagagatgagctgcggctgctgttagggttagggccaggcctgttctcagtccgcgcacccgctccttgtccggagtagccgaagcctggggcttgcgggcccagcctgaggggagctgagggtgcccgcgggaaggcatctgggtcgcggcgaggaccctttcaggcgggcccaacactgccgggcgtttaatggggtttccccaattttctgctagaatcttgccctgtcgctcaagctggggtgcagcggtgtgatcttggctcactgcaacctccgcctcccaggttcaagcgattctcctgcctcagcctcctgagtagctgggattacagattggttgtttcattatggatggaggggatgatggtaaccttattatcaaaaagaggtttgtgtctgaggcagaactagatgaacggcgcaaaaggaggcaagaagaatgggagaaagttcgaaaacctgaagatccagaagaatgtccagaggaggtttatgaccctcgatctctatatgaaaggctacaggaacagaaggacaggaagcagcaggagtacgaggaacagttcaaattcaaaaacatggtaagaggcttagatgaagatgagaccaacttccttgatgaggtttctcgacagcaggaactaatagaaaagcaacgaagagaagaagaactgaaagaactgaaggaatacagaaataacctcaagaaggttggaatttctcaagagaacaagaaggaagtggaaaagaaactgactgtgaagcctatagaaaccaagaacaagttctcccaggcgaagctgttggcaggagctgtgaagcataagag

SEQ ID NO: 132376 - DNA, 981 bp, Homo sapiens
  Payload ID: 5851
  Gene Symbol: FAM192A
  Gene Name: family with sequence similarity 192, member A
  Uniprot ID: Q9GZU8
  ENST ID: ENST00000569266
  CDS Start-End: 72-836
tgtgagttcattcctccctgctcagattcttcagctcctcgtggttggtttattcaattggttgtttcattatggatggaggggatgatggtaaccttattatcaaaaagaggtttgtgtctgaggcagaactagatgaacggcgcaaaaggaggcaagaagaatgggagaaagttcgaaaacctgaagatccagaagaatgtccagaggaggtttatgaccctcgatctctatatgaaaggctacaggaacagaaggacaggaagcagcaggagtacgaggaacagttcaaattcaaaaacatggtaagaggcttagatgaagatgagaccaacttccttgatgaggtttctcgacagcaggaactaatagaaaagcaacgaagagaagaagaactgaaagaactgaaggaatacagaaataacctcaagaaggttggaatttctcaagagaacaagaaggaagtggaaaagaaactgactgtgaagcctatagaaaccaagaacaagttctcccaggcgaagctgttggcaggagctgtgaagcataagagctcagagagtggcaacagtgtgaaaagactgaaaccggaccctgagccagatgacaagaatcaagagccctcatcctgcaagtctctcggaaacacctccctgagtggcccctccatccactgcccctctgctgcagtatgtatcggcatcctcccaggcctgggtgcctactctgggagcagcgactccgagtccagctcagacagcgaaggcaccatcaatgccaccggaaagattgtctcctccatcttccgaaccaacaccttcctcgaggccccctagtttctccgtccctacacagggagctcctccccaagggtagatcggaccgttcatgctgcctataggcattatgtccctcaaaaaaaaactcctttgcctgcatcctgtgtacaacatgacatttttaaccaatccaatctaaaaa

SEQ ID NO: 132377 - DNA, 1086 bp, Homo sapiens
  Payload ID: 5851
  Gene Symbol: FAM192A
  Gene Name: family with sequence similarity 192, member A
  Uniprot ID: Q9GZU8
  ENST ID: ENST00000567439
  CDS Start-End: 232-996
tattgtggcggtgaggaacaggaagccctgaagggtcaaaagaaatacaaaagcaaaggctattttctttttttttttctttctttcattcattccttcctctgtttctttctttcttcctttcatttttttttcttttttaagagcgagcggctctgcggtggcggtttggggtgggcgccgccgaggtgaggtcgtctcgcctcccgcgcgccgattggttgtttcattatggatggaggggatgatggtaaccttattatcaaaaagaggtttgtgtctgaggcagaactagatgaacggcgcaaaaggaggcaagaagaatgggagaaagttcgaaaacctgaagatccagaagaatgtccagaggaggtttatgaccctcgatctctatatgaaaggctacaggaacagaaggacaggaagcagcaggagtacgaggaacagttcaaattcaaaaacatggtaagaggcttagatgaagatgagaccaacttccttgatgaggtttctcgacagcaggaactaatagaaaagcaacgaagagaagaagaactgaaagaactgaaggaatacagaaataacctcaagaaggttggaatttctcaagagaacaagaaggaagtggaaaagaaactgactgtgaagcctatagaaaccaagaacaagttctcccaggcgaagctgttggcaggagctgtgaagcataagagctcagagagtggcaacagtgtgaaaagactgaaaccggaccctgagccagatgacaagaatcaagagccctcatcctgcaagtctctcggaaacacctccctgagtggcccctccatccactgcccctctgctgcagtatgtatcggcatcctcccaggcctgggtgcctactctgggagcagcgactccgagtccagctcagacagcgaaggcaccatcaatgccaccggaaagattgtctcctccatcttccgaaccaacaccttcctcgaggccccctagtttctccgtccctacacagggagctcctccccaagggtagatcggaccgttcatgctgcctataggcattatgtccctcaaaaaaaaact

SEQ ID NO: 132378 - DNA, 4846 bp, Homo sapiens
  Payload ID: 5852
  Gene Symbol: FAM193A
  Gene Name: family with sequence similarity 193, member A
  Uniprot ID: P78312
  ENST ID: ENST00000324666
  CDS Start-End: 352-4149
cacaatgacatgcagacctgcatattggagctggacggagaaactgggctaatgtgacagacagcaacaagagtaaggcagttgcttcgctattgagagaaagaaccatatgaagaaatttcggcagaggcggaccgggaacctcagcagctgcagaactactggtcagaagtgcgctacacggtgcgctgcatctaccgccaggcaggaaccccgctggcagatgaccaggaccagtctctggtgcctgacaaggagggagtgaaggagctcgtggataggctctgcgagagggacccctaccagctgtaccagcgtctggaacagcaagctcgagagtatgtgctggagatgaaggtccgcctgctccggcagctgtcggctgcggccaaggtgaaggcaccatctggcctgcagggcccgccgcaagcgcaccagttcatctccctcctgcttgaggagtacggcgccctctgccaggccgcacgctccatcagcaccttccttggcactctggaaaatgaacacttgaaaaagttccaagtgacgtgggaactgcataataaacacctgtttgaaaatctggtcttttcggagccacttcttcagagcaacttgcccgcactggtgtcacagatcaggctaggaaccaccacacacgacacctgcagtgaggacacatacagtaccttgctgcagaggtaccagcgttccgaggaggagctgcgcagagtcgccgaggagtggctggagtgccagaagaggatcgacgcctatgtcgacgagcagatgacaatgaaaaccaagcagcgcatgttaacagaagactgggagctttttaaacaaagaagattcattgaagaacagttaaccaataagaaagcagttactggcgagaacaacttcacagacaccatgaggcacatgttatcgtcccggctgagcatgcccgactgccccaactgcaactacaggagaagatgtgcttgcgatgactgcagtctctcacacatcctcacgtgtggtatcatggacccccccgtcactgatgacatccacattcaccagctcccacttcaagtggatcctgctcctgactatcttgctgagaggagcccgcccagtgtgtcatctgcaagctcggggtccggctccagctctcccatcacaattcagcagcaccccaggctcatcctcacagacagtggctcggcaccaactttttgtagtgatgatgaagatgttgcaccattgtcagccaaatttgctgatatttatccattgagtaattatgatgataccgaggtggtggccaacatgaatggaatccacagcgaattgaatggtggcggggaaaacatggccctgaaggatgagtctcctcagataagcagtaccagcagtagttcctcagaagctgatgatgaagaagcggacggcgagagtagtggggagcccccaggggccccgaaggaagatggagtgctgggaagcaggagccccaggacagaggagagcaaagcagacagtccacccccatcctacccaacacagcaggctgaacaagctccaaacacttgtgaatgtcatgtttgtaagcaggaagcttctggactgacaccatctgcaatgacagccggagcccttcctcctggccatcagttcttgagcccagagaagcccacacaccctgcactgcacctttaccctcacatccatggacatgtgcctttgcacactgttccacacctgccacgccctctcatccaccccaccttgtatgcaacgccccccttcacacacagtaaggctttaccgccagcacctgttcagaatcacacaaataagcatcaggtattcaatgcatctcttcaagaccatatttatccgagctgttttgggaatactccagagtggaatagttctaaatttataagtctttggggatcagaagtgatgaatgataagaactggaatcctggcactttcttgccagatacaatttctgggagtgaaatattagggccaacactctcagaaacaagaccggaagcccttccacctccatctagcaatgaaacacctgcagtctcggatagtaaagagaaaaagaatgctgcaaaaaagaaatgtttatacaatttccaagatgctttcatggaagcaaataaagttgtcatggccacgtcatcagccacgtcctctgtgtcctgcacagctaccacagtgcagtccagcaacagccagttcagagtgtcatccaagagacctccttcagtaggtgacgtgtttcatggcatcagcaaggaggaccacagacactcggccccagccgccccgaggaatagccccacgggcttggcccccctcccagcgctctcgcctgctgcgctgtcacctgctgcgctctcacctgcctccacacctcaccttgcaaatcttgcagccccatcattccccaaaacagcaaccacaactcctgggtttgtggacacacgcaagagtttctgtcctgcacccctacccccggccacagatggctccattagcgcccctccaagtgtctgcagtgaccctgactgcgaagggcaccgctgcgagaatggtgtctacgacccacagcaggatgatggggacgagagtgcagatgaggacagctgctctgagcacagctccagcacctcgacctccaccaaccagaaggagggcaagtactgcgactgctgctactgcgaattctttgggcacggcgggcctccagctgcaccaacaagtagaaattatgcagaaatgagggaaaagcttcgcttacggctgaccaagaggaaagaggagcaacctaaaaaaatggaccagatctcagaaagggaaagcgtcgttgaccatcggagggtggaggatttgttgcagtttataaatagctccgaaaccaaaccagtgagcagcacgcgtgcagcgaagcgagcaaggcataagcaaaggaagctggaggagaaagctcgcctagaagcagaggccagggcccgggagcacctgcacctccaggaggagcagaggcggcgggaggaggaggaggatgaggaagaagaggaggatcgtttcaaggaggaatttcagcggcttcaggagcttcagaagctaagagctgtaaaaaagaagaagaaggagaggccaagtaaagactgccccaagttggacatgctcactagaaatttccaggcagcaacagagtctgttcctaactctggaaacatccacaatggctcactagagcaaactgaagaaccagaaacctcttctcactccccatccaggcatatgaaccactcagagcccaggccagggctaggggctgatggggatgctgcagaccccgtcgacaccagagactccaaatttctcctccccaaggaggtgaatgggaagcagcatgagccactctcttttttcttcgacatcatgcagcaccataaagaaggaaatggcaagcagaagctgaggcagaccagcaaggccagcagcgagccagcgaggaggcccacagagccccccaaggccacagaggggcagtccaagccccgggcccagactgagtcaaaggctaaggtggtcgacctcatgtccatcacagagcagaaaagagaggagagaaaagtcaacagtaataacaataacaaaaagcagctgaaccacatcaaggacgaaaagtcaaacccaacccctatggagcccacctctcccggtgagcatcagcagaacagcaagctggtgctggcagagtcccctcagccaaagggcaagaacaagaaaaataagaagaagaaaggagacagagtcaacaattcaattgatggagtttcgctcttgttgcccagtctggggtacaatggtgcaatcttggctcactgcaaccttcgcctcccaggttcaagcgattgtgctgcctcagcctcccaagtagttggaattacagatgatgtctttctacctaaagatattgacctagacagtgtggatatggatgagacagagagggaagtggaatatttcaaaaggttctgcttggattctgctagacagacccgacaaagactgtctatcaactggtccaattttagcttgaaaaaagccacctttgctgcccactgaatgaggactccctggagagggacacgcgagaggcaggccaggctgcaccaccccaagagccacgcccctcgctggcgccccagagccgtggtgcttgccaagggctgtgcggagctggtgctgcctgaaaccccagaccgagaagttgatgctcggcccacgccgttagctcgtgtgcgtgtagtctgtgcgtgagactccttcgattgtagctctgtgctgtcggattggaacagtagttcccgccaagtcctcccaccaccgcggcctcggaggcctgggccgtggccagataggagtttgcatcatccacgtggctccgttgcctctgcattgcgccctgtcctgtcatgtgtcctcaccggggtatcggccgtcactcagctctcctgtgcccctgcgtctcaccctaggcgggctgggcggggcaggcctcctttgttctccacaatctactgtctccgagtgtacacgttgcgctgtttgtgtttgatccccctgacttgtagccagcttgtgtaagatcccttgcagaacgagaaagttaaaaacaagcccacccagtactcacaccatcaagtctgttatagagtgtacgactgtattaacacggaggcctgcctggctacttttttaacatattgttaagtaatattaaaatcatgtctttctttttgaaagatggaatacattagta

SEQ ID NO: 132379 - DNA, 4710 bp, Homo sapiens
  Payload ID: 5852
  Gene Symbol: FAM193A
  Gene Name: family with sequence similarity 193, member A
  Uniprot ID: P78312
  ENST ID: ENST00000382839
  CDS Start-End: 352-4026
cacaatgacatgcagacctgcatattggagctggacggagaaactgggctaatgtgacagacagcaacaagagtaaggcagttgcttcgctattgagagaaagaaccatatgaagaaatttcggcagaggcggaccgggaacctcagcagctgcagaactactggtcagaagtgcgctacacggtgcgctgcatctaccgccaggcaggaaccccgctggcagatgaccaggaccagtctctggtgcctgacaaggagggagtgaaggagctcgtggataggctctgcgagagggacccctaccagctgtaccagcgtctggaacagcaagctcgagagtatgtgctggagatgaaggtccgcctgctccggcagctgtcggctgcggccaaggtgaaggcaccatctggcctgcagggcccgccgcaagcgcaccagttcatctccctcctgcttgaggagtacggcgccctctgccaggccgcacgctccatcagcaccttccttggcactctggaaaatgaacacttgaaaaagttccaagtgacgtgggaactgcataataaacacctgtttgaaaatctggtcttttcggagccacttcttcagagcaacttgcccgcactggtgtcacagatcaggctaggaaccaccacacacgacacctgcagtgaggacacatacagtaccttgctgcagaggtaccagcgttccgaggaggagctgcgcagagtcgccgaggagtggctggagtgccagaagaggatcgacgcctatgtcgacgagcagatgacaatgaaaaccaagcagcgcatgttaacagaagactgggagctttttaaacaaagaagattcattgaagaacagttaaccaataagaaagcagttactggcgagaacaacttcacagacaccatgaggcacatgttatcgtcccggctgagcatgcccgactgccccaactgcaactacaggagaagatgtgcttgcgatgactgcagtctctcacacatcctcacgtgtggtatcatggacccccccgtcactgatgacatccacattcaccagctcccacttcaagtggatcctgctcctgactatcttgctgagaggagcccgcccagtgtgtcatctgcaagctcggggtccggctccagctctcccatcacaattcagcagcaccccaggctcatcctcacagacagtggctcggcaccaactttttgtagtgatgatgaagatgttgcaccattgtcagccaaatttgctgatatttatccattgagtaattatgatgataccgaggtggtggccaacatgaatggaatccacagcgaattgaatggtggcggggaaaacatggccctgaaggatgagtctcctcagataagcagtaccagcagtagttcctcagaagctgatgatgaagaagcggacggcgagagtagtggggagcccccaggggccccgaaggaagatggagtgctgggaagcaggagccccaggacagaggagagcaaagcagacagtccacccccatcctacccaacacagcaggctgaacaagctccaaacacttgtgaatgtcatgtttgtaagcaggaagcttctggactgacaccatctgcaatgacagccggagcccttcctcctggccatcagttcttgagcccagagaagcccacacaccctgcactgcacctttaccctcacatccatggacatgtgcctttgcacactgttccacacctgccacgccctctcatccaccccaccttgtatgcaacgccccccttcacacacagtaaggctttaccgccagcacctgttcagaatcacacaaataagcatcaggtattcaatgcatctcttcaagaccatatttatccgagctgttttgggaatactccagagtggaatagttctaaatttataagtctttggggatcagaagtgatgaatgataagaactggaatcctggcactttcttgccagatacaatttctgggagtgaaatattagggccaacactctcagaaacaagaccggaagcccttccacctccatctagcaatgaaacacctgcagtctcggatagtaaagagaaaaagaatgctgcaaaaaagaaatgtttatacaatttccaagatgctttcatggaagcaaataaagttgtcatggccacgtcatcagccacgtcctctgtgtcctgcacagctaccacagtgcagtccagcaacagccagttcagagtgtcatccaagagacctccttcagtaggtgacgtgtttcatggcatcagcaaggaggaccacagacactcggccccagccgccccgaggaatagccccacgggcttggcccccctcccagcgctctcgcctgctgcgctgtcacctgctgcgctctcacctgcctccacacctcaccttgcaaatcttgcagccccatcattccccaaaacagcaaccacaactcctgggtttgtggacacacgcaagagtttctgtcctgcacccctacccccggccacagatggctccattagcgcccctccaagtgtctgcagtgaccctgactgcgaagggcaccgctgcgagaatggtgtctacgacccacagcaggatgatggggacgagagtgcagatgaggacagctgctctgagcacagctccagcacctcgacctccaccaaccagaaggagggcaagtactgcgactgctgctactgcgaattctttgggcacggcgggcctccagctgcaccaacaagtagaaattatgcagaaatgagggaaaagcttcgcttacggctgaccaagaggaaagaggagcaacctaaaaaaatggaccagatctcagaaagggaaagcgtcgttgaccatcggagggtggaggatttgttgcagtttataaatagctccgaaaccaaaccagtgagcagcacgcgtgcagcgaagcgagcaaggcataagcaaaggaagctggaggagaaagctcgcctagaagcagaggccagggcccgggagcacctgcacctccaggaggagcagaggcggcgggaggaggaggaggatgaggaagaagaggaggatcgtttcaaggaggaatttcagcggcttcaggagcttcagaagctaagagctgtaaaaaagaagaagaaggagaggccaagtaaagactgccccaagttggacatgctcactagaaatttccaggcagcaacagagtctgttcctaactctggaaacatccacaatggctcactagagcaaactgaagaaccagaaacctcttctcactccccatccaggcatatgaaccactcagagcccaggccagggctaggggctgatggggatgctgcagaccccgtcgacaccagagactccaaatttctcctccccaaggaggtgaatgggaagcagcatgagccactctcttttttcttcgacatcatgcagcaccataaagaaggaaatggcaagcagaagctgaggcagaccagcaaggccagcagcgagccagcgaggaggcccacagagccccccaaggccacagaggggcagtccaagccccgggcccagactgagtcaaaggctaaggtggtcgacctcatgtccatcacagagcagaaaagagaggagagaaaagtcaacagtaataacaataacaaaaagcagctgaaccacatcaaggacgaaaagtcaaacccaacccctatggagcccacctctcccggtgagcatcagcagaacagcaagctggtgctggcagagtcccctcagccaaagggcaagaacaagaaaaataagaagaagaaaggagacagagtcaacaattcaattgatgatgtctttctacctaaagatattgacctagacagtgtggatatggatgagacagagagggaagtggaatatttcaaaaggttctgcttggattctgctagacagacccgacaaagactgtctatcaactggtccaattttagcttgaaaaaagccacctttgctgcccactgaatgaggactccctggagagggacacgcgagaggcaggccaggctgcaccaccccaagagccacgcccctcgctggcgccccagagccgtggtgcttgccaagggctgtgcggagctggtgctgcctgaaaccccagaccgagaagttgatgctcggcccacgccgttagctcgtgtgcgtgtagtctgtgcgtgagactccttcgattgtagctctgtgctgtcggattggaacagtagttcccgccaagtcctcccaccaccgcggcctcggaggcctgggccgtggccagataggagtttgcatcatccacgtggctccgttgcctctgcattgcgccctgtcctgtcatgtgtcctcaccggggtatcggccgtcactcagctctcctgtgcccctgcgtctcaccctaggcgggctgggcggggcaggcctcctttgttctccacaatctactgtctccgagtgtacacgttgcgctgtttgtgtttgatccccctgacttgtagccagcttgtgtaagatcccttgcagaacgagaaagttaaaaacaagcccacccagtactcacaccatcaagtctgttatagagtgtacgactgtattaacacggaggcctgcctggctacttttttaacatattgttaagtaatattaaaatcatgtctttctttttgaaagatg

SEQ ID NO: 132380 - DNA, 4110 bp, Homo sapiens
  Payload ID: 5852
  Gene Symbol: FAM193A
  Gene Name: family with sequence similarity 193, member A
  Uniprot ID: P78312
  ENST ID: ENST00000505311
  CDS Start-End: 322-3957
ctggacggagaaactgggctaatgtgacagacagcaacaagagtaaggcagttgcttcgctattgagagaaagaaccatatgaagaaatttcggcagaggcggaccgggaacctcagcagctgcagaactactggtcagaagtgcgctacacggtgcgctgcatctaccgccaggcaggaaccccgctggcagatgaccaggaccagtctctggtgcctgacaaggagggagtgaaggagctcgtggataggctctgcgagagggacccctaccagctgtaccagcgtctggaacagcaagctcgagagtatgtgctggagatgaaggtccgcctgctccggcagctgtcggctgcggccaaggtgaaggcaccatctggcctgcagggcccgccgcaagcgcaccagttcatctccctcctgcttgaggagtacggcgccctctgccaggccgcacgctccatcagcaccttccttggcactctggaaaatgaacacttgaaaaagttccaagtgacgtgggaactgcataataaacacctgtttgaaaatctggtcttttcggagccacttcttcagagcaacttgcccgcactggtgtcacagatcaggctaggaaccaccacacacgacacctgcagtgaggacacatacagtaccttgctgcagaggtaccagcgttccgaggaggagctgcgcagagtcgccgaggagtggctggagtgccagaagaggatcgacgcctatgtcgacgagcagatgacaatgaaaaccaagcagcgcatgttaacagaagactgggagctttttaaacaaagaagattcattgaagaacagttaaccaataagaaagcagttactggcgagaacaacttcacagacaccatgaggcacatgttatcgtcccggctgagcatgcccgactgccccaactgcaactacaggagaagatgtgcttgcgatgactgcagtctctcacacatcctcacgtgtggtatcatggacccccccgtcactgatgacatccacattcaccagctcccacttcaagtggatcctgctcctgactatcttgctgagaggagcccgcccagtgtgtcatctgcaagctcggggtccggctccagctctcccatcacaattcagcagcaccccaggctcatcctcacagacagtggctcggcaccaactttttgtagtgatgatgaagatgttgcaccattgtcagccaaatttgctgatatttatccattgagtaattatgatgataccgaggtggtggccaacatgaatggaatccacagcgaattgaatggtggcggggaaaacatggccctgaaggatgagtctcctcagataagcagtaccagcagtagttcctcagaagctgatgatgaagaagcggacggcgagagtagtggggagcccccaggggccccgaaggaagatggagtgctgggaagcaggagccccaggacagaggagagcaaagcagacagtccacccccatcctacccaacacagcaggctgaacaagctccaaacacttgtgaatgtcatgtttgtaagcaggaagcttctggactgacaccatctgcaatgacagccggagcccttcctcctggccatcagttcttgagcccagagaagcccacacaccctgcactgcacctttaccctcacatccatggacatgtgcctttgcacactgttccacacctgccacgccctctcatccaccccaccttgtatgcaacgccccccttcacacacagtaaggctttaccgccagcacctgttcagaatcacacaaataagcatcaggtattcaatgcatctcttcaagaccatatttatccgagctgttttgggaatactccagagtggaatagttctaaatttataagtctttggggatcagaagtgatgaatgataagaactggaatcctggcactttcttgccagatacaatttctgggagtgaaatattagggccaacactctcagaaacaagaccggaagcccttccacctccatctagcaatgaaacacctgcagtctcggatagtaaagagaaaaagaatgctgcaaaaaagaaatgtttatacaatttccaagatgctttcatggaagcaaataaagttgtcatggccacgtcatcagccacgtcctctgtgtcctgcacagctaccacagtgcagtccagcaacagccagttcagagtgtcatccaagagacctccttcagtaggtgacgtgtttcatggcatcagcaaggaggaccacagacactcggccccagccgccccgaggaatagccccacgggcttggcccccctcccagcgctctcgcctgctgcgctgtcacctgctgcgctctcacctgcctccacacctcaccttgcaaatcttgcagccccatcattccccaaaacagcaaccacaactcctgggtttgtggacacacgcaagagtttctgtcctgcacccctacccccggccacagatggctccattagcgcccctccaagtgtctgcagtgaccctgactgcgaagggcaccgctgcgagaatggtgtctacgacccacagcaggatgatggggacgagagtgcagatgaggacagctgctctgagcacagctccagcacctcgacctccaccaaccagaaggagggcaagtactgcgactgctgctactgcgaattctttgggcacggcgggcctccagctgcaccaacaagtagaaattatgcagaaatgagggaaaagcttcgcttacggctgaccaagaggaaagaggagcaacctaaaaaaatggaccagatctcagaaagggaaagcgtcgttgaccatcggagggtggaggatttgttgcagtttataaatagctccgaaaccaaaccagtgagcagcacgcgtgcagcgaagcgagcaaggcataagcaaaggaagctggaggagaaagctcgcctagaagcagaggccagggcccgggagcacctgcacctccaggaggagcagaggcggcgggaggaggaggaggatgaggaagaagaggaggatcgtttcaaggaggaatttcagcggcttcaggagcttcagaagctaagagctgtaaaaaagaagaagaaggagaggccaagtaaagactgccccaagttggacatgctcactagaaatttccaggcagcaacagagtctgttcctaactctggaaacatccacaatggctcactagagcaaactgaagaaccagaaacctcttctcactccccatccaggcatatgaaccactcagagcccaggccagggctaggggctgatggggatgctgcagaccccgtcgacaccagagactccaaatttctcctccccaaggaggtgaatgggaagcagcatgagccactctcttttttcttcgacatcatgcagcaccataaagaaggaaatggcaagcagaagctgaggcagaccagcaaggccagcagcgagccagcgaggaggcccacagagccccccaaggccacagaggggcagtccaagccccgggcccagactgagtcaaaggctaaggtggtcgacctcatgtccatcacagagcagaaaagagaggagagaaaagtcaacagtaataacaataacaaaaagcagctgaaccacatcaaggacgaaaagtcaaacccaacccctatggagcccacctctcccggtgagcatcagcagaacagcaagctggtgctggcagagtcccctcagccaaagggcaagaacaagaaaaataagaagaagaaaggagacagagtcaacaattcaattgatgatgtctttctacctaaagatattgacctagacagtgtggatatggatgagacagagagggaagtggaatatttcaaaagagacggggtttcgccacattgcccaggctggtctcgaactcctggcctcaagtgatctgcccacctcagcctcccaaagcgccagaattacaggttctgcttggattctgctagacagacccgacaaagactgtctatcaactggtccaattttagcttgaaaaaagccacctttgctgcccactgaatgaggactccctggagaggg

SEQ ID NO: 132381 - DNA, 4202 bp, Homo sapiens
  Payload ID: 5852
  Gene Symbol: FAM193A
  Gene Name: family with sequence similarity 193, member A
  ENST ID: ENST00000513898
  CDS Start-End: 322-2736
ctggacggagaaactgggctaatgtgacagacagcaacaagagtaaggcagttgcttcgctattgagagaaagaaccatatgaagaaatttcggcagaggcggaccgggaacctcagcagctgcagaactactggtcagaagtgcgctacacggtgcgctgcatctaccgccaggcaggaaccccgctggcagatgaccaggaccagtctctggtgcctgacaaggagggagtgaaggagctcgtggataggctctgcgagagggacccctaccagctgtaccagcgtctggaacagcaagctcgagagtatgtgctggagatgaaggtccgcctgctccggcagctgtcggctgcggccaaggtgaaggcaccatctggcctgcagggcccgccgcaagcgcaccagttcatctccctcctgcttgaggagtacggcgccctctgccaggccgcacgctccatcagcaccttccttggcactctggaaaatgaacacttgaaaaagttccaagtgacgtgggaactgcataataaacacctgtttgaaaatctggtcttttcggagccacttcttcagagcaacttgcccgcactggtgtcacagatcaggctaggaaccaccacacacgacacctgcagtgaggacacatacagtaccttgctgcagaggtaccagcgttccgaggaggagctgcgcagagtcgccgaggagtggctggagtgccagaagaggatcgacgcctatgtcgacgagcagatgacaatgaaaaccaagcagcgcatgttaacagaagactgggagctttttaaacaaagaagattcattgaagaacagttaaccaataagaaagcagttactggcgagaacaacttcacagacaccatgaggcacatgttatcgtcccggctgagcatgcccgactgccccaactgcaactacaggagaagatgtgcttgcgatgactgcagtctctcacacatcctcacgtgtggtatcatggacccccccgtcactgatgacatccacattcaccagctcccacttcaagtggatcctgctcctgactatcttgctgagaggagcccgcccagtgtgtcatctgcaagctcggggtccggctccagctctcccatcacaattcagcagcaccccaggctcatcctcacagacagtggctcggcaccaactttttgtagtgatgatgaagatgttgcaccattgtcagccaaatttgctgatatttatccattgagtaattatgatgataccgaggtggtggccaacatgaatggaatccacagcgaattgaatggtggcggggaaaacatggccctgaaggatgagtctcctcagataagcagtaccagcagtagttcctcagaagctgatgatgaagaagcggacggcgagagtagtggggagcccccaggggccccgaaggaagatggagtgctgggaagcaggagccccaggacagaggagagcaaagcagacagtccacccccatcctacccaacacagcaggctgaacaagctccaaacacttgtgaatgtcatgtttgtaagcaggaagcttctggactgacaccatctgcaatgacagccggagcccttcctcctggccatcagttcttgagcccagagaagcccacacaccctgcactgcacctttaccctcacatccatggacatgtgcctttgcacactgttccacacctgccacgccctctcatccaccccaccttgtatgcaacgccccccttcacacacagtaaggctttaccgccagcacctgttcagaatcacacaaataagcatcaggtattcaatgcatctcttcaagaccatatttatccgagctgttttgggaatactccagagtggaatagttctaaatttataagtctttggggatcagaagtgatgaatgataagaactggaatcctggcactttcttgccagatacaatttctgggagtgaaatattagggccaacactctcagaaacaagaccggaagcccttccacctccatctagcaatgaaacacctgcagtctcggatagtaaagagaaaaagaatgctgcaaaaaagaaatgtttatacaatttccaagatgctttcatggaagcaaataaagttgtcatggccacgtcatcagccacgtcctctgtgtcctgcacagctaccacagtgcagtccagcaacagccagttcagagtgtcatccaagagacctccttcagtaggtgacgtgtttcatggcatcagcaaggaggaccacagacactcggccccagccgccccgaggaatagccccacgggcttggcccccctcccagcgctctcgcctgctgcgctgtcacctgctgcgctctcacctgcctccacacctcaccttgcaaatcttgcagccccatcattccccaaaacagcaaccacaactcctgggtttgtggacacacgcaagagtttctgtcctgcacccctacccccggccacagatggctccattagcgcccctccaagtgtctgcagtgaccctgactgcgaagggcaccgctgcgagaatggtgtctacgacccacagcaggatgatggggacgagagtgcagatgaggacagctgctctgagcacagctccagcacctcgacctccaccaaccagaaggagggcaagtactgcgactgctgctactgcgaattctttgggcacggcggggtgagtgcatgagcctccagctgcaccaacaagtagaaattatgcagaaatgagggaaaagcttcgcttacggctgaccaagaggaaagaggagcaacctaaaaaaatggaccagatctcagaaagggaaagcgtcgttgaccatcggagggtggaggatttgttgcagtttataaatagctccgaaaccaaaccagtgagcagcacgcgtgcagcgaagcgagcaaggcataagcaaaggaagctggaggagaaagctcgcctagaagcagaggccagggcccgggagcacctgcacctccaggaggagcagaggcggcgggaggaggaggaggatgaggaagaagaggaggatcgtttcaaggaggaatttcagcggcttcaggagcttcagaagctaagagctgtaaaaaagaagaagaaggagaggccaagtaaagactgccccaagttggacatgctcactagaaatttccaggcagcaacagagtctgttcctaactctggaaacatccacaatggctcactagagcaaactgaagaaccagaaacctcttctcactccccatccaggcatatgaaccactcagagcccaggccagggctaggggctgatggggatgctgcagaccccgtcgacaccagagactccaaatttctcctccccaaggaggtgaatgggaagcagcatgagccactctcttttttcttcgacatcatgcagcaccataaagaaggaaatggcaagcagaagctgaggcagaccagcaaggccagcagcgagccagcgaggaggcccacagagccccccaaggccacagaggggcagtccaagccccgggcccagactgagtcaaaggctaaggtggtcgacctcatgtccatcacagagcagaaaagagaggagagaaaagtcaacagtaataacaataacaaaaagcagctgaaccacatcaaggacgaaaagtcaaacccaacccctatggagcccacctctcccggtgagcatcagcagaacagcaagctggtgctggcagagtcccctcagccaaagggcaagaacaagaaaaataagaagaagaaaggagacagagtcaacaattcaattggcatggtggtgtgcacgtttgatcccagctactcaggaggctgaggcaggaggattacttgagcctggaagatggaggttccagtgagccgagatcatgcctgggtgacagaatgagacttcatataaaaaaaagaaaaaagtttttgatgaaatctctggatgtcatatggatgatgtctttctacctaaagatattgacctagacagtgtggatatggatgagacagagagggaagtggaatatttcaaaaggttctgcttggattctgctagacagacccgacaaagactgtctatcaactggtccaattttagcttgaaaaaagccacctttgctgcccactgaatgaggactccctggagaggg

SEQ ID NO: 132382 - DNA, 503 bp, Homo sapiens
  Payload ID: 5852
  Gene Symbol: FAM193A
  Gene Name: family with sequence similarity 193, member A
  ENST ID: ENST00000509050
  CDS Start-End: 374-503
gagccaagattttcttcttcactcctcgcttggtggctcccagccagaggccggcagtggtgggaggctcgctctgggtgcacagacgctgccttcagacaccgcatgctcgtgcgaggcctgcagtgagcgcagagaaatttcggcagaggcggaccgggaacctcagcagctgcagaactactggtcagaagtgcgctacacggtgcgctgcatctaccgccaggcaggaaccccgctggcagatgaccaggaccagtctctggtgcctgacaaggagggagtgaaggagctcgtggataggctctgcgagagggacccctaccagctgtaccagcgtctggaacagcaagctcgagagtatgtgctggagatgaaggtccgcctgctccggcagctgtcggctgcggccaaggtgaaggcaccatctggcctgcagggcccgccgcaagcgcaccagttcatctccctcctgcttgaggagtacggcgccctctgccagg

SEQ ID NO: 132383 - DNA, 4663 bp, Homo sapiens
  Payload ID: 5852
  Gene Symbol: FAM193A
  Gene Name: family with sequence similarity 193, member A
  Uniprot ID: P78312
  ENST ID: ENST00000512465
  CDS Start-End: 352-2730
cacaatgacatgcagacctgcatattggagctggacggagaaactgggctaatgtgacagacagcaacaagagtaaggcagttgcttcgctattgagagaaagaaccatatgaagaaatttcggcagaggcggaccgggaacctcagcagctgcagaactactggtcagaagtgcgctacacggtgcgctgcatctaccgccaggcaggaaccccgctggcagatgaccaggaccagtctctggtgcctgacaaggagggagtgaaggagctcgtggataggctctgcgagagggacccctaccagctgtaccagcgtctggaacagcaagctcgagagtatgtgctggagatgaaggtccgcctgctccggcagctgtcggctgcggccaaggtgaaggcaccatctggcctgcagggcccgccgcaagcgcaccagttcatctccctcctgcttgaggagtacggcgccctctgccaggccgcacgctccatcagcaccttccttggcactctggaaaatgaacacttgaaaaagttccaagtgacgtgggaactgcataataaacacctgtttgaaaatctggtcttttcggagccacttcttcagagcaacttgcccgcactggtgtcacagatcaggctaggaaccaccacacacgacacctgcagtgaggacacatacagtaccttgctgcagaggtaccagcgttccgaggaggagctgcgcagagtcgccgaggagtggctggagtgccagaagaggatcgacgcctatgtcgacgagcagatgacaatgaaaaccaagcagcgcatgttaacagaagactgggagctttttaaacaaagaagattcattgaagaacagttaaccaataagaaagcagttactggcgagaacaacttcacagacaccatgaggcacatgttatcgtcccggctgagcatgcccgactgccccaactgcaactacaggagaagatgtgcttgcgatgactgcagtctctcacacatcctcacgtgtggtatcatggacccccccgtcactgatgacatccacattcaccagctcccacttcaagtggatcctgctcctgactatcttgctgagaggagcccgcccagtgtgtcatctgcaagctcggggtccggctccagctctcccatcacaattcagcagcaccccaggctcatcctcacagacagtggctcggcaccaactttttgtagtgatgatgaagatgttgcaccattgtcagccaaatttgctgatatttatccattgagtaattatgatgataccgaggtggtggccaacatgaatggaatccacagcgaattgaatggtggcggggaaaacatggccctgaaggatgagtctcctcagataagcagtaccagcagtagttcctcagaagctgatgatgaagaagcggacggcgagagtagtggggagcccccaggggccccgaaggaagatggagtgctgggaagcaggagccccaggacagaggagagcaaagcagacagtccacccccatcctacccaacacagcaggctgaacaagctccaaacacttgtgaatgtcatgtttgtaagcaggaagcttctggactgacaccatctgcaatgacagccggagcccttcctcctggccatcagttcttgagcccagagaagcccacacaccctgcactgcacctttaccctcacatccatggacatgtgcctttgcacactgttccacacctgccacgccctctcatccaccccaccttgtatgcaacgccccccttcacacacagtaaggctttaccgccagcacctgttcagaatcacacaaataagcatcaggtattcaatgcatctcttcaagaccatatttatccgagctgttttgggaatactccagagtggaatagttctaaatttataagtctttggggatcagaagtgatgaatgataagaactggaatcctggcactttcttgccagatacaatttctgggagtgaaatattagggccaacactctcagaaacaagaccggaagcccttccacctccatctagcaatgaaacacctgcagtctcggatagtaaagagaaaaagaatgctgcaaaaaagaaatgtttatacaatttccaagatgctttcatggaagcaaataaagttgtcatggccacgtcatcagccacgtcctctgtgtcctgcacagctaccacagtgcagtccagcaacagccagttcagagtgtcatccaagagacctccttcagtaggtgacgtgtttcatggcatcagcaaggaggaccacagacactcggccccagccgccccgaggaatagccccacgggcttggcccccctcccagcgctctcgcctgctgcgctgtcacctgctgcgctctcacctgcctccacacctcaccttgcaaatcttgcagccccatcattccccaaaacagcaaccacaactcctgggtttgtggacacacgcaagagtttctgtcctgcacccctacccccggccacagatggctccattagcgcccctccaagtgtctgcagtgaccctgactgcgaagggcaccgctgcgagaatggtgtctacgacccacagcaggatgatggggacgagagtgcagatgaggacagctgctctgagcacagctccagcacctcgacctccaccaaccagaaggaggcctccagctgcaccaacaagtagaaattatgcagaaatgagggaaaagcttcgcttacggctgaccaagaggaaagaggagcaacctaaaaaaatggaccagatctcagaaagggaaagcgtcgttgaccatcggagggtggaggatttgttgcagtttataaatagctccgaaaccaaaccagtgagcagcacgcgtgcagcgaagcgagcaaggcataagcaaaggaagctggaggagaaagctcgcctagaagcagaggccagggcccgggagcacctgcacctccaggaggagcagaggcggcgggaggaggaggaggatgaggaagaagaggaggatcgtttcaaggaggaatttcagcggcttcaggagcttcagaagctaagagctgtaaaaaagaagaagaaggagaggccaagtaaagactgccccaagttggacatgctcactagaaatttccaggcagcaacagagtctgttcctaactctggaaacatccacaatggctcactagagcaaactgaagaaccagaaacctcttctcactccccatccaggcatatgaaccactcagagcccaggccagggctaggggctgatggggatgctgcagaccccgtcgacaccagagactccaaatttctcctccccaaggaggtgaatgggaagcagcatgagccactctcttttttcttcgacatcatgcagcaccataaagaaggaaatggcaagcagaagctgaggcagaccagcaaggccagcagcgagccagcgaggaggcccacagagccccccaaggccacagaggggcagtccaagccccgggcccagactgagtcaaaggctaaggtggtcgacctcatgtccatcacagagcagaaaagagaggagagaaaagtcaacagtaataacaataacaaaaagcagctgaaccacatcaaggacgaaaagtcaaacccaacccctatggagcccacctctcccggtgagcatcagcagaacagcaagctggtgctggcagagtcccctcagccaaagggcaagaacaagaaaaataagaagaagaaaggagacagagtcaacaattcaattgatgatgtctttctacctaaagatattgacctagacagtgtggatatggatgagacagagagggaagtggaatatttcaaaaggttctgcttggattctgctagacagacccgacaaagactgtctatcaactggtccaattttagcttgaaaaaagccacctttgctgcccactgaatgaggactccctggagagggacacgcgagaggcaggccaggctgcaccaccccaagagccacgcccctcgctggcgccccagagccgtggtgcttgccaagggctgtgcggagctggtgctgcctgaaaccccagaccgagaagttgatgctcggcccacgccgttagctcgtgtgcgtgtagtctgtgcgtgagactccttcgattgtagctctgtgctgtcggattggaacagtagttcccgccaagtcctcccaccaccgcggcctcggaggcctgggccgtggccagataggagtttgcatcatccacgtggctccgttgcctctgcattgcgccctgtcctgtcatgtgtcctcaccggggtatcggccgtcactcagctctcctgtgcccctgcgtctcaccctaggcgggctgggcggggcaggcctcctttgttctccacaatctactgtctccgagtgtacacgttgcgctgtttgtgtttgatccccctgacttgtagccagcttgtgtaagatcccttgcagaacgagaaagttaaaaacaagcccacccagtactcacaccatcaagtctgttatagagtgtacgactgtattaacacggaggcctgcctggctacttttttaacatattgttaagtaatattaaaatcatgtctttctttttgaaagatg

SEQ ID NO: 132384 - DNA, 3727 bp, Homo sapiens
  Payload ID: 5852
  Gene Symbol: FAM193A
  Gene Name: family with sequence similarity 193, member A
  ENST ID: ENST00000513350
  CDS Start-End: 710-3727
ggtttcaccgtgttgcccaggctggaagtttgaaatcaattatttttatgtttgctgtctgaaattcattctttctctgttgtttgacacatacataagcctgcaggtacccaaatttgttccaaaaaaaaaaaaatttccctgaggctgtgaggagagagtcaaggaagaggtttttattgatgttatttatcaaacaactcttacactgtacactaagattttataataactgcagacatatacaatgaaaagggagaattggcaccaatattgaatcttcccatccaagaatatggtatgtcactcttttttaaggtttttaaaaatatattgtattatggttttatagtttgtaaatcttgacccattttgtgcctccatagtctgtagtttgaggggctgctatgaccggcatcttgagtggggaatgtgtgtttaaagcattcatgctggaaactgggaaaatggagatgccctgtgaccagtcatctcgccagatgccggcattaactcttgtagtttttgagttgagtcttgaatctgggagtctaggaaatcacggtatcttctacaaataatgataggtttatctcatcttttccagcatttgtcccctttttttggcttccactaggaccttcagaccagtgtgaataagagcattgatactggcacccttgtccagtcctggcttcgaggggctgctatgacaatgaaaaccaagcagcgcatgttaacagaagactgggagctttttaaacaaagaagattcattgaagaacagttaaccaataagaaagcagttactggcgagaacaacttcacagacaccatgaggcacatgttatcgtcccggctgagcatgcccgactgccccaactgcaactacaggagaagatgtgcttgcgatgactgcagtctctcacacatcctcacgtgtggtatcatggacccccccgtcactgatgacatccacattcaccagctcccacttcaagtggatcctgctcctgactatcttgctgagaggagcccgcccagtgtgtcatctgcaagctcggggtccggctccagctctcccatcacaattcagcagcaccccaggctcatcctcacagacagtggctcggcaccaactttttgtagtgatgatgaagatgttgcaccattgtcagccaaatttgctgatatttatccattgagtaattatgatgataccgaggtggtggccaacatgaatggaatccacagcgaattgaatggtggcggggaaaacatggccctgaaggatgagtctcctcagataagcagtaccagcagtagttcctcagaagctgatgatgaagaagcggacggcgagagtagtggggagcccccaggggccccgaaggaagatggagtgctgggaagcaggagccccaggacagaggagagcaaagcagacagtccacccccatcctacccaacacagcaggctgaacaagctccaaacacttgtgaatgtcatgtttgtaagcaggaagcttctggactgacaccatctgcaatgacagccggagcccttcctcctggccatcagttcttgagcccagagaagcccacacaccctgcactgcacctttaccctcacatccatggacatgtgcctttgcacactgttccacacctgccacgccctctcatccaccccaccttgtatgcaacgccccccttcacacacagtaaggctttaccgccagcacctgttcagaatcacacaaataagcatcaggtattcaatgcatctcttcaagaccatatttatccgagctgttttgggaatactccagagtggaatagttctaaatttataagtctttggggatcagaagtgatgaatgataagaactggaatcctggcactttcttgccagatacaatttctgggagtgaaatattagggccaacactctcagaaacaagaccggaagcccttccacctccatctagcaatgaaacacctgcagtctcggatagtaaagagaaaaagaatgctgcaaaaaagaaatgtttatacaatttccaagatgctttcatggaagcaaataaagttgtcatggccacgtcatcagccacgtcctctgtgtcctgcacagctaccacagtgcagtccagcaacagccagttcagagtgtcatccaagagacctccttcagtaggtgacgtgtttcatggcatcagcaaggaggaccacagacactcggccccagccgccccgaggaatagccccacgggcttggcccccctcccagcgctctcgcctgctgcgctgtcacctgctgcgctctcacctgcctccacacctcaccttgcaaatcttgcagccccatcattccccaaaacagcaaccacaactcctgggtttgtggacacacgcaagagtttctgtcctgcacccctacccccggccacagatggctccattagcgcccctccaagtgtctgcagtgaccctgactgcgaagggcaccgctgcgagaatggtgtctacgacccacagcaggatgatggggacgagagtgcagatgaggacagctgctctgagcacagctccagcacctcgacctccaccaaccagaaggagggcaagtactgcgactgctgctactgcgaattctttgggcacggcgggcctccagctgcaccaacaagtagaaattatgcagaaatgagggaaaagcttcgcttacggctgaccaagaggaaagaggagcaacctaaaaaaatggaccagatctcagaaagggaaagcgtcgttgaccatcggagggtggaggatttgttgcagtttataaatagctccgaaaccaaaccagtgagcagcacgcgtgcagcgaagcgagcaaggcataagcaaaggaagctggaggagaaagctcgcctagaagcagaggccagggcccgggagcacctgcacctccaggaggagcagaggcggcgggaggaggaggaggatgaggaagaagaggaggatcgtttcaaggaggaatttcagcggcttcaggagcttcagaagctaagagctgtaaaaaagaagaagaaggagaggccaagtaaagactgccccaagttggacatgctcactagaaatttccaggcagcaacagagtctgttcctaactctggaaacatccacaatggctcactagagcaaactgaagaaccagaaacctcttctcactccccatccaggcatatgaaccactcagagcccaggccagggctaggggctgatggggatgctgcagaccccgtcgacaccagagactccaaatttctcctccccaaggaggtgaatgggaagcagcatgagccactctcttttttcttcgacatcatgcagcaccataaagaaggaaatggcaagcagaagctgaggcagaccagcaaggccagcagcgagccagcgaggaggcccacagagccccccaaggccacagaggggcagtccaagccccgggcccagactgagtcaaaggctaaggtggtcgacctcatgtccatcacagagcagaaaagagaggagagaaaagtcaacagtaataacaataacaaaaagcagctgaaccacatcaaggacgaaaagtcaaacccaacccctatggagcccacctctcccggtgagcatcagcagaacagcaagctggtgctggcagagtcccctcagccaaagggcaagaacaag

SEQ ID NO: 132385 - DNA, 4083 bp, Homo sapiens
  Payload ID: 5852
  Gene Symbol: FAM193A
  Gene Name: family with sequence similarity 193, member A
  Uniprot ID: P78312
  ENST ID: ENST00000502458
  CDS Start-End: 322-4062
ctggacggagaaactgggctaatgtgacagacagcaacaagagtaaggcagttgcttcgctattgagagaaagaaccatatgaagaaatttcggcagaggcggaccgggaacctcagcagctgcagaactactggtcagaagtgcgctacacggtgcgctgcatctaccgccaggcaggaaccccgctggcagatgaccaggaccagtctctggtgcctgacaaggagggagtgaaggagctcgtggataggctctgcgagagggacccctaccagctgtaccagcgtctggaacagcaagctcgagagtatgtgctggagatgaaggtccgcctgctccggcagctgtcggctgcggccaaggtgaaggcaccatctggcctgcagggcccgccgcaagcgcaccagttcatctccctcctgcttgaggagtacggcgccctctgccaggccgcacgctccatcagcaccttccttggcactctggaaaatgaacacttgaaaaagttccaagtgacgtgggaactgcataataaacacctgtttgaaaatctggtcttttcggagccacttcttcagagcaacttgcccgcactggtgtcacagatcaggctaggaaccaccacacacgacacctgcagtgaggacacatacagtaccttgctgcagaggtaccagcgttccgaggaggagctgcgcagagtcgccgaggagtggctggagtgccagaagaggatcgacgcctatgtcgacgagcaggaccttcagaccagtgtgaataagagcattgatactggcacccttgtccagtcctggcttcgaggggctgctatgacaatgaaaaccaagcagcgcatgttaacagaagactgggagctttttaaacaaagaagattcattgaagaacagttaaccaataagaaagcagttactggcgagaacaacttcacagacaccatgaggcacatgttatcgtcccggctgagcatgcccgactgccccaactgcaactacaggagaagatgtgcttgcgatgactgcagtctctcacacatcctcacgtgtggtatcatggacccccccgtcactgatgacatccacattcaccagctcccacttcaagtggatcctgctcctgactatcttgctgagaggagcccgcccagtgtgtcatctgcaagctcggggtccggctccagctctcccatcacaattcagcagcaccccaggctcatcctcacagacagtggctcggcaccaacttttgatgatgaagatgttgcaccattgtcagccaaatttgctgatatttatccattgagtaattatgatgataccgaggtggtggccaacatgaatggaatccacagcgaattgaatggtggcggggaaaacatggccctgaaggatgagtctcctcagataagcagtaccagcagtagttcctcagaagctgatgatgaagaagcggacggcgagagtagtggggagcccccaggggccccgaaggaagatggagtgctgggaagcaggagccccaggacagaggagagcaaagcagacagtccacccccatcctacccaacacagcaggctgaacaagctccaaacacttgtgaatgtcatgtttgtaagcaggaagcttctggactgacaccatctgcaatgacagccggagcccttcctcctggccatcagttcttgagcccagagaagcccacacaccctgcactgcacctttaccctcacatccatggacatgtgcctttgcacactgttccacacctgccacgccctctcatccaccccaccttgtatgcaacgccccccttcacacacagtaaggctttaccgccagcacctgttcagaatcacacaaataagcatcaggtattcaatgcatctcttcaagaccatatttatccgagctgttttgggaatactccagagtggaatagttctaaatttataagtctttggggatcagaagtgatgaatgataagaactggaatcctggcactttcttgccagatacaatttctgggagtgaaatattagggccaacactctcagaaacaagaccggaagcccttccacctccatctagcaatgaaacacctgcagtctcggatagtaaagagaaaaagaatgctgcaaaaaagaaatgtttatacaatttccaagatgctttcatggaagcaaataaagttgtcatggccacgtcatcagccacgtcctctgtgtcctgcacagctaccacagtgcagtccagcaacagccagttcagagtgtcatccaagagacctccttcagtaggtgacgtgtttcatggcatcagcaaggaggaccacagacactcggccccagccgccccgaggaatagccccacgggcttggcccccctcccagcgctctcgcctgctgcgctgtcacctgctgcgctctcacctgcctccacacctcaccttgcaaatcttgcagccccatcattccccaaaacagcaaccacaactcctgggtttgtggacacacgcaagagtttctgtcctgcacccctacccccggccacagatggctccattagcgcccctccaagtgtctgcagtgaccctgactgcgaagggcaccgctgcgagaatggtgtctacgacccacagcaggatgatggggacgagagtgcagatgaggacagctgctctgagcacagctccagcacctcgacctccaccaaccagaaggagggcaagtactgcgactgctgctactgcgaattctttgggcacggcgggcctccagctgcaccaacaagtagaaattatgcagaaatgagggaaaagcttcgcttacggctgaccaagaggaaagaggagcaacctaaaaaaatggaccagatctcagaaagggaaagcgtcgttgaccatcggagggtggaggatttgttgcagtttataaatagctccgaaaccaaaccagtgagcagcacgcgtgcagcgaagcgagcaaggcataagcaaaggaagctggaggagaaagctcgcctagaagcagaggccagggcccgggagcacctgcacctccaggaggagcagaggcggcgggaggaggaggaggatgaggaagaagaggaggatcgtttcaaggaggaatttcagcggcttcaggagcttcagaagctaagagctgtaaaaaagaagaagaaggagaggccaagtaaagactgccccaagttggacatgctcactagaaatttccaggcagcaacagagtctgttcctaactctggaaacatccacaatggctcactagagcaaactgaagaaccagaaacctcttctcactccccatccaggcatatgaaccactcagagcccaggccagggctaggggctgatggggatgctgcagaccccgtcgacaccagagactccaaatttctcctccccaaggaggtgaatgggaagcagcatgagccactctcttttttcttcgacatcatgcagcaccataaagaaggaaatggcaagcagaagctgaggcagaccagcaaggccagcagcgagccagcgaggaggcccacagagccccccaaggccacagaggggcagtccaagccccgggcccagactgagtcaaaggctaaggtggtcgacctcatgtccatcacagagcagaaaagagaggagagaaaagtcaacagtaataacaataacaaaaagcagctgaaccacatcaaggacgaaaagtcaaacccaacccctatggagcccacctctcccggtgagcatcagcagaacagcaagctggtgctggcagagtcccctcagccaaagggcaagaacaagaaaaataagaagaagaaaggagacagagtcaacaattcaattgatgatgtctttctacctaaagatattgacctagacagtgtggatatggatgagacagagagggaagtggaatatttcaaaaggttctgcttggattctgctagacagacccgacaaagactgtctatcaactggtccaattttagcttgaaaaaagccacctttgctgcccactgaatgaggactccctggagaggg

SEQ ID NO: 132386 - DNA, 3987 bp, Homo sapiens
  Payload ID: 5852
  Gene Symbol: FAM193A
  Gene Name: family with sequence similarity 193, member A
  Uniprot ID: P78312
  ENST ID: ENST00000545951
  CDS Start-End: 352-3987
cacaatgacatgcagacctgcatattggagctggacggagaaactgggctaatgtgacagacagcaacaagagtaaggcagttgcttcgctattgagagaaagaaccatatgaagaaatttcggcagaggcggaccgggaacctcagcagctgcagaactactggtcagaagtgcgctacacggtgcgctgcatctaccgccaggcaggaaccccgctggcagatgaccaggaccagtctctggtgcctgacaaggagggagtgaaggagctcgtggataggctctgcgagagggacccctaccagctgtaccagcgtctggaacagcaagctcgagagtatgtgctggagatgaaggtccgcctgctccggcagctgtcggctgcggccaaggtgaaggcaccatctggcctgcagggcccgccgcaagcgcaccagttcatctccctcctgcttgaggagtacggcgccctctgccaggccgcacgctccatcagcaccttccttggcactctggaaaatgaacacttgaaaaagttccaagtgacgtgggaactgcataataaacacctgtttgaaaatctggtcttttcggagccacttcttcagagcaacttgcccgcactggtgtcacagatcaggctaggaaccaccacacacgacacctgcagtgaggacacatacagtaccttgctgcagaggtaccagcgttccgaggaggagctgcgcagagtcgccgaggagtggctggagtgccagaagaggatcgacgcctatgtcgacgagcagatgacaatgaaaaccaagcagcgcatgttaacagaagactgggagctttttaaacaaagaagattcattgaagaacagttaaccaataagaaagcagttactggcgagaacaacttcacagacaccatgaggcacatgttatcgtcccggctgagcatgcccgactgccccaactgcaactacaggagaagatgtgcttgcgatgactgcagtctctcacacatcctcacgtgtggtatcatggacccccccgtcactgatgacatccacattcaccagctcccacttcaagtggatcctgctcctgactatcttgctgagaggagcccgcccagtgtgtcatctgcaagctcggggtccggctccagctctcccatcacaattcagcagcaccccaggctcatcctcacagacagtggctcggcaccaactttttgtagtgatgatgaagatgttgcaccattgtcagccaaatttgctgatatttatccattgagtaattatgatgataccgaggtggtggccaacatgaatggaatccacagcgaattgaatggtggcggggaaaacatggccctgaaggatgagtctcctcagataagcagtaccagcagtagttcctcagaagctgatgatgaagaagcggacggcgagagtagtggggagcccccaggggccccgaaggaagatggagtgctgggaagcaggagccccaggacagaggagagcaaagcagacagtccacccccatcctacccaacacagcaggctgaacaagctccaaacacttgtgaatgtcatgtttgtaagcaggaagcttctggactgacaccatctgcaatgacagccggagcccttcctcctggccatcagttcttgagcccagagaagcccacacaccctgcactgcacctttaccctcacatccatggacatgtgcctttgcacactgttccacacctgccacgccctctcatccaccccaccttgtatgcaacgccccccttcacacacagtaaggctttaccgccagcacctgttcagaatcacacaaataagcatcaggtattcaatgcatctcttcaagaccatatttatccgagctgttttgggaatactccagagtggaatagttctaaatttataagtctttggggatcagaagtgatgaatgataagaactggaatcctggcactttcttgccagatacaatttctgggagtgaaatattagggccaacactctcagaaacaagaccggaagcccttccacctccatctagcaatgaaacacctgcagtctcggatagtaaagagaaaaagaatgctgcaaaaaagaaatgtttatacaatttccaagatgctttcatggaagcaaataaagttgtcatggccacgtcatcagccacgtcctctgtgtcctgcacagctaccacagtgcagtccagcaacagccagttcagagtgtcatccaagagacctccttcagtaggtgacgtgtttcatggcatcagcaaggaggaccacagacactcggccccagccgccccgaggaatagccccacgggcttggcccccctcccagcgctctcgcctgctgcgctgtcacctgctgcgctctcacctgcctccacacctcaccttgcaaatcttgcagccccatcattccccaaaacagcaaccacaactcctgggtttgtggacacacgcaagagtttctgtcctgcacccctacccccggccacagatggctccattagcgcccctccaagtgtctgcagtgaccctgactgcgaagggcaccgctgcgagaatggtgtctacgacccacagcaggatgatggggacgagagtgcagatgaggacagctgctctgagcacagctccagcacctcgacctccaccaaccagaaggagggcaagtactgcgactgctgctactgcgaattctttgggcacggcgggcctccagctgcaccaacaagtagaaattatgcagaaatgagggaaaagcttcgcttacggctgaccaagaggaaagaggagcaacctaaaaaaatggaccagatctcagaaagggaaagcgtcgttgaccatcggagggtggaggatttgttgcagtttataaatagctccgaaaccaaaccagtgagcagcacgcgtgcagcgaagcgagcaaggcataagcaaaggaagctggaggagaaagctcgcctagaagcagaggccagggcccgggagcacctgcacctccaggaggagcagaggcggcgggaggaggaggaggatgaggaagaagaggaggatcgtttcaaggaggaatttcagcggcttcaggagcttcagaagctaagagctgtaaaaaagaagaagaaggagaggccaagtaaagactgccccaagttggacatgctcactagaaatttccaggcagcaacagagtctgttcctaactctggaaacatccacaatggctcactagagcaaactgaagaaccagaaacctcttctcactccccatccaggcatatgaaccactcagagcccaggccagggctaggggctgatggggatgctgcagaccccgtcgacaccagagactccaaatttctcctccccaaggaggtgaatgggaagcagcatgagccactctcttttttcttcgacatcatgcagcaccataaagaaggaaatggcaagcagaagctgaggcagaccagcaaggccagcagcgagccagcgaggaggcccacagagccccccaaggccacagaggggcagtccaagccccgggcccagactgagtcaaaggctaaggtggtcgacctcatgtccatcacagagcagaaaagagaggagagaaaagtcaacagtaataacaataacaaaaagcagctgaaccacatcaaggacgaaaagtcaaacccaacccctatggagcccacctctcccggtgagcatcagcagaacagcaagctggtgctggcagagtcccctcagccaaagggcaagaacaagaaaaataagaagaagaaaggagacagagtcaacaattcaattgatgatgtctttctacctaaagatattgacctagacagtgtggatatggatgagacagagagggaagtggaatatttcaaaagagacggggtttcgccacattgcccaggctggtctcgaactcctggcctcaagtga

SEQ ID NO: 132387 - DNA, 2913 bp, Homo sapiens
  Payload ID: 5853
  Gene Symbol: FAM193B
  Gene Name: family with sequence similarity 193, member B
  Uniprot ID: Q96PV7
  ENST ID: ENST00000514747
  CDS Start-End: 50-2518
gcggcggcggcggcggcgtgtggagcgagggagcggcgcgagcggcggcatgacgcggaggcggagcaggccgagcggcggtgcgggcaggcgcgagcgggctcgggccgcggggccgcagaagccccaggcgcccgagcccccgccgccgccaagcctggaggcgggagcgggtgcaggccctccggaggcgccggcggagcccgaccacgacggccccagggaggatgacgaacccaacctggtgcccggcccgcaggtcccccccgcctccagccagcctgtgcagacttgctgcctgctgtgtcaccgggaacgcaaaggctgggaagaaggcccttctcaaaatggactggtgttgcagggtgagaagctgccccctgacttcatgccaaagctcgtcaagaatctcctaggcgagatgcctctgtgggtctgccagagttgccgaaagagcatggaggaagatgaaaggcagacaggtcgagaacatgcagtggcgatctccttgtcacacacatcctgcaaatcacagtcttgtggagatgactctcattcgtcctcgtcttcctcctcatcatcctcatcctcgtcctcctcttcctgccctgggaactcgggagactgggatcctagctcgttcctgtcggcacataagctctcgggcctctggaattccccacattccagtggggccatgccaggcagctctcttgggagtcctcctaccatccccggtgaggctttccccgtctcggagcaccaccagcactcagacctcactgctccccctaacagccccaccggccaccacccgcagccagcatctctaatcccgtctcaccccagctcctttggctccccaccccacccacacctgctgcccaccaccccggcagcacctttccctgcccaggcttcagagtgccctgttgctgctgccactgccccccacactccagggccatgtcagagctcccatctaccctccaccagcatgccgctcctgaagatgcccccaccattctcggggtgcagccacccctgcagcgggcactgtggtgggcactgcagtgggcctctcctcccacccccgagctctcagccactccctagcactcacagggatcccgggtgcaaggggcacaagtttgcacacagtggcctggcttgccagctgccccagccctgcgaggcagatgaggggctgggtgaggaagaggatagcagctctgagcgaagctcctgcacctcatcctccacccaccagagagatgggaagttctgtgactgctgctactgtgagttcttcggccacaatgcggaaaaggagaaggcccagttggcagcagaagctctaaagcaggcaaatcgtgtttctggaagccgggagccaaggcctgccagggagaggctcttggagtggcccgaccgggaactggatcgggtcaacagcttcctgagcagccgtctgcaggagatcaaaaacactgtcaaagactccatccgtgccagcttcagtgtgtgtgagctcagcatggacagcaatggcttctctaaggagggggctgctgagcctgagcctcagagtctacccccctcaaacctcagtggctcctcagagcagcagcctgacatcaaccttgacctgtcccctttgactttgggctcccctcagaaccacacgttacaagctccaggcgagccagccccaccatgggcagaaatgagaggcccccacccaccatggacagaggtgagggggccccctcccggtatcgtccccgagaacgggctcgtgaggagactcaacaccgtgcccaacctatcccgggtgatctgggtcaagacacccaagccgggctaccccagctccgaggagccaagctcaaaggaagttcccagttgcaagcaggagctgcctgagcctgtgtcctcaggtgggaagccacagaagggcaagaggcagggcagtcaggccaagaagagcgaggcaagcccagccccccggcccccagccagcctagaggttcccagtgccaagggccaggtcgctggccccaagcagccaggcagggtcctagagcttcccaaagtaggcagctgtgctgaggctggagaggggagccgggggagccggccaggaccaggttgggctggcagtcccaaaactgagaaggagaagggcagctcctggcgaaactggccaggcgaggccaaggcacggcctcaggagcaggagtctgtgcagccctcaggcccagcaaggccacagagcttgccccagggcaagggccgcagccgccggagccgcaacaagcaggagaagccagcctcctccttggacgatgtgttcctgcccaaggacatggacggggtggagatggatgagactgaccgagaggtggagtactttaagaggttctgtttggattctgcaaagcagactcgtcagaaagttgctgtgaactggaccaacttcagcctcaagaaaaccactcctagcacagctcagtgaggccctgcccaggctgagctgcttcagggcgtcctgaggccctgactgccagctgaaggcgtataatttttccctccgtgtgccccacctacccgtccaagaccctctgtgctccccaccatcctggaccaaccaaaagctgaacggatgccacactgtgctggggccccttgacctcagcagagccgcttcctggtgctacgcagcctccacactcagagcccgtggactgggctggcctaagggccagggctgatggtactgctggcccaacactgctctctttgtgtttggtttttttgtttttgtttttattttgtttttttccaattctttacttttgatactgtgaagatctttcgtgccgaaagataaagcaacatttggacacagag

SEQ ID NO: 132388 - DNA, 651 bp, Homo sapiens
  Payload ID: 5853
  Gene Symbol: FAM193B
  Gene Name: family with sequence similarity 193, member B
  ENST ID: ENST00000513282
  CDS Start-End: 1-91
ggacatggacggggtggagatggatgagactgaccgagaggtggagtactttaagagcactttgggaggccgaggcgggtggatcacctgagatcaggagttcaagaccagcctggccaagttggtgaaaccccgtctctactaaaaatagaaaaataaggttctgtttggattctgcaaagcagactcgtcagaaagttgctgtgaactggaccaacttcagcctcaagaaaaccactcctagcacagctcagtgaggccctgcccaggctgagctgcttcagggcgtcctgaggccctgactgccagctgaaggcgtataatttttccctccgtgtgccccacctacccgtccaagaccctctgtgctccccaccatcctggaccaaccaaaagctgaacggatgccacactgtgctggggccccttgacctcagcagagccgcttcctggtgctacgcagcctccacactcagagcccgtggactgggctggcctaagggccagggctgatggtactgctggcccaacactgctctctttgtgtttggtttttttgtttttgtttttattttgtttttttccaattctttacttttgatactgtgaagatctttcgtgccgaaagataaagcaacatttggacacaga

SEQ ID NO: 132389 - DNA, 839 bp, Homo sapiens
  Payload ID: 5853
  Gene Symbol: FAM193B
  Gene Name: family with sequence similarity 193, member B
  ENST ID: ENST00000510429
  CDS Start-End: 624-839
ctggcgcctcctcgccatacccagcagagcagttggagcagacagccaggctgcccggaggagtttttggtggggtttctgcactgaggtggaaacccagcagaacctgcccttcttccctcccctgctccgcaaggcagcccaccccgaccttgagatcccaggtttggagaatcctgctgagagcgaacagtaggaggattccccaaagcttccagcttgccacctggaagaaggtcactttcttttgagcaaaggagataacgggaggtaccctgccaaagttcactgagaggcgggggtgacatgggccacggttgctctgggagggttgtggcactcggggctgggtggctctccctaagcttgctctgacaaaagagttttgagttggtcttttggctgagcctgcccaggaaggcaggctcctgcaggagtcttggagggtcggatgcggcgccggatgaggatgaggcgtggcggaagatgcgtttggctctgcagacactgcatcgggcagcaggggactctgggaggctggtgcagccagaaggcatggctcttgacagccttctagtagaatctctggaattgtgcatggtgagaagctgccccctgacttcatgccaaagctcgtcaagaatctcctaggcgagatgcctctgtgggtctgccagagttgccgaaagagcatggaggaagatgaaaggcagacaggtcgagaacatgcagtggcgatctccttgtcacacacatcctgcaaatcacagtcttgtggagatgactctcattcgtcctcgtcttcctcctcatcatcctcatcctcgtcctcctcttcc

SEQ ID NO: 132390 - DNA, 717 bp, Homo sapiens
  Payload ID: 5853
  Gene Symbol: FAM193B
  Gene Name: family with sequence similarity 193, member B
  ENST ID: ENST00000507212
  CDS Start-End: 1-420
agtgccaagggccaggtcgctggccccaagcagccaggcagggtcctagagcttcccaaagtaggcagctgtgctgaggctggagaggggagccgggggagccggccaggaccaggttgggctggcagtcccaaaactgagaaggagaagggcagctcctggcgaaactggccaggcgaggccaaggcacggcctcaggagcaggagtctgtgcagccctcaggcccagcaaggccacagagcttgccccagggcaagggccgcagccgccggagccgcaacaagcaggagaagccagcctcctccttggacgatgtgttcctgcccaaggacatggacggggtggagatggatgagactgaccgagaggtggagtactttaagagcactttgggaggccgaggcgggtggatcacctgagatcaggagttcaagaccagcctggccaagttggtgaaaccccgtctctactaaaaatagaaaaataaggcaggttctgtttggattctgcaaagcagactcgtcagaaagttgctgtgaactggaccaacttcagcctcaagaaaaccactcctagcacagctcagtgaggccctgcccaggctgagctgcttcagggcgtcctgaggccctgactgccagctgaaggcgtataatttttccctccgtgtgccccacctacccgtccaagaccctctgtgctccccaccatcctgg

SEQ ID NO: 132391 - DNA, 825 bp, Homo sapiens
  Payload ID: 5853
  Gene Symbol: FAM193B
  Gene Name: family with sequence similarity 193, member B
  ENST ID: ENST00000507587
  CDS Start-End: 1-222
gaggcgggagcgggtgcaggccctccggaggcgccggcggagcccgaccacgacggccccagggaggatgacgaacccaacctggtgcccggcccgcagcgcctgcagccgcggccccctcagcagctgtgtctcctggcgcctcctcgccatacccagcagagcagttggagcagacagccaggctgcccggaggagtttttggtggggtttctgcactgaggtggaaacccagcagaacctgcccttcttccctcccctgctccgcaaggcagcccaccccgaccttgagatcccaggtttggagaatcctgctgagagcgaacagtaggaggattccccaaagcttccagcttgccacctggaagaaggtcactttcttttgagcaaaggagataacgggaggaaggcaggctcctgcaggagtcttggagggtcggatgcggcgccggatgaggatgaggcgtggcggaagatgcgtttggctctgcagacactgcatcgggcagcaggggactctgggaggctggtgcagccagaaggcatggctcttgacagccttctagtagaatctctggaattgtgcatgtcccccccgcctccagccagcctgtgcagacttgctgcctgctgtgtcaccgggaacgcaaaggctgggaagaaggcccttctcaaaatggactggtgttgcagggtgagaagctgccccctgacttcatgccaaagctcgtcaagaatctcctaggcgagatgcctctgtgggtctgccagagttgccgaaagagcatggaggaagatgaaaggcagacaggtcgagaacatgca

SEQ ID NO: 132392 - DNA, 568 bp, Homo sapiens
  Payload ID: 5853
  Gene Symbol: FAM193B
  Gene Name: family with sequence similarity 193, member B
  ENST ID: ENST00000502403
  CDS Start-End: 334-568
ttgaaatctgtttcttcatcttaaaaaatgggaataagaacacctcgtttgcagagctgttacaaggactaaattttaattatgtctaaaaagtgcctaacccagtgcctggcacgtaataagtggcattactaatattgttactattattttgaaggagagcctttcccctcctgggaaaccctgtttctgtctgttggacaggtcccccccgcctccagccagcctgtgcagacttgctgcctgctgtgtcaccgggaacgcaaaggctgggaagaaggcccttctcaaaatggactggtgttgcagggtgagaagctgccccctgacttcatgccaaagctcgtcaagaatctcctaggcgagatgcctctgtgggtctgccagagttgccgaaagagcatggaggaagatgaaaggcagacaggtcgagaacatgcagtggcgatctccttgtcacacacatcctgcaaatcacagtcttgtggagatgactctcattcgtcctcgtcttcctcctcatcatcctcatcctcgtcctcctcttcctgccctgggaactcgggag

SEQ ID NO: 132393 - DNA, 4604 bp, Homo sapiens
  Payload ID: 5853
  Gene Symbol: FAM193B
  Gene Name: family with sequence similarity 193, member B
  ENST ID: ENST00000506955
  CDS Start-End: 84-512
gggagcggtagcggcggcggcggcggcggcggcggcggcggcggcggcggcgtgtggagcgagggagcggcgcgagcggcggcatgacgcggaggcggagcaggccgagcggcggtgcgggcaggcgcgagcgggctcgggccgcggggccgcagaagccccaggcgcccgagcccccgccgccgccaagcctggaggcgggagcgggtgcaggccctccggaggcgccggcggagcccgaccacgacggccccagggaggatgacgaacccaacctggtgcccggcccgcaggtaggagcgagcggggagacttcggcggctcgggcgctttcaccttccccgagcgggagcgggagtggggcggggttggggatgggccatcctgccgcggctggggtagcagccttcccccgggtccggcgccgaagctttctcccccggggcgggaatggaggctggacccctctccccaaagccgaggctcggtccgcgctcctgcgactaggctgaagctgctcccctctccccgccgcctccgggcgttccggccgtacacccacactgggactgggactgggactgggctgtgatcccgaggccgcagctccgctctcggcccgccacctcccccgggcccacctgctccctcagccacaggccatctcggggctctgggactggacgactgcagcctcttccctctgcccccgggaacggctccactccgtcccctgcagcgcctgcagccgcggccccctcagcagctgtgtctcctggcgcctcctcgccatacccagcagagcagttggagcagacagccaggctgcccggaggagtttttggtggggtttctgcactgaggtggaaacccagcagaacctgcccttcttccctcccctgctccgcaaggcagcccaccccgaccttgagatcccaggtttggagaatcctgctgagagcgaacagtaggaggattccccaaagcttccagcttgccacctggaagaaggtcactttcttttgagcaaaggagataacgggaggtaccctgccaaagttcactgagaggcgggggtgacatgggccacggttgctctgggagggttgtggcactcggggctgggtggctctccctaagcttgctctgacaaaagagttttgagttggtcttttggctgagcctgcccaggaaggcaggctcctgcaggagtcttggagggtcggatgcggcgccggatgaggatgaggcgtggcggaagatgcgtttggctctgcagacactgcatcgggcagcaggggactctgggaggctggtgcagccagaaggcatggctcttgacagccttctagtagaatctctggaattgtgcatatgaagaaacagaaactcagagcaactaaacatttgcccaaatgactccaactgtaggtgtcagacaaaagaaaagaaaaggacttttaggtcccccccgcctccagccagcctgtgcagacttgctgcctgctgtgtcaccgggaacgcaaaggctgggaagaaggcccttctcaaaatggactggtgttgcagggtgagaagctgccccctgacttcatgccaaagctcgtcaagaatctcctaggcgagatgcctctgtgggtctgccagagttgccgaaagagcatggaggaagatgaaaggcagacaggtcgagaacatgcagtggcgatctccttgtcacacacatcctgcaaatcacagtcttgtggagatgactctcattcgtcctcgtcttcctcctcatcatcctcatcctcgtcctcctcttcctgccctgggaactcgggagactgggatcctagctcgttcctgtcggcacataagctctcgggcctctggaattccccacattccagtggggccatgccaggcagctctcttgggagtcctcctaccatccccggtgaggctttccccgtctcggagcaccaccagcactcagacctcactgctccccctaacagccccaccggccaccacccgcagccagcatctctaatcccgtctcaccccagctcctttggctccccaccccacccacacctgctgcccaccaccccggcagcacctttccctgcccaggcttcagagtgccctgttgctgctgccactgccccccacactccagggccatgtcagagctcccatctaccctccaccagcatgccgctcctgaagatgcccccaccattctcggggtgcagccacccctgcagcgggcactgtggtgggcactgcagtgggcctctcctcccacccccgagctctcagccactccctagcactcacagggatcccgggtgcaaggggcacaagtttgcacacagtggcctggcttgccagctgccccagccctgcgaggcagatgaggggctgggtgaggaagaggatagcagctctgagcgaagctcctgcacctcatcctccacccaccagagagatgggaagttctgtgactgctgctactgtgagttcttcggccacaatgcggcaaaaggaaaggaaatggcagagagaaagctatgattctgatgagtatgtatacgtgtgtaatcccagagaagtgaacgcttgggagtgatgaaggcagagtggaagcaaaaaggctctcagtcccccaagtgtgacagccagccgagggacaggccgtgagcacagacggcgccaggaaggaggctcagatcagagggcatgctggctctggccagggggaggaagcagtgcagaagtctcataagccacccgctgccccgacgagtcggaactataccgagatccgggagaagctccgctcgaggctgaccaggcggaaagaggagctgcccatgaaggggggcaccctgggcgggatccctggggagcccgccgtggaccaccgagatgtggatgagctgctggaattcatcaacagcacggagcccaaagtccccaacagcgccagggccgccaagcgggcccggcacaagctgaaaaagaaggaaaaggagaaggcccagttggcagcagaagctctaaagcaggcaaatcgtgtttctggaagccgggagccaaggcctgccagggagaggctcttggagtggcccgaccgggaactggatcgggtcaacagcttcctgagcagccgtctgcaggagatcaaaaacactgtcaaagactccatccgtgccagcttcagtgtgtgtgagctcagcatggacagcaatggcttctctaaggagggggctgctgagcctgagcctcagagtctacccccctcaaacctcagtggctcctcagagcagcagcctgacatcaaccttgacctgtcccctttgactttgggctcccctcagaaccacacgttacaagctccaggcgagccagccccaccatgggcagaaatgagaggcccccacccaccatggacagaggtgagggggccccctcccggtatcgtccccgagaacgggctcgtgaggagactcaacaccgtgcccaacctatcccgggtgatctgggtcaagacacccaagccgggctaccccagctccgaggagccaagctcaaaggaagttcccagttgcaagcaggagctgcctgagcctgtgtcctcaggtgggaagccacagaagggcaagaggcagggcagtcaggccaagaagagcgaggcaagcccagccccccggcccccagccagcctagaggttcccagtgccaagggccaggtcgctggccccaagcagccaggcagggtcctagagcttcccaaagtaggcagctgtgctgaggctggagaggggagccgggggagccggccaggaccaggttgggctggcagtcccaaaactgagaaggagaagggcagctcctggcgaaactggccaggcgaggccaaggcacggcctcaggagcaggagtctgtgcagccctcaggcccagcaaggccacagagcttgccccagggcaagggccgcagccgccggagccgcaacaagcaggagaagccagcctcctccttggacgatgtgttcctgcccaaggacatggacggggtggagatggatgagactgaccgagaggtggagtactttaagaggttctgtttggattctgcaaagcagactcgtcagaaagttgctgtgaactggaccaacttcagcctcaagaaaaccactcctagcacagctcagtgaggccctgcccaggctgagctgcttcagggcgtcctgaggccctgactgccagctgaaggcgtataatttttccctccgtgtgccccacctacccgtccaagaccctctgtgctccccaccatcctggaccaaccaaaagctgaacggatgccacactgtgctggggccccttgacctcagcagagccgcttcctggtgctacgcagcctccacactcagagcccgtggactgggctggcctaagggccagggctgatggtactgctggcccaacactgctctctttgtgtttggtttttttgtttttgtttttattttgtttttttccaattctttacttttgatactgtgaagatctttcgtgccgaaagataaagcaacatttggacacag

SEQ ID NO: 132394 - DNA, 2800 bp, Homo sapiens
  Payload ID: 5853
  Gene Symbol: FAM193B
  Gene Name: family with sequence similarity 193, member B
  ENST ID: ENST00000510479
  CDS Start-End: 49-411
tctcaaaatggactggtgttgcagggtgagaagctgccccctgacttcatgccaaagctcgtcaagaatctcctaggcgagatgcctctgtgggtctgccagagttgccgaaagagcatggaggaagatgaaaggcagacaggtcgagaacatgcagtggcgatctccttgtcacacacatcctgcaaatcacagtcttgtggagatgactctcattcgtcctcgtcttcctcctcatcatcctcatcctcgtcctcctcttcctgccctgggaactcgggagactgggatcctagctcgttcctgtcggcacataagctctcgggcctctggaattccccacattccagtggggccatgccaggcagctctcttgggagtcctcctaccatccccgcatgccgctcctgaagatgcccccaccattctcggggtgcagccacccctgcagcgggcactgtggtgggcactgcagtgggcctctcctcccacccccgagctctcagccactccctagcactcacagggatcccgggtgcaaggggcacaagtttgcacacagtggcctggcttgccagctgccccagccctgcgaggcagatgaggggctgggtgaggaagaggatagcagctctgagcgaagctcctgcacctcatcctccacccaccagagagatgggaagttctgtgactgctgctactgtgagttcttcggccacaatgcggcaaaaggaaaggaaatggcagagagaaagctatgattctgatgagtatgtatacgtgtgtaatcccagagaagtgaacgcttgggagtgatgaaggcagagtggaagcaaaaaggctctcagtcccccaagtgtgacagccagccgagggacaggccgtgagcacagacggcgccaggaaggaggctcagatcagagggcatgctggctctggccagggggaggaagcagtgcagaagtctcataagccacccgctgccccgacgagtcggaactataccgagatccgggagaagctccgctcgaggctgaccaggcggaaagaggagctgcccatgaaggggggcaccctgggcgggatccctggggagcccgccgtggaccaccgagatgtggatgagctgctggaattcatcaacagcacggagcccaaagtccccaacagcgccagggccgccaagcgggcccggcacaagctgaaaaagaaggaaaaggagaaggcccagttggcagcagaagctctaaagcaggcaaatcgtgtttctggaagccgggagccaaggcctgccagggagaggctcttggagtggcccgaccgggaactggatcgggtcaacagcttcctgagcagccgtctgcaggagatcaaaaacactgtcaaagactccatccgtgccagcttcagtgtgtgtgagctcagcatggacagcaatggcttctctaaggagggggctgctgagcctgagcctcagagtctacccccctcaaacctcagtggctcctcagagcagcagcctgacatcaaccttgacctgtcccctttgactttgggctcccctcagaaccacacgttacaagctccaggcgagccagccccaccatgggcagaaatgagaggcccccacccaccatggacagaggtgagggggccccctcccggtatcgtccccgagaacgggctcgtgaggagactcaacaccgtgcccaacctatcccgggtgatctgggtcaagacacccaagccgggctaccccagctccgaggagccaagctcaaaggaagttcccagttgcaagcaggagctgcctgagcctgtgtcctcaggtgggaagccacagaagggcaagaggcagggcagtcaggccaagaagagcgaggcaagcccagccccccggcccccagccagcctagaggttcccagtgccaagggccaggtcgctggccccaagcagccaggcagggtcctagagcttcccaaagtaggcagctgtgctgaggctggagaggggagccgggggagccggccaggaccaggttgggctggcagtcccaaaactgagaaggagaagggcagctcctggcgaaactggccaggcgaggccaaggcacggcctcaggagcaggagtctgtgcagccctcaggcccagcaaggccacagagcttgccccagggcaagggccgcagccgccggagccgcaacaagcaggagaagccagcctcctccttggacgatgtgttcctgcccaaggacatggacggggtggagatggatgagactgaccgagaggtggagtactttaagaggttctgtttggattctgcaaagcagactcgtcagaaagttgctgtgaactggaccaacttcagcctcaagaaaaccactcctagcacagctcagtgaggccctgcccaggctgagctgcttcagggcgtcctgaggccctgactgccagctgaaggcgtataatttttccctccgtgtgccccacctacccgtccaagaccctctgtgctccccaccatcctggaccaaccaaaagctgaacggatgccacactgtgctggggccccttgacctcagcagagccgcttcctggtgctacgcagcctccacactcagagcccgtggactgggctggcctaagggccagggctgatggtactgctggcccaacactgctctctttgtgtttggtttttttgtttttgtttttattttgtttttttccaattctttacttttgatactgtgaagatctttcgtgccgaaagataaagcaacatttggacacag

SEQ ID NO: 132395 - DNA, 426 bp, Homo sapiens
  Payload ID: 5853
  Gene Symbol: FAM193B
  Gene Name: family with sequence similarity 193, member B
  ENST ID: ENST00000506432
  CDS Start-End: 290-426
gcagacactgcatcgggcagcaggggactctgggaggctggtgcagccagaaggcatggctcttgacagccttctagtagaatctctggaattgtgcatggcagaagaggaaagaaactaacgggtattgagcacctactttgtgccaggcccaggccaggtcccccccgcctccagccagcctgtgcagacttgctgcctgctgtgtcaccgggaacgcaaaggctgggaagaaggcccttctcaaaatggactggtgttgcagggtgagaagctgccccctgacttcatgccaaagctcgtcaagaatctcctaggcgagatgcctctgtgggtctgccagagttgccgaaagagcatggaggaagatgaaaggcagacaggtcgagaacatgcagtggcgatctccttgtcacacacatcctg

SEQ ID NO: 132396 - DNA, 2237 bp, Homo sapiens
  Payload ID: 5853
  Gene Symbol: FAM193B
  Gene Name: family with sequence similarity 193, member B
  ENST ID: ENST00000510163
  CDS Start-End: 1-325
cccgagctctcagccactccctagcactcacagggatcccgggtgcaaggggcacaagtttgcacacagtggcctggcttgccagctgccccagccctgcgaggcagatgaggggctgggtgaggaagaggatagcagctctgagcgaagctcctgcacctcatcctccacccaccagagagatgggaagttctgtgactgctgctactgtgagttcttcggccacaatgcgagaagtgaacgcttgggagtgatgaaggcagagtggaagcaaaaaggctctcagtcccccaagtgtgacagccagccgagggacaggccgtgagcacagacggcgccaggaaggaggctcagatcagagggcatgctggctctggccagggggaggaagcagtgcagaagtctcataagccacccgctgccccgacgagtcggaactataccgagatccgggagaagctccgctcgaggctgaccaggcggaaagaggagctgcccatgaaggggggcaccctgggcgggatccctggggagcccgccgtggaccaccgagatgtggatgagctgctggaattcatcaacagcacggagcccaaagtccccaacagcgccagggccgccaagcgggcccggcacaagctgaaaaagaaggaaaaggagaaggcccagttggcagcagaagctctaaagcaggcaaatcgtgtttctggaagccgggagccaaggcctgccagggagaggctcttggagtggcccgaccgggaactggatcgggtcaacagcttcctgagcagccgtctgcaggagatcaaaaacactgtcaaagactccatccgtgccagcttcagtgtgtgtgagctcagcatggacagcaatggcttctctaaggagggggctgctgagcctgagcctcagagtctacccccctcaaacctcagtggctcctcagagcagcagcctgacatcaaccttgacctgtcccctttgactttgggctcccctcagaaccacacgttacaagctccaggcgagccagccccaccatgggcagaaatgagaggcccccacccaccatggacagaggtgagggggccccctcccggtatcgtccccgagaacgggctcgtgaggagactcaacaccgtgcccaacctatcccgggtgatctgggtcaagacacccaagccgggctaccccagctccgaggagccaagctcaaaggaagttcccagttgcaagcaggagctgcctgagcctgtgtcctcaggtgggaagccacagaagggcaagaggcagggcagtcaggccaagaagagcgaggcaagcccagccccccggcccccagccagcctagaggttcccagtgccaagggccaggtcgctggccccaagcagccaggcagggtcctagagcttcccaaagtaggcagctgtgctgaggctggagaggggagccgggggagccggccaggaccaggttgggctggcagtcccaaaactgagaaggagaagggcagctcctggcgaaactggccaggcgaggccaaggcacggcctcaggagcaggagtctgtgcagccctcaggcccagcaaggccacagagcttgccccagggcaagggccgcagccgccggagccgcaacaagcaggagaagccagcctcctccttggacgatgtgttcctgcccaaggacatggacggggtggagatggatgagactgaccgagaggtggagtactttaagaggttctgtttggattctgcaaagcagactcgtcagaaagttgctgtgaactggaccaacttcagcctcaagaaaaccactcctagcacagctcagtgaggccctgcccaggctgagctgcttcagggcgtcctgaggccctgactgccagctgaaggcgtataatttttccctccgtgtgccccacctacccgtccaagaccctctgtgctccccaccatcctggaccaaccaaaagctgaacggatgccacactgtgctggggccccttgacctcagcagagccgcttcctggtgctacgcagcctccacactcagagcccgtggactgggctggcctaagggccagggctgatggtactgctggcccaacactgctctctttgtgtttggtttttttgtttttgtttttattttgtttttttccaattctttacttttgatactgtgaagatctttcgtgccgaaagataaagcaacatttggacaca

SEQ ID NO: 132397 - DNA, 1916 bp, Homo sapiens
  Payload ID: 5853
  Gene Symbol: FAM193B
  Gene Name: family with sequence similarity 193, member B
  ENST ID: ENST00000524677
  CDS Start-End: 1-1525
tgagcgaagctcctgcacctcatcctccacccaccagagagatgggaagttctgtgactgctgctactgtgagttcttcggccacaatgcgccacccgctgccccgacgagtcggaactataccgagatccgggagaagctccgctcgaggctgaccaggcggaaagaggagctgcccatgaaggggggcaccctgggcgggatccctggggagcccgccgtggaccaccgagatgtggatgagctgctggaattcatcaacagcacggagcccaaagtccccaacagcgccagggccgccaagcgggcccggcacaagctgaaaaagaaggaaaaggagaaggcccagttggcagcagaagctctaaagcaggcaaatcgtgtttctggaagccgggagccaaggcctgccagggagaggctcttggagtggcccgaccgggaactggatcgggtcaacagcttcctgagcagccgtctgcaggagatcaaaaacactgtcaaagactccatccgtgccagcttcagtgtgtgtgagctcagcatggacagcaatggcttctctaaggagggggctgctgagcctgagcctcagagtctacccccctcaaacctcagtggctcctcagagcagcagcctgacatcaaccttgacctgtcccctttgactttgggctcccctcagaaccacacgttacaagctccaggcgagccagccccaccatgggcagaaatgagaggcccccacccaccatggacagaggtgagggggccccctcccggtatcgtccccgagaacgggctcgtgaggagactcaacaccgtgcccaacctatcccgggtgatctgggtcaagacacccaagccgggctaccccagctccgaggagccaagctcaaaggaagttcccagttgcaagcaggagctgcctgagcctgtgtcctcaggtgggaagccacagaagggcaagaggcagggcagtcaggccaagaagagcgaggcaagcccagccccccggcccccagccagcctagaggttcccagtgccaagggccaggtcgctggccccaagcagccaggcagggtcctagagcttcccaaagtaggcagctgtgctgaggctggagaggggagccgggggagccggccaggaccaggttgggctggcagtcccaaaactgagaaggagaagggcagctcctggcgaaactggccaggcgaggccaaggcacggcctcaggagcaggagtctgtgcagccctcaggcccagcaaggccacagagcttgccccagggcaagggccgcagccgccggagccgcaacaagcaggagaagccagcctcctccttggacgatgtgttcctgcccaaggacatggacggggtggagatggatgagactgaccgagaggtggagtactttaagaggttctgtttggattctgcaaagcagactcgtcagaaagttgctgtgaactggaccaacttcagcctcaagaaaaccactcctagcacagctcagtgaggccctgcccaggctgagctgcttcagggcgtcctgaggccctgactgccagctgaaggcgtataatttttccctccgtgtgccccacctacccgtccaagaccctctgtgctccccaccatcctggaccaaccaaaagctgaacggatgccacactgtgctggggccccttgacctcagcagagccgcttcctggtgctacgcagcctccacactcagagcccgtggactgggctggcctaagggccagggctgatggtactgctggcccaacactgctctctttgtgtttggtttttttgtttttgtttttattttgtttttttccaattctttacttttgatactgtgaagatctttcgtgccgaaagataaagcaacatttggacac

SEQ ID NO: 132398 - DNA, 946 bp, Homo sapiens
  Payload ID: 5854
  Gene Symbol: FAM195A
  Gene Name: family with sequence similarity 195, member A
  Uniprot ID: Q9BUT9
  ENST ID: ENST00000307650
  CDS Start-End: 180-662
gcaagcgccgcctccgccgcgtgtccggggtcagcccgagcccgtgcgggccctttaagggccgggggcgtgtagcgggcccgccccctccccgcggcgcccgcagtccgttaagtgcgagccccggcgcaggggccggatctggccgggggccggcggcggtgtgggagcggcgcgtcatgtacaccatcaccaaggggcccagcaagctggtcgcgcagcgccgcacaggtcccacgcagcagcaggtggagggccggctcggcgagctcctgaaatgccggcagcccgcgccgccgacctcgcagcccccgcgggcgcagccctttgcgcagccgccgggaccctggcccctgtcgagtccagggccaaggcttgtgttcaatcgtgtgaatggccggcgggccccctccacgtccccatccttcgaggggacccaggagacctacacagtggcccacgaggagaatgtccgctttgtgtccgaagcctggcagcaggtgcaacagcagctggatggtggcccagccggtgagggcgggccaaggcctgtgcagtacgtggagaggacccccaatccccggctgcagaactttgtgcccattgacctagacgagtggtgggcgcagcagttcctggcgagaatcaccagctgttcctagtggctgctgggagggggcgctgctacacggccgacctgtcgccaggagagaagcatggcgccctgcccacccactgcgcctggctgggtgccggccacacctgaagtgccagcatttggacttttgcacctttttttcccttggcccggctgtcccaaccaagctgccatggccaagggccgaacccgtctgacctcagccctgctcactgtgcccagggaccagcgaccagcccctggggctggcagggaggagctccaggctaataaagtggagaaactgtc

SEQ ID NO: 132399 - DNA, 702 bp, Homo sapiens
  Payload ID: 5854
  Gene Symbol: FAM195A
  Gene Name: family with sequence similarity 195, member A
  Uniprot ID: Q9BUT9
  ENST ID: ENST00000474840
  CDS Start-End: 64-291
gcgagccccggcgcaggggccggatctggccgggggccggcggcggtgtgggagcggcgcgtcatgtacaccatcaccaaggggcccagcaagctggtcgcgcagcgccgcacaggtcccacgcagcagcaggtggagggccggctcggcgagctcctgaaatgccggcagcccgcgccgccgacctcgcagcccccgcgggcgcagccctttgcgcagccgccgggaccctggcccctgtcgagcctggcagcaggtgcaacagcagctggatggtggcccagccggtgagggcgggccaaggcctgtgcagtacgtggagaggacccccaatccccggctgcagaactttgtgcccattgacctagacgagtggtgggcgcagcagttcctggcgagaatcaccagctgttcctagtggctgctgggagggggcgctgctacacggccgacctgtcgccaggagagaagcatggcgccctgcccacccactgcgcctggctgggtgccggccacacctgaagtgccagcatttggacttttgcacctttttttcccttggcccggctgtcccaaccaagctgccatggccaagggccgaacccgtctgacctcagccctgctcactgtgcccagggaccagcgaccagcccctggggctggcagggaggagctccaggctaataaagtggagaaactgtc

SEQ ID NO: 132400 - DNA, 1050 bp, Homo sapiens
  Payload ID: 5854
  Gene Symbol: FAM195A
  Gene Name: family with sequence similarity 195, member A
  ENST ID: ENST00000491999
  CDS Start-End: 147-344
gcccgagcccgtgcgggccctttaagggccgggggcgtgtagcgggcccgccccctccccgcggcgcccgcagtccgttaagtgcgagccccggcgcaggggccggatctggccgggggccggcggcggtgtgggagcggcgcgtcatgtacaccatcaccaaggggcccagcaagctggtcgcgcagcgccgcacaggtcccacgcagcagcaggtggagggccggctcggcgagctcctgaaatgccggcagcccgcgccgccgacctcgcagcccccgcgggcgcagccctttgcgcagccgccgggaccctggcccctgtcgagtgcccctctcagctgaggaggaaccgagagcggcgctggggcacctgagcccaggaaggcaacaggccggccgggaccgcgagtgcctggcggagcaggcgcagcccaggactcccggctcccacctccggctgtagtccagggccaaggcttgtgttcaatcgtgtgaatggccggcgggccccctccacgtccccatccttcgaggggacccaggagacctacacagtggcccacgaggagaatgtccgctttgtgtccgaagcctggcagcaggtgcaacagcagctggatggtggcccagccggtgagggcgggccaaggcctgtgcagtacgtggagaggacccccaatccccggctgcagaactttgtgcccattgacctagacgagtggtgggcgcagcagttcctggcgagaatcaccagctgttcctagtggctgctgggagggggcgctgctacacggccgacctgtcgccaggagagaagcatggcgccctgcccacccactgcgcctggctgggtgccggccacacctgaagtgccagcatttggacttttgcacctttttttcccttggcccggctgtcccaaccaagctgccatggccaagggccgaacccgtctgacctcagccctgctcactgtgcccagggaccagcgaccagcccctggggctggcagggaggagctccaggctaataaagtggagaaactgtc

SEQ ID NO: 132401 - DNA, 341 bp, Homo sapiens
  Payload ID: 5854
  Gene Symbol: FAM195A
  Gene Name: family with sequence similarity 195, member A
  ENST ID: ENST00000629534
  CDS Start-End: 144-341
cgagcccgtgcgggccctttaagggccgggggcgtgtagcgggcccgccccctccccgcggcgcccgcagtccgttaagtgcgagccccggcgcaggggccggatctggccgggggccggcggcggtgtgggagcggcgcgtcatgtacaccatcaccaaggggcccagcaagctggtcgcgcagcgccgcacaggtcccacgcagcagcaggtggagggccggctcggcgagctcctgaaatgccggcagcccgcgccgccgacctcgcagcccccgcgggcgcagccctttgcgcagccgccgggaccctggcccctgtcgagtgcccctctcagctga

SEQ ID NO: 132402 - DNA, 942 bp, Homo sapiens
  Payload ID: 5855
  Gene Symbol: FAM195B
  Gene Name: family with sequence similarity 195, member B
  ENST ID: ENST00000457257
  CDS Start-End: 1-357
atgctgccacaccagaggctgaggggatctggcggtggagcgctaggatcagacgcccccgcgatgaccagctcccccgtctccagagtcgtgtacaacggcaagaggaccagcagcccccgctccccacccagcagcagcgagatcttcaccccagcccacgaggagaacgtccgcttcatttacgaagcctggcagggtgtggagcgagacctgcgaggccaggtgccgggtggcgagcggggcctggtggaggagtatgtggagaaggtccctaaccccagcctgaagaccttcaagcccatcgacctgagtgacctgaagcgccggagcacgcaggatgccaagaagtcctagagcgcccggtgcccctccccggcctccggaagatcagggatcaggaggggagaagaaggagcctctgctgcctcccaggctgctgggactgggctggttttgtccttgaagtggtcaggatacaggacaagggcagccccaccccatccagcctgggctccccgcagacccttgctgctcccgtggcctggacacgctggggagcttctcacacctacccctaccgtccagcctggcctcttccctgaatcagcttcaagatggcaccagctctttgggcctaggatactgccgggccccccaagggggtccccagcaaccaggcctggcctcctggtgtctgcggtcacagtggcccctgggcaggggcacccaggctgaccctgaggtgctgctgctgggtctgtcttggctctggggtgtgctgggagggtcaccaggtcccttttccttcctgtgccctctgaaagctaagtgtctgtgtggctgtggagctcgagggtctgtgaataaaggcggcggcactgggcgtggcctcttggtggtctgtcaggcctctgcccctgcggcacacatgcacagcca

SEQ ID NO: 132403 - DNA, 1209 bp, Homo sapiens
  Payload ID: 5855
  Gene Symbol: FAM195B
  Gene Name: family with sequence similarity 195, member B
  Uniprot ID: C9JLW8
  ENST ID: ENST00000455127
  CDS Start-End: 80-373
ggaagaggcggtggcggcgggtcggggcgagaggctgaggggatctggcggtggagcgctaggatcagacgcccccgcgatgaccagctcccccgtctccagagtcgtgtacaacggcaagaggaccagcagcccccgctccccacccagcagcagcgagatcttcaccccagcccacgaggagaacgtccgcttcatttacgaagcctggcagggtgtggagcgagacctgcgaggccaggtgccgggtggcgagcggggcctggtggaggagtatgtggagaaggtccctaaccccagcctgaagaccttcaagcccatcgacctgagtgacctgaagcgccggagcacgcaggatgccaagaagtcctagagcgcccggtgcccctccccggcctccggaagatcagggtgcgaggtgtcggttccctcctgtcctgtggtcctgcccctgggatgggggtgccttgctccagcgggctgcagatcccagcactggcgtgactgacggctgaggcctgcctctccttcccaagcccccttccttcatccttgggggtctcaggctgcccccatcatgggggtctgggccctgcccaccctcctgccctcccccagccacctggctgcatttttgaagctgcctggcccccaggggccctgacctgacctctctcctctcccctcaccctcctgcccctggccactgcaggatcaggaggggagaagaaggagcctctgctgcctcccaggctgctgggactgggctggttttgtccttgaagtggtcaggatacaggacaagggcagccccaccccatccagcctgggctccccgcagacccttgctgctcccgtggcctggacacgctggggagcttctcacacctacccctaccgtccagcctggcctcttccctgaatcagcttcaagatggcaccagctctttgggcctaggatactgccgggccccccaagggggtccccagcaaccaggcctggcctcctggtgtctgcggtcacagtggcccctgggcaggggcacccaggctgaccctgaggtgctgctgctgggtctgtcttggctctggggtgtgctgggagggtcaccaggtcccttttccttcctgtgccctctgaaagctaagtgtctgtgtggctgtggagctcgagggtctgtgaataaaggcggcggcactgggcgtggc

SEQ ID NO: 132404 - DNA, 925 bp, Homo sapiens
  Payload ID: 5855
  Gene Symbol: FAM195B
  Gene Name: family with sequence similarity 195, member B
  Uniprot ID: C9JLW8
  ENST ID: ENST00000538396
  CDS Start-End: 103-396
acttccggcggggcctcccagctggaagaggcggtggcggcgggtcggggcgagaggctgaggggatctggcggtggagcgctaggatcagacgcccccgcgatgaccagctcccccgtctccagagtcgtgtacaacggcaagaggaccagcagcccccgctccccacccagcagcagcgagatcttcaccccagcccacgaggagaacgtccgcttcatttacgaagcctggcagggtgtggagcgagacctgcgaggccaggtgccgggtggcgagcggggcctggtggaggagtatgtggagaaggtccctaaccccagcctgaagaccttcaagcccatcgacctgagtgacctgaagcgccggagcacgcaggatgccaagaagtcctagagcgcccggtgcccctccccggcctccggaagatcagggatcaggaggggagaagaaggagcctctgctgcctcccaggctgctgggactgggctggttttgtccttgaagtggtcaggatacaggacaagggcagccccaccccatccagcctgggctccccgcagacccttgctgctcccgtggcctggacacgctggggagcttctcacacctacccctaccgtccagcctggcctcttccctgaatcagcttcaagatggcaccagctctttgggcctaggatactgccgggccccccaagggggtccccagcaaccaggcctggcctcctggtgtctgcggtcacagtggcccctgggcaggggcacccaggctgaccctgaggtgctgctgctgggtctgtcttggctctggggtgtgctgggagggtcaccaggtcccttttccttcctgtgccctctgaaagctaagtgtctgtgtggctgtggagctcgagggtctgtgaataaaggcggcggcactggg

SEQ ID NO: 132405 - DNA, 2979 bp, Homo sapiens
  Payload ID: 5855
  Gene Symbol: FAM195B
  Gene Name: family with sequence similarity 195, member B
  Uniprot ID: C9JLW8
  ENST ID: ENST00000576730
  CDS Start-End: 2157-2450
tttttagtagagacagggtttcaccatgttcgccaggctgctctcaaactcctgacctcagctgatccacccgcctctgcctcccaaagtgttgggattacaagcgtgagccaccgtgcctgggctttttttttttttttgacacagggtcttgctctgttgcctgggctggagtgcagtgccacgatcttggctccctgcagccttgacctcctgggctcaagcagtcctcccaccccagcctctgagtagctgggactacaagtgcatgctgccacaccaggtgtgttcatatgggtgtgtgccgcatgtgtgtgggcaggtgtgtacagacaggtgtgtgcgggcggttgtatgcatgtgtgtggcagatgtattcagctaaggtgtgtgcaggtaggtatgtgtgggcaggtgtgtgtgtgtgtgtgtgtgtgcacacaaggcaaagggagccccggaagggtagttgcttgggaggatgtggggcaatcagtgggatctggggcaggagtgacaaccgaacccagcagggggatcccaggccaaaggtgtggctgcataaaggccaagtggccactggaggcagaggatgcatggggagaagagccacgggagagggcaggctgggaggcaggtacccctaaagcagcagtcggtcagtggtgagagccagcagggggcgaggcagggggctggccagtctacctgttacctgagctctgcctttctctgtaacgggagcttcccagcaggcagcatgtccctgtgggaccctcaacccaaacaggcctttccctccgtgctctggtgttcgtgggctggagtccctggcaggaggactgggcagagagaccccagagtccaagaaaggagaggtgactttgtgagcaaactgggtgctgccgtgggtggggagcccctggccctttttggacctcactcctggcctgggatggggcacagagttccagggctgggagctggttttctgctctttgctggttttgcccttgagccgtgggattcttatcacgtggtgtttgagggctggaccattgacatgaggcggaatgagccagagaggactcgaagcctcagtgctcctggccctctgtgagggctgcagccgtgtgccctggagtatctgcagccttgggcctctgggtgggcaggggagttgcttgtgctcaaagccccctcctgggaatcctgggactcccctcccccagaacctggagttgccccctctggagcagggcaggctggagaccagccctgtcagcttccccaccttggggttgtgtgtcctcagctggagtggggacactgtccagcctgccagtgtgagcgtctgagcctcaaaatagactccatttttccagagccgtggattcccctgggctgggaggccataaacgggcggcagcccagggtcttggtcaccaggtcaggcccagcagcttcctccagggccaccccctctgcccaccaggggagctggagtttggttccatctccagggtactgatgtggctcatgctctagggaaccaggaagctggacctgggtaggtgccggggagctgggatcacctttaggaagctcatccccgttttacagaaaggaaatcaaggctcagcagaagccgtgtgcccagccctgcaccagggagagcagggtcagttagctgaggggctgcaggccctctgctgcagtgagaggcagctggacatcagagatgctgacggccccaccagcccacgtggggaggggctctggccacagtgctcccggtgctggggctgaggcctccacgtctgagcctgagacgtggaggatcaaggccgctgagcgggcttgatcgcttcaagttgtgtgtgtgtctggctcgtctggccagctctctgctacctcgtagggttgcctggagcccactggctgcctgtggctggaccccagcctgtgggggacaccctggtaggcagagggaccatgcactttgttcacatctgaagggaggaggcaggtgtgccctgcgcctccccctccttctgtgctggagagggtggccctgcgtcccatgcctgcgctggcttctgtttcagaggctgaggggatctggcggtggagcgctaggatcagacgcccccgcgatgaccagctcccccgtctccagagtcgtgtacaacggcaagaggaccagcagcccccgctccccacccagcagcagcgagatcttcaccccagcccacgaggagaacgtccgcttcatttacgaagcctggcagggtgtggagcgagacctgcgaggccaggtgccgggtggcgagcggggcctggtggaggagtatgtggagaaggtccctaaccccagcctgaagaccttcaagcccatcgacctgagtgacctgaagcgccggagcacgcaggatgccaagaagtcctagagcgcccggtgcccctccccggcctccggaagatcagggatcaggaggggagaagaaggagcctctgctgcctcccaggctgctgggactgggctggttttgtccttgaagtggtcaggatacaggacaagggcagccccaccccatccagcctgggctccccgcagacccttgctgctcccgtggcctggacacgctggggagcttctcacacctacccctaccgtccagcctggcctcttccctgaatcagcttcaagatggcaccagctctttgggcctaggatactgccgggccccccaagggggtccccagcaaccaggcctggcctcctggtgtctgcggtcacagtggcccctgggcaggggcacccaggctgaccctgaggtgctgctgctgggtctgtcttggctctggggtgtgctgggagggtcaccaggtcccttttccttcctgtgccctctgaaagctaagtgtctgtgtggctgtggagctcgagggtctgtgaataaaggcggcggcactggg

SEQ ID NO: 132406 - DNA, 2775 bp, Homo sapiens
  Payload ID: 5855
  Gene Symbol: FAM195B
  Gene Name: family with sequence similarity 195, member B
  Uniprot ID: C9JLW8
  ENST ID: ENST00000574190
  CDS Start-End: 1689-1982
gttgcttgggaggatgtggggcaatcagtgggatctggggcaggagtgacaaccgaacccagcagggggatcccaggccaaaggtgtggctgcataaaggccaagtggccactggaggcagaggatgcatggggagaagagccacgggagagggcaggctgggaggcaggtacccctaaagcagcagtcggtcagtggtgagagccagcagggggcgaggcagggggctggccagtctacctgttacctgagctctgcctttctctgtaacgggagcttcccagcaggcagcatgtccctgtgggaccctcaacccaaacaggcctttccctccgtgctctggtgttcgtgggctggagtccctggcaggaggactgggcagagagaccccagagtccaagaaaggagaggtgactttgtgagcaaactgggtgctgccgtgggtggggagcccctggccctttttggacctcactcctggcctgggatggggcacagagttccagggctgggagctggttttctgctctttgctggttttgcccttgagccgtgggattcttatcacgtggtgtttgagggctggaccattgacatgaggcggaatgagccagagaggactcgaagcctcagtgctcctggccctctgtgagggctgcagccgtgtgccctggagtatctgcagccttgggcctctgggtgggcaggggagttgcttgtgctcaaagccccctcctgggaatcctgggactcccctcccccagaacctggagttgccccctctggagcagggcaggctggagaccagccctgtcagcttccccaccttggggttgtgtgtcctcagctggagtggggacactgtccagcctgccagtgtgagcgtctgagcctcaaaatagactccatttttccagagccgtggattcccctgggctgggaggccataaacgggcggcagcccagggtcttggtcaccaggtcaggcccagcagcttcctccagggccaccccctctgcccaccaggggagctggagtttggttccatctccagggtactgatgtggctcatgctctagggaaccaggaagctggacctgggtaggtgccggggagctgggatcacctttaggaagctcatccccgttttacagaaaggaaatcaaggctcagcagaagccgtgtgcccagccctgcaccagggagagcagggtcagttagctgaggggctgcaggccctctgctgcagtgagaggcagctggacatcagagatgctgacggccccaccagcccacgtggggaggggctctggccacagtgctcccggtgctggggctgaggcctccacgtctgagcctgagacgtggaggatcaaggccgctgagcgggcttgatcgcttcaagttgtgtgtgtgtctggctcgtctggccagctctctgctacctcgtagggttgcctggagcccactggctgcctgtggctggaccccagcctgtgggggacaccctggtaggcagagggaccatgcactttgttcacatctgaagggaggaggcaggtgtgccctgcgcctccccctccttctgtgctggagagggtggccctgcgtcccatgcctgcgctggcttctgtttcagaggctgaggggatctggcggtggagcgctaggatcagacgcccccgcgatgaccagctcccccgtctccagagtcgtgtacaacggcaagaggaccagcagcccccgctccccacccagcagcagcgagatcttcaccccagcccacgaggagaacgtccgcttcatttacgaagcctggcagggtgtggagcgagacctgcgaggccaggtgccgggtggcgagcggggcctggtggaggagtatgtggagaaggtccctaaccccagcctgaagaccttcaagcccatcgacctgagtgacctgaagcgccggagcacgcaggatgccaagaagtcctagagcgcccggtgcccctccccggcctccggaagatcagggtgcgaggtgtcggttccctcctgtcctgtggtcctgcccctgggatgggggtgccttgctccagcgggctgcagatcccagcactggcgtgactgacggctgaggcctgcctctccttcccaagcccccttccttcatccttgggggtctcaggctgcccccatcatgggggtctgggccctgcccaccctcctgccctcccccagccacctggctgcatttttgaagctgcctggcccccaggggccctgacctgacctctctcctctcccctcaccctcctgcccctggccactgcaggatcaggaggggagaagaaggagcctctgctgcctcccaggctgctgggactgggctggttttgtccttgaagtggtcaggatacaggacaagggcagccccaccccatccagcctgggctccccgcagacccttgctgctcccgtggcctggacacgctggggagcttctcacacctacccctaccgtccagcctggcctcttccctgaatcagcttcaagatggcaccagctctttgggcctaggatactgccgggccccccaagggggtccccagcaaccaggcctggcctcctggtgtctgcggtcacagtggcccctgggcaggggcacccaggctgaccctgaggtgctgctgctgggtctgtcttggctctggggtgtgctgggagggtcaccaggtcccttttccttcctgtgccctctgaaagctaagtgtctgtgtggctgtgg

SEQ ID NO: 132407 - DNA, 765 bp, Homo sapiens
  Payload ID: 5855
  Gene Symbol: FAM195B
  Gene Name: family with sequence similarity 195, member B
  ENST ID: ENST00000570507
  CDS Start-End: 41-319
gggatctggcggtggagcgctaggatcagacgcccccgcgatgaccagagtcgtgtacaacggcaagaggaccagcagcccccgctccccacccagcagcagcgagatcttcaccccagcccacgaggagaacgtccgcttcatttacgaagcctggcagggtgtggagcgagacctgcgaggccaggtgccgggtggcgagcggggcctggtggaggagtatgtggagaaggtccctaaccccagcctgaagaccttcaagcccatcgacctgagtgacctgaagcgccggagcacgcaggatgccaagaagtcctagagcgcccggtgcccctccccggcctccggaagatcagggtgcgaggtgtcggttccctcctgtcctgtggtcctgcccctgggatgggggtgccttgctccagcgggctgcagatcccagcactggcgtgactgacggctgaggcctgcctctccttcccaagcccccttccttcatccttgggggtctcaggctgcccccatcatgggggtctgggccctgcccaccctcctgccctcccccagccacctggctgcatttttgaagctgcctggcccccaggggccctgacctgacctctctcctctcccctcaccctcctgcccctggccactgcaggatcaggaggggagaagaaggagcctctgctgcctcccaggctgctgggactgggctggttttgtccttgaagtggtcaggatacaggacaagggcagccccacccc

SEQ ID NO: 132408 - DNA, 577 bp, Homo sapiens
  Payload ID: 5855
  Gene Symbol: FAM195B
  Gene Name: family with sequence similarity 195, member B
  ENST ID: ENST00000576431
  CDS Start-End: 54-407
gcgagaggctgaggggatctggcggtggagcgctaggatcagacgcccccgcgatgaccagctcccccgtctccagagtcgtgtacaacggcaagaggaccagcagcccccgctccccacccagcagcagcgagatcttcaccccagcccacgaggagaacgtccgcttcatttacgaagcctggcagggtgtggagcgagacctgcgaggccaggtgccgggtggcgagcggggcctggtggaggagtatgtggagaaggtccctaaccccagcctgaagagtgagtgggggctgacctgggggcagggctgggccggcaggccgggcctcatgggcaggaggggcctgtgcccaccacctaccgcgttgtcccctggcagccttcaagcccatcgacctgagtgacctgaagcgccggagcacgcaggatgccaagaagtcctagagcgcccggtgcccctccccggcctccggaagatcagggtgcgaggtgtcggttccctcctgtcctgtggtcctgcccctgggatgggggtgccttgctccagcgggctgcagatcccagcactggcgtg

SEQ ID NO: 132409 - DNA, 1123 bp, Homo sapiens
  Payload ID: 5855
  Gene Symbol: FAM195B
  Gene Name: family with sequence similarity 195, member B
  ENST ID: ENST00000573478
  CDS Start-End: 114-305
gcggtggcgtcacttccggcggggcctcccagctggaagaggcggtggcggcgggtcggggcgagaggctgaggggatctggcggtggagcgctaggatcagacgcccccgcgatgaccagctcccccgtctccagagtcgtgtacaacggcaagaggaccagcagcccccgctccccacccagcagcagcgagatcttcaccccagcccacgaggagaacgtccgcttcatttacgaagccttcaagcccatcgacctgagtgacctgaagcgccggagcacgcaggatgccaagaagtcctagagcgcccggtgcccctccccggcctccggaagatcagggtgcgaggtgtcggttccctcctgtcctgtggtcctgcccctgggatgggggtgccttgctccagcgggctgcagatcccagcactggcgtgactgacggctgaggcctgcctctccttcccaagcccccttccttcatccttgggggtctcaggctgcccccatcatgggggtctgggccctgcccaccctcctgccctcccccagccacctggctgcatttttgaagctgcctggcccccaggggccctgacctgacctctctcctctcccctcaccctcctgcccctggccactgcaggatcaggaggggagaagaaggagcctctgctgcctcccaggctgctgggactgggctggttttgtccttgaagtggtcaggatacaggacaagggcagccccaccccatccagcctgggctccccgcagacccttgctgctcccgtggcctggacacgctggggagcttctcacacctacccctaccgtccagcctggcctcttccctgaatcagcttcaagatggcaccagctctttgggcctaggatactgccgggccccccaagggggtccccagcaaccaggcctggcctcctggtgtctgcggtcacagtggcccctgggcaggggcacccaggctgaccctgaggtgctgctgctgggtctgtcttggctctggggtgtgctgggagggtcaccaggtcccttttccttcctgtgccctctgaaagctaagtgtctgtgtggctgtggagctcgagggtctgtgaataaaggc

SEQ ID NO: 132410 - DNA, 751 bp, Homo sapiens
  Payload ID: 5855
  Gene Symbol: FAM195B
  Gene Name: family with sequence similarity 195, member B
  ENST ID: ENST00000576679
  CDS Start-End: 64-300
gcaggtgggctggtctccaccggggcgggttgtgggctcccaccctgctgtgtgccctgtctcatgcgccaggctcccccagctcccccgtctccagagtcgtgtacaacggcaagaggaccagcagcccccgctccccacccagcagcagcgagatcttcaccccagcccacgaggagaacgtccgcttcatttacgaagcctggcagggtgtggagcgagacctgcgaggccaggtgccgggtggcgagcggggcctggtggaggagtatgtggagaaggtccctaaccccagcctgaagaccttcaagcccatcgacctgagtgacctgaagcgccggagcacgcaggatgccaagaagtcctagagcgcccggtgcccctccccggcctccggaagatcagggtgcgaggtgtcggttccctcctgtcctgtggtcctgcccctgggatgggggtgccttgctccagcgggctgcagatcccagcactggcgtgactgacggctgaggcctgcctctccttcccaagcccccttccttcatccttgggggtctcaggctgcccccatcatgggggtctgggccctgcccaccctcctgccctcccccagccacctggctgcatttttgaagctgcctggcccccaggggccctgacctgacctctctcctctcccctcaccctcctgcccctggccactgcaggatcaggaggggagaagaaggagcctctgctgcctcccaggctg

SEQ ID NO: 132411 - DNA, 618 bp, Homo sapiens
  Payload ID: 5855
  Gene Symbol: FAM195B
  Gene Name: family with sequence similarity 195, member B
  ENST ID: ENST00000575061
  CDS Start-End: 141-497
ggcggcgggtcggggcgagggtcttgctctgttgcctgggctggagtgcagtgccacgatcttggctccctgcagccttgacctcctgggctcaagcagtcctcccaccccagcctctgagtagctgggactacaagtgcatgctgccacaccagaggctgaggggatctggcggtggagcgctaggatcagacgcccccgcgatgaccagctcccccgtctccagagtcgtgtacaacggcaagaggaccagcagcccccgctccccacccagcagcagcgagatcttcaccccagcccacgaggagaacgtccgcttcatttacgaagcctggcagggtgtggagcgagacctgcgaggccaggtgccgggtggcgagcggggcctggtggaggagtatgtggagaaggtccctaaccccagcctgaagaccttcaagcccatcgacctgagtgacctgaagcgccggagcacgcaggatgccaagaagtcctagagcgcccggtgcccctccccggcctccggaagatcagggtgcgaggtgtcggttccctcctgtcctgtggtcctgcccctgggatgggggtgccttgctccagcgggctgcagatcccagc

SEQ ID NO: 132412 - DNA, 1038 bp, Homo sapiens
  Payload ID: 5855
  Gene Symbol: FAM195B
  Gene Name: family with sequence similarity 195, member B
  ENST ID: ENST00000572645
  CDS Start-End: 153-509
ggaagaggcggtggcggcgggtcggggcgagggtcttgctctgttgcctgggctggagtgcagtgccacgatcttggctccctgcagccttgacctcctgggctcaagcagtcctcccaccccagcctctgagtagctgggactacaagtgcatgctgccacaccagaggctgaggggatctggcggtggagcgctaggatcagacgcccccgcgatgaccagctcccccgtctccagagtcgtgtacaacggcaagaggaccagcagcccccgctccccacccagcagcagcgagatcttcaccccagcccacgaggagaacgtccgcttcatttacgaagcctggcagggtgtggagcgagacctgcgaggccaggtgccgggtggcgagcggggcctggtggaggagtatgtggagaaggtccctaaccccagcctgaagaccttcaagcccatcgacctgagtgacctgaagcgccggagcacgcaggatgccaagaagtcctagagcgcccggtgcccctccccggcctccggaagatcagggatcaggaggggagaagaaggagcctctgctgcctcccaggctgctgggactgggctggttttgtccttgaagtggtcaggatacaggacaagggcagccccaccccatccagcctgggctccccgcagacccttgctgctcccgtggcctggacacgctggggagcttctcacacctacccctaccgtccagcctggcctcttccctgaatcagcttcaagatggcaccagctctttgggcctaggatactgccgggccccccaagggggtccccagcaaccaggcctggcctcctggtgtctgcggtcacagtggcccctgggcaggggcacccaggctgaccctgaggtgctgctgctgggtctgtcttggctctggggtgtgctgggagggtcaccaggtcccttttccttcctgtgccctctgaaagctaagtgtctgtgtggctgtggagctcgagggtctgtgaataaaggcggcggcactggg

SEQ ID NO: 132413 - DNA, 3149 bp, Homo sapiens
  Payload ID: 5856
  Gene Symbol: FAM196A
  Gene Name: family with sequence similarity 196, member A
  Uniprot ID: Q6ZSG2
  ENST ID: ENST00000424811
  CDS Start-End: 139-1506
ctccttcacggttcccacccaggagcacggccaactctcccccggaatccataacggctcacgcaaatagatttctttccgttcctcctcggagggctctccacatttatctgctcgagacgtggcagctccagaaccatggtcagtaaggacaccggcaaatgcatactcacaacgtcggagagtgaagtggaacccgccgcctgcctggccctggagatgaaatacgccctggaccccaaccggcagattaaaaaacggaacaaagccctgcaggtgcggtttaaggatatctgcgaggcacagaatgagcagagggacacacagctgtcctcgggccagctgggggagaagcgggaggccaagcccgtgtcctgcagagcagcctaccgcaaatacatgacagtgcccgcacgcaggtccatccccaacgtcaccaagagcacaggcgtgcagacctcgcccgaccttaagaagtgttaccagacgttccctctggaccgcaaaaaggggaacctcaaaagcctcccagctgcagatccctttaaaagccaaaacaatgggtttctaacagatgcgaaagagaagaacgaggctggacccatggaggaggcccggccatgtggcgcggggcgggtgcacaagaccacagccttggttttccattccaaccaacacatgaacacagtggaccagcctttgggggtcaactgcacagagccctgtaaaagcccggagccgctcagctatggagaagctgcgctccaaaactccactcggcctccatccgaagagcccgattaccagctgctcgggagggccaagcaggaccgggggaggccaaactccgaggagcccgctccacctgccctcaggagggtgtttaaaacggaggttgccaccgtttacgcacctgccctcagtgccagggcccccgagcctggtttgtcagactctgcagccgccagccagtggtcactctgcccggcagatgacgagcggaggagagccacacatctcaacgggctccaggcgccctcggaaactgccctggcctgctcacccccgatgcagtgcctgtcccccgaatgtagtgagcagccgtcgcagactcacaccccgccggggctggggaaccagcctagtcccacagcggttgctgcaggtgaagaatgccaacgaatcgtgcctcatacggaagtggtcgacctcaaagcacaacttcagatgatggagaacttgatcagttcaagccaagaaaccatcaaagtgctcttgggggtcattcaggagttggaaaaaggagaggcccatcgggaaggtgtggagctggattttaagcagcaagaagacaaactccagccggttctaagaaaactccaccctattgaggaaactcaggtcataccttcgccttactctcaggagacttactcctcaactcccaagcaaaaatccaaaactgaatctaaaaagcacggaagatggaaactctggttcctttaacactcacggtgtctggagtctcgaggccgtctttagaacccactggagtttaagtcaatacttttccaaaatgaataggatcgagggaactgtggtgcccattcaggcacctcccacttctcgccctgcgtaccaaaaaggcctttgtaccaatagataattaacagaagcaaggtattctgtgtcactccttgccagctgttctttgcagttcactgatgtgggatgtaaaatctgaaatgaaacttacgtagtcaaagatgataagtaaaaattttcccccacccccgatctgcaagtaatacattatcaacctgcgagatggcaggctgtcaccctgtacacagctataactcataattattttcaagccttgattttttttttaaataatgagaagaaaaagcaagccttatgtttgcgaaggacttcatttttatgtttcattttgcaaataagcagggggcgagtgcaattttcagcacatcaaattccggagaaagcacaattttttcaagtggtcggagaccatgaataatctctaaaatgtgactatatgtatatttgccttcatgtgctatagcgctaagccaagtgaccacatctcagtgtcacaacgacacctcaaatttagcatcctcttcatctccagacttacgacatgtttactgctcattttccaaatggccagcagccaggagtcccccaaagtcaggatatgcctttaatcactgcaagtagacagggtcagagctattggacactaagttttcttagatctcatttttaatcttttggtacccaaaggccaaataatacattctggcaagaatctgagaacatacatagagatacacgatggataatccacccaccaataaatcacaggcattctgtgccatggcagacagtgtttttgtggatcgatcctccgagacactgttagccatggtaagtgcagccagacgttatgtacaattcgttatgctttgtattaatggtggaagccctgaccatctcaaagagaaacagtgcgtttagtttagctgctaccaagggacaatgtcgcctacatttaacctattagtaagttgtactaaacaacatacttaggggaaagctgtgaatcaaatgtttttaggtattttttaaatcaacagtaacacttagagttctctcttgattacacattgcaatgtaaatcttagttcctttattttttcactcatttctttgcacctttgcaagtatctttttatagaaatcaaatcccctagtctattaatgactttgtctatcaattttttgattttcacaataggaagtagggatcttactttgcctttttttttttttttgtacaacttaaattttgaatagtttgtgagcatacaggaaaacctagtcttgaagtttctgtccagcagtttcacatctagtggagtgctgacatgcacacctcattgactagatgccaaacacacagtggctaaccttggtaaaaggatctcacctgcttttgtcagattggagctgcttcttgccatgtattttcctcctgactcaacagcaaatctgttttagttctaagtgttttgattctacaaggacctagtgatcagtaaccagatcgggccttgaaa

SEQ ID NO: 132414 - DNA, 4403 bp, Homo sapiens
  Payload ID: 5856
  Gene Symbol: FAM196A
  Gene Name: family with sequence similarity 196, member A
  Uniprot ID: Q6ZSG2
  ENST ID: ENST00000522781
  CDS Start-End: 557-1996
aagtccccggagccgaggcttcctccgcgtgagcgcggcgagtctggccgcggatgccctgtccggagtgctccgtgccgccccaggcttgccagggtccgcagcgagacatgcccgagccaggcgctgcatcgacctcgacttatctgtaagcagcggaagatcctgaaggcactaactaaggtatctccaggcaaccaaggatcttacctctcacattgagaaaaaccataacttcagagacatttcctggctccaaattcaagtcctttcagagacccctctactaattattttccagtaccactctccatggaataaaaggagttgcaaacatggcctttgtagatgcagggaaacccacgttccttttagagctgatgttaacccatgagaagcgaccacccctcgacgacttctccttcacggttcccacccaggagcacggccaactctcccccggaatccataacggctcacgcaaatagatttctttccgttcctcctcggagggctctccacatttatctgctcgagacgtggcagctccagaaccatggtcagtaaggacaccggcaaatgcatactcacaacgtcggagagtgaagtggaacccgccgcctgcctggccctggagatgaaatacgccctggaccccaaccggcagattaaaaaacggaacaaagccctgcaggtgcggtttaaggatatctgcgaggcacagaatgagcagagggacacacagctgtcctcgggccagctgggggagaagcgggaggccaagcccgtgtcctgcagagcagcctaccgcaaatacatgacagtgcccgcacgcaggtccatccccaacgtcaccaagagcacaggcgtgcagacctcgcccgaccttaagaagtgttaccagacgttccctctggaccgcaaaaaggggaacctcaaaagcctcccagctgcagatccctttaaaagccaaaacaatgggtttctaacagatgcgaaagagaagaacgaggctggacccatggaggaggcccggccatgtggcgcggggcgggtgcacaagaccacagccttggttttccattccaaccaacacatgaacacagtggaccagcctttgggggtcaactgcacagagccctgtaaaagcccggagccgctcagctatggagaagctgcgctccaaaactccactcggcctccatccgaagagcccgattaccagctgctcgggagggccaagcaggaccgggggaggccaaactccgaggagcccgctccacctgccctcaggagggtgtttaaaacggaggttgccaccgtttacgcacctgccctcagtgccagggcccccgagcctggtttgtcagactctgcagccgccagccagtggtcactctgcccggcagatgacgagcggaggagagccacacatctcaacgggctccaggcgccctcggaaactgccctggcctgctcacccccgatgcagtgcctgtcccccgaatgtagtgagcagccgtcgcagactcacaccccgccggggctggggaaccagcctagtcccacagcggttgctgcaggtgaagaatgccaacgaatcgtgcctcatacggaagtggtcgacctcaaagcacaacttcagatgatggagaacttgatcagttcaagccaagaaaccatcaaagtgctcttgggggtcattcaggagttggaaaaaggagaggcccatcgggaagggctttcatatcggacggggcaagacacagctaattgtgacacatgcaggaacagtgcatgtattatctatagtgtggagctggattttaagcagcaagaagacaaactccagccggttctaagaaaactccaccctattgaggaaactcaggtcataccttcgccttactctcaggagacttactcctcaactcccaagcaaaaatccaaaactgaatctaaaaagcacggaagatggaaactctggttcctttaacactcacggtgtctggagtctcgaggccgtctttagaacccactggagtttaagtcaatacttttccaaaatgaataggatcgagggaactgtggtgcccattcaggcacctcccacttctcgccctgcgtaccaaaaaggcctttgtaccaatagataattaacagaagcaaggtattctgtgtcactccttgccagctgttctttgcagttcactgatgtgggatgtaaaatctgaaatgaaacttacgtagtcaaagatgataagtaaaaattttcccccacccccgatctgcaagtaatacattatcaacctgcgagatggcaggctgtcaccctgtacacagctataactcataattattttcaagccttgattttttttttaaataatgagaagaaaaagcaagccttatgtttgcgaaggacttcatttttatgtttcattttgcaaataagcagggggcgagtgcaattttcagcacatcaaattccggagaaagcacaattttttcaagtggtcggagaccatgaataatctctaaaatgtgactatatgtatatttgccttcatgtgctatagcgctaagccaagtgaccacatctcagtgtcacaacgacacctcaaatttagcatcctcttcatctccagacttacgacatgtttactgctcattttccaaatggccagcagccaggagtcccccaaagtcaggatatgcctttaatcactgcaagtagacagggtcagagctattggacactaagttttcttagatctcatttttaatcttttggtacccaaaggccaaataatacattctggcaagaatctgagaacatacatagagatacacgatggataatccacccaccaataaatcacaggcattctgtgccatggcagacagtgtttttgtggatcgatcctccgagacactgttagccatggtaagtgcagccagacgttatgtacaattcgttatgctttgtattaatggtggaagccctgaccatctcaaagagaaacagtgcgtttagtttagctgctaccaagggacaatgtcgcctacatttaacctattagtaagttgtactaaacaacatacttaggggaaagctgtgaatcaaatgtttttaggtattttttaaatcaacagtaacacttagagttctctcttgattacacattgcaatgtaaatcttagttcctttattttttcactcatttctttgcacctttgcaagtatctttttatagaaatcaaatcccctagtctattaatgactttgtctatcaattttttgattttcacaataggaagtagggatcttactttgcctttttttttttttttgtacaacttaaattttgaatagtttgtgagcatacaggaaaacctagtcttgaagtttctgtccagcagtttcacatctagtggagtgctgacatgcacacctcattgactagatgccaaacacacagtggctaaccttggtaaaaggatctcacctgcttttgtcagattggagctgcttcttgccatgtattttcctcctgactcaacagcaaatctgttttagttctaagtgttttgattctacaaggacctagtgatcagtaaccagatcgggccttgaaaaaaaaatgaagagtatgtcgtgtaaacattcttcgggggccaaacaacactgcagttgtatgctttaatttaaaacacacatgtgcacacacacatcctctgcggaaacactatatgaagttcgaatccctgaatatcaataaaaggaactgagaaatattttggtgcaagaacaatgaggaagttgatcctgtaacatgaaggaagtgtaactgtttcacgtagactaaatatttaaaaatgggtttcatgttttttatactgtttttaactaaagttataaaaatgtttccaacaagttctctctccttatgttttaagaatcccaactatctcagtaaattgaaataagggtattagcagttttctaattagtaacacaaatctgtctaaacaagaggacatcctagtacacaaaataatgtcactgtttcacaccagtctagaccaaaaaaaaataaaattaaaatgttcagagtcaaaaaggaacttctgaagataaattaattcatccctaaaaattaaagtgtgttcaaaatagaaaaactattgtcaaaatcatttcatagtttaattgcaacacgtcactaacagatggtgattcttctcttggaaagattcaagtaaaaacgctgatacaaaagcaaggtaaaacgcacagggttcccttatgtagatgtacacatggcattgcatatagagattaaattattatacttgtcgttaagttctttattaatttttaaataaaaaaatcaaagatg

SEQ ID NO: 132415 - DNA, 4335 bp, Homo sapiens
  Payload ID: 5856
  Gene Symbol: FAM196A
  Gene Name: family with sequence similarity 196, member A
  Uniprot ID: Q6ZSG2
  ENST ID: ENST00000614311
  CDS Start-End: 557-1924
aagtccccggagccgaggcttcctccgcgtgagcgcggcgagtctggccgcggatgccctgtccggagtgctccgtgccgccccaggcttgccagggtccgcagcgagacatgcccgagccaggcgctgcatcgacctcgacttatctgtaagcagcggaagatcctgaaggcactaactaaggtatctccaggcaaccaaggatcttacctctcacattgagaaaaaccataacttcagagacatttcctggctccaaattcaagtcctttcagagacccctctactaattattttccagtaccactctccatggaataaaaggagttgcaaacatggcctttgtagatgcagggaaacccacgttccttttagagctgatgttaacccatgagaagcgaccacccctcgacgacttctccttcacggttcccacccaggagcacggccaactctcccccggaatccataacggctcacgcaaatagatttctttccgttcctcctcggagggctctccacatttatctgctcgagacgtggcagctccagaaccatggtcagtaaggacaccggcaaatgcatactcacaacgtcggagagtgaagtggaacccgccgcctgcctggccctggagatgaaatacgccctggaccccaaccggcagattaaaaaacggaacaaagccctgcaggtgcggtttaaggatatctgcgaggcacagaatgagcagagggacacacagctgtcctcgggccagctgggggagaagcgggaggccaagcccgtgtcctgcagagcagcctaccgcaaatacatgacagtgcccgcacgcaggtccatccccaacgtcaccaagagcacaggcgtgcagacctcgcccgaccttaagaagtgttaccagacgttccctctggaccgcaaaaaggggaacctcaaaagcctcccagctgcagatccctttaaaagccaaaacaatgggtttctaacagatgcgaaagagaagaacgaggctggacccatggaggaggcccggccatgtggcgcggggcgggtgcacaagaccacagccttggttttccattccaaccaacacatgaacacagtggaccagcctttgggggtcaactgcacagagccctgtaaaagcccggagccgctcagctatggagaagctgcgctccaaaactccactcggcctccatccgaagagcccgattaccagctgctcgggagggccaagcaggaccgggggaggccaaactccgaggagcccgctccacctgccctcaggagggtgtttaaaacggaggttgccaccgtttacgcacctgccctcagtgccagggcccccgagcctggtttgtcagactctgcagccgccagccagtggtcactctgcccggcagatgacgagcggaggagagccacacatctcaacgggctccaggcgccctcggaaactgccctggcctgctcacccccgatgcagtgcctgtcccccgaatgtagtgagcagccgtcgcagactcacaccccgccggggctggggaaccagcctagtcccacagcggttgctgcaggtgaagaatgccaacgaatcgtgcctcatacggaagtggtcgacctcaaagcacaacttcagatgatggagaacttgatcagttcaagccaagaaaccatcaaagtgctcttgggggtcattcaggagttggaaaaaggagaggcccatcgggaaggtgtggagctggattttaagcagcaagaagacaaactccagccggttctaagaaaactccaccctattgaggaaactcaggtcataccttcgccttactctcaggagacttactcctcaactcccaagcaaaaatccaaaactgaatctaaaaagcacggaagatggaaactctggttcctttaacactcacggtgtctggagtctcgaggccgtctttagaacccactggagtttaagtcaatacttttccaaaatgaataggatcgagggaactgtggtgcccattcaggcacctcccacttctcgccctgcgtaccaaaaaggcctttgtaccaatagataattaacagaagcaaggtattctgtgtcactccttgccagctgttctttgcagttcactgatgtgggatgtaaaatctgaaatgaaacttacgtagtcaaagatgataagtaaaaattttcccccacccccgatctgcaagtaatacattatcaacctgcgagatggcaggctgtcaccctgtacacagctataactcataattattttcaagccttgattttttttttaaataatgagaagaaaaagcaagccttatgtttgcgaaggacttcatttttatgtttcattttgcaaataagcagggggcgagtgcaattttcagcacatcaaattccggagaaagcacaattttttcaagtggtcggagaccatgaataatctctaaaatgtgactatatgtatatttgccttcatgtgctatagcgctaagccaagtgaccacatctcagtgtcacaacgacacctcaaatttagcatcctcttcatctccagacttacgacatgtttactgctcattttccaaatggccagcagccaggagtcccccaaagtcaggatatgcctttaatcactgcaagtagacagggtcagagctattggacactaagttttcttagatctcatttttaatcttttggtacccaaaggccaaataatacattctggcaagaatctgagaacatacatagagatacacgatggataatccacccaccaataaatcacaggcattctgtgccatggcagacagtgtttttgtggatcgatcctccgagacactgttagccatggtaagtgcagccagacgttatgtacaattcgttatgctttgtattaatggtggaagccctgaccatctcaaagagaaacagtgcgtttagtttagctgctaccaagggacaatgtcgcctacatttaacctattagtaagttgtactaaacaacatacttaggggaaagctgtgaatcaaatgtttttaggtattttttaaatcaacagtaacacttagagttctctcttgattacacattgcaatgtaaatcttagttcctttattttttcactcatttctttgcacctttgcaagtatctttttatagaaatcaaatcccctagtctattaatgactttgtctatcaattttttgattttcacaataggaagtagggatcttactttgcctttttttttttttttgtacaacttaaattttgaatagtttgtgagcatacaggaaaacctagtcttgaagtttctgtccagcagtttcacatctagtggagtgctgacatgcacacctcattgactagatgccaaacacacagtggctaaccttggtaaaaggatctcacctgcttttgtcagattggagctgcttcttgccatgtattttcctcctgactcaacagcaaatctgttttagttctaagtgttttgattctacaaggacctagtgatcagtaaccagatcgggccttgaaaaaaaaatgaagagtatgtcgtgtaaacattcttcgggggccaaacaacactgcagttgtatgctttaatttaaaacacacatgtgcacacacacatcctctgcggaaacactatatgaagttcgaatccctgaatatcaataaaaggaactgagaaatattttggtgcaagaacaatgaggaagttgatcctgtaacatgaaggaagtgtaactgtttcacgtagactaaatatttaaaaatgggtttcatgttttttatactgtttttaactaaagttataaaaatgtttccaacaagttctctctccttatgttttaagaatcccaactatctcagtaaattgaaataagggtattagcagttttctaattagtaacacaaatctgtctaaacaagaggacatcctagtacacaaaataatgtcactgtttcacaccagtctagaccaaaaaaaaataaaattaaaatgttcagagtcaaaaaggaacttctgaagataaattaattcatccctaaaaattaaagtgtgttcaaaatagaaaaactattgtcaaaatcatttcatagtttaattgcaacacgtcactaacagatggtgattcttctcttggaaagattcaagtaaaaacgctgatacaaaagcaaggtaaaacgcacagggttcccttatgtagatgtacacatggcattgcatatagagattaaattattatacttgtcgttaagttctttattaatttttaaataaaaaaatcaaagatgtttt

SEQ ID NO: 132416 - DNA, 2999 bp, Homo sapiens
  Payload ID: 5857
  Gene Symbol: FAM196B
  Gene Name: family with sequence similarity 196, member B
  Uniprot ID: A6NMK8
  ENST ID: ENST00000377365
  CDS Start-End: 1383-2990
gctaatttaaccagctcccacttaaatcaagaaataaccattattctcgtttctacctccagccaggccaaatgcaagaaaggagaaaccttagcatttgtggggtgtaggagtgtgtgtatatgcatgtgtgtgtgcctgcatatgtgtgtgtgtgtgtgtctatacacacacaggagcgtgtgtttcctctgctccatctctcctctcccttccttaaagaattcagcctgtggccactagaggtcttttcttttcacatggtagctgccgagcagtttgttcggctttttatttattcctacgtgagcagacccactacacttcttgcatataaacagtgaaaattacaatatgaaggacttattattccttcttttggagtaattttgctgctggtcaaagcctggctcattgtgcaaggaagggggaccatcctctgcaggtaattccactgcttcaaggtgctcctcgcctgcttgcagatatcagaccccagctcatctcagacctcagcccctgaggccaagcaaacatacatcatcatggaggctgcagacgtagctcaccgtgcccacatgtgaacttcggccaacacaccacaacagggactctgcccactgaatcccctgtgattcctcaatcctgtcctggtcataccccactgggttttgtgaggctatttaggaagataagtttccctcactgaagaaaagagagacagcatgaaagaaaacaatggccccaaaggaggaatttgtgattgacataaatgggaatgttcccttgggagcatcatgtatcatcaaacaagcaaacctccaggtcatttatttctccacctgtttacctgctatggaaagaagatgcatttaagtttcctgcagtttcaccctggaaattaatgctctgggaaacaaaaagctgtatgttctagacgtagcaggtttcttttggaattcactcattgggagtctggcactaccccctaaatggtacttttgttgtctttttgttcaagacagccagcttcttccaagatcagaaccgcgtgccagcctcccttgataaaccgcctaccagctctcttggtagatcagatgtttaatagttagcctaactcatttgtttttccaaggagcaattatgactacaatgaattaatattttaactgcagggaaagcattacagatagttcctacgtagactctagaggctgggaatggccaacaggatttcccatactaagaggagaggaccactccatcctggccagcagttctctatgattgaaatactatcattagatactgctccaaagacctaaggggagatgtgcctaggagaagtgtatggtcctgatccttcccactgaggctcaatggcccagcaaaatatgaaagtgagacctgtgcttctaaagcgtaacagtctagaatcagtggagtttgtgaaacaacctcaccaccgcaggagcaaatcccagcaggtgagattcaaggaagatgggaccactaagaatccaactggcctagctgaggttgacgtccaaactccagaagacccggctgtgatggggaagactcaagcaaccaggcaccatcttccccccacctactcgctctccttccccaggtcccagaaggcagggggctttcgcaacattgcaatccaaacttcccccagtctcaggaagcatttcccagttttcaaaaggaagagactcacagccagtaagtccctggtggaaatgccaacagcctcccaaagtgccatccaggtcaacggtaacctctctgaacaggacattgtgtcttctgaccttgcctacttaaggttggctcagcatcttgaggatgggcctcgaagggtcaaggtgtcccatgcattcctcccaagggtccccaaggtgcaaagcaatggtcctgttagcatatgcttggaagcaggaacttggaggtccttagagaaagccacagctgccattcaggttccagatgatatttatcacagtccttcctgggaagctagagagtctgctctcagcccagacaggtcagctgaagtaagtaactccatacaccctttggatgacacacgtccaggtgatgggagaagggtgactccactagattcagaaaaatccacctcctgcttaaatgccaccagcgttgccagccacacaccaggcacagaggaacttaaacctgaattgcttttgcccaaagacaactcagatgacaaagaccttggctcactgtcatctcagtcaaaggaaacgtgtgttccttcatctccacggactcacagttccccctcacaaggctcccacagccagccagcccacccaggaagagcctcagactgtccttcatcaagtaacaatcaccagaatctggtgtcactcaaaactaacagtgcatcgaaatctgcccctgggtgtcaggagcagacggcaaacaaccccaccgagtcagacacactggagtttccaaattgtccaggaagtaatcatctcccatcctctctttcaaggagtgagaccaaacttcagagcaacagggagattagtgacattaatcaaattcacctggcacggggtgaactctgcgacctccaaggccgactgcaatctgtggaggaatctctgcactcgaaccaagagaaaattaaagtccttttgaatgtaattcaagacttggagaaagctcgagctctcactgaagggcgcaacttttatcgaactggccaagatctcaacaattgcagtacctgccagaacacggcgtgcatcatatacagtgtagagtatgattttcggcagcaggaaggcaggttccatgaagttttgcagagtctggaggaagcagagccagttgaggaggcatcgcccccaccaaagtccccagcagaacccccagccccggaaaagcaggacttaaggcggaaaaccaagaaggtgaaaaagaaatgcttctggtggatctgagctggttgg

SEQ ID NO: 132417 - DNA, 2628 bp, Homo sapiens
  Payload ID: 5858
  Gene Symbol: FAM198A
  Gene Name: family with sequence similarity 198, member A
  Uniprot ID: Q9UFP1
  ENST ID: ENST00000273146
  CDS Start-End: 377-2104
gctttcaggggaatggggaagctgggccgggacgcgcggcagggactttgcaaactctgcaaaagtcccgagtagaccgcagaggctcgcggccgcgggtaggctccctcagatccccgtagatctcagtagatccggcgtgtattccccacccgcggagtatcccggtgtgcagcgatctcccgagagttggcgcagggccacttggctgcagagaacgtgtgcaccttcagtccgggaaacccgccccagccgagtagccgcgcatcctgggaagcctggcgagccacggcgccgggggcggccaaggggaggcgggatgagtctgcgagccggctgagcgcgccgaggagccggccggggcaccgccggggacatggcgtcttggctccggagaaagctgcgtggcaagaggcggccagtgatagcgttctgcctcttgatgatcctatctgcgatggctgtcacccgctttcccccacagcgtccatccgccggcccagaccctggtcccatggagcctcagggggtaactggcgcccctgcaacccatatccggcaggctttgagctccagccggaggcagcgggcaagaaacatgggcttctggagaagccgtgctttgcccaggaactccatcttggtctgtgctgaggagcaaggccatagagcaagagtggacagaagcagggagtccccaggaggggacctcaggcatccagggagggtgaggagggacattactttgtcaggacatccaagactcagtactcagcatgttgtgctcctgagggaggatgaggttggagatccaggaaccaaagacctgggccacccccagcatggcagtcccatccaggagacacagagtgaggtggtcaccctggtcagtccactcccagggagtgacatggcagctttaccggcttggagagctacttctgggctgacactctggccccatacagcagaaggcagggatctgctgggagctgagaacagagccttgactggtgggcaacaagcagaggatcccaccttggcctcaggagctcatcagtggcctggctctgttgagaagctgcaagggtcagtatggtgtgatgctgagacgctgttgagcagctcgaggactggtgggcaggctcccccatggctgacagaccacgatgtgcagatgctccgtctgttggcacagggggaggtggtggacaaagccagggtccccgcccatgggcaggtgctacaggttggcttctccactgaggctgcccttcaggacctgtcctctcccaggctcagccaactctgttcccaagggctctgtggcctgatcaagaggcctggggacctgcctgaggtcctgtccttccacgtagatcgtgtgctggggctgcgccggagcctacctgctgtggcccgccgcttccatagccccctcctgccctaccgatacacagacggtggagcaaggcctgtcatctggtgggcacccgatgtgcagcacctgagcgacccagatgaggatcagaactctctggccttgggctggctgcagtatcaggccctgctggcacacagctgcaactggccaggccaggccccgtgcccgggcatccaccataccgagtgggcacgcctggcgctcttcgacttcctgttgcaggtccacgaccgcttggatcgctactgctgtggcttcgagcctgagccctcagacccctgtgtggaagagaggctccgagagaaatgccagaacccagccgagctgcggctggtccacatcctggtccggagcagcgatccatctcacctggtctacatcgataacgctggcaaccttcagcaccctgaggacaagctgaactttcggctgctggagggcatagatgggtttcctgagtctgccgtgaaggttctcgcatcagggtgtctacagaacatgctgctgaagtcgctgcagatggacccagtgttctgggaaagccaaggcggagcccaggggctgaagcaggtcctccagaccctggagcagcgaggacaggtgctgctgggacacatccaaaagcacaacctcacactcttcagggacgaggacccataagccgcacacagccctgagtcaatgagcatccatcctgatggccacattttcttgggctcactcatcttgaggacaaatgggaaaagccagaagccagaggggcacaaggatgtcacgggatatttcacctgcctgggatggtggagttctttccaaggatacccttatcaagtgatgctgttcctctaggcctcagccagtttctgtttaacagtctctgctttgccttctgcctggtagacctacactcagccagaggtgggagtgagacacttgtcatcctagaaaatggcaagaagaaaggaatacaaagaaacatttcattgcaaaacataatgtggagctctcacattaggatgaggctcattctactttgtgacttaaccagccgctttgaaataaaacagatctaatcctgtctcaccaccgagagactgacatgcaagtggacaatgcccaaactacatataataataaaactctatccaccacctctgtagcaaccagctcagagaaccaaccac

SEQ ID NO: 132418 - DNA, 3121 bp, Homo sapiens
  Payload ID: 5858
  Gene Symbol: FAM198A
  Gene Name: family with sequence similarity 198, member A
  Uniprot ID: Q9UFP1
  ENST ID: ENST00000430121
  CDS Start-End: 96-1823
gcgagccacggcgccgggggcggccaaggggaggcgggatgagtctgcgagccggctgagcgcgccgaggagccggccggggcaccgccggggacatggcgtcttggctccggagaaagctgcgtggcaagaggcggccagtgatagcgttctgcctcttgatgatcctatctgcgatggctgtcacccgctttcccccacagcgtccatccgccggcccagaccctggtcccatggagcctcagggggtaactggcgcccctgcaacccatatccggcaggctttgagctccagccggaggcagcgggcaagaaacatgggcttctggagaagccgtgctttgcccaggaactccatcttggtctgtgctgaggagcaaggccatagagcaagagtggacagaagcagggagtccccaggaggggacctcaggcatccagggagggtgaggagggacattactttgtcaggacatccaagactcagtactcagcatgttgtgctcctgagggaggatgaggttggagatccaggaaccaaagacctgggccacccccagcatggcagtcccatccaggagacacagagtgaggtggtcaccctggtcagtccactcccagggagtgacatggcagctttaccggcttggagagctacttctgggctgacactctggccccatacagcagaaggcagggatctgctgggagctgagaacagagccttgactggtgggcaacaagcagaggatcccaccttggcctcaggagctcatcagtggcctggctctgttgagaagctgcaagggtcagtatggtgtgatgctgagacgctgttgagcagctcgaggactggtgggcaggctcccccatggctgacagaccacgatgtgcagatgctccgtctgttggcacagggggaggtggtggacaaagccagggtccccgcccatgggcaggtgctacaggttggcttctccactgaggctgcccttcaggacctgtcctctcccaggctcagccaactctgttcccaagggctctgtggcctgatcaagaggcctggggacctgcctgaggtcctgtccttccacgtagatcgtgtgctggggctgcgccggagcctacctgctgtggcccgccgcttccatagccccctcctgccctaccgatacacagacggtggagcaaggcctgtcatctggtgggcacccgatgtgcagcacctgagcgacccagatgaggatcagaactctctggccttgggctggctgcagtatcaggccctgctggcacacagctgcaactggccaggccaggccccgtgcccgggcatccaccataccgagtgggcacgcctggcgctcttcgacttcctgttgcaggtccacgaccgcttggatcgctactgctgtggcttcgagcctgagccctcagacccctgtgtggaagagaggctccgagagaaatgccagaacccagccgagctgcggctggtccacatcctggtccggagcagcgatccatctcacctggtctacatcgataacgctggcaaccttcagcaccctgaggacaagctgaactttcggctgctggagggcatagatgggtttcctgagtctgccgtgaaggttctcgcatcagggtgtctacagaacatgctgctgaagtcgctgcagatggacccagtgttctgggaaagccaaggcggagcccaggggctgaagcaggtcctccagaccctggagcagcgaggacaggtgctgctgggacacatccaaaagcacaacctcacactcttcagggacgaggacccataagccgcacacagccctgagtcaatgagcatccatcctgatggccacattttcttgggctcactcatcttgaggacaaatgggaaaagccagaagccagaggggcacaaggatgtcacgggatatttcacctgcctgggatggtggaggtagtatggggttttcaatctcaaagcgtccctttctgccttctcggctctggctatttattcccttgcaccaacaaatacattcgaaaatgttctgtgagctgctcaagaaactgtaaaaatgtgtgatgcacgtgcatatgcagagtgggagaactttgtgtgtgtgtagaggtgtgtaggtgtgggtggcatgtgtgcccgcctgcatgcaatacctgagaccaacctaataaaggtacaatcttcatagaactgcacttgcagcctggagttgctctggctgaaagtagactcaggcttaagaaatgaaacataatgcgtttgtctttatagactttaaattttcaattattactcagttatgtttttggtttaaaaaattataaaagtctaaaagtaatacatgctcagtaaaaacaagtccataaaaaatagaagcatatgacaaaaagcataagtcccacaaactccctagcggtgtgtatgtgtgtgtgtgttattcatggtcacactacatgcaaattaaaaaatgaaagtgtggtcatgctttgtcaactcactatatttttactttattaactatattctgtatcagccatctgaattgacccaatctttattggtgactgcatgaaattccaaggcagggatgtgtcatattttctttagctggtcccataatcatgaacatttaagtagctccaatttttcatcaattacagacattgccgccatgaacatgattgcatggcgtgcaagtatttctgcgaggtagatttccgtacgggatttctggggcaaagggtatgggcattcagtattctgagagaaactgccaaattgctctctgaaatggtggtgtcaatttacatttctcccaagagggtaggagactgattatttttctacaccttcaccaacacttggcattctcagacttttgggttttttttggcctatttaggaggaaaaccgattttaaaagctgcatttccttaatcatgaatgaagtcatctttccacttatttgccagacatttgtattttcttttctgcattgtctttttgttttaagatgtttgccctttgcttgttaatttgttggaaatctttgactctaataagtgtgatcaatcttttctctgctga

SEQ ID NO: 132419 - DNA, 783 bp, Homo sapiens
  Payload ID: 5858
  Gene Symbol: FAM198A
  Gene Name: family with sequence similarity 198, member A
  ENST ID: ENST00000488863
  CDS Start-End: 363-783
ggggaagctgggccgggacgcgcggcagggactttgcaaactctgcaaaagtcccgagtagaccgcagaggctcgcggccgcgggtaggctccctcagatccccgtagatctcagtagatccggcgtgtattccccacccgcggagtatcccggtgtgcagcgatctcccgagagttggcgcagggccacttggctgcagagaacgtgtgcaccttcagtccgggaaacccgccccagccgagtagccgcgcatcctgggaagcctggcgagccacggcgccgggggcggccaaggggaggcgggatgagtctgcgagccggctgagcgcgccgaggagccggccggggcaccgccggggacatggtccacgaccgcttggatcgctactgctgtggcttcgagcctgagccctcagacccctgtgtggaagagaggctccgagagaaatgccagaacccagccgagctgcggctggtccacatcctggtccggagcagcgatccatctcacctggtctacatcgataacgctggcaaccttcagcaccctgaggacaagctgaactttcggctgctggagggcatagatgggtttcctgagtctgccgtgaaggttctcgcatcagggtgtctacagaacatgctgctgaagtcgctgcagatggacccagtgttctgggaaagccaaggcggagcccaggggctgaagcaggtcctccagaccctggagcagcgaggacaggtgctgctgggacacatccaaaagcacaacctcacactct

SEQ ID NO: 132420 - DNA, 4985 bp, Homo sapiens
  Payload ID: 5859
  Gene Symbol: FAM198B
  Gene Name: family with sequence similarity 198, member B
  Uniprot ID: Q6UWH4
  ENST ID: ENST00000296530
  CDS Start-End: 623-2182
ctcgatcttttgaacttcatgagactgacatttctgagtctgtttgcgaacaggacactagagggctcccaggggttaaaaataagtggaaatttatttgaatgaaaactgattctctacggcatttcttttttccgaatttaaaattaaagtttattttgttaactattgtttttaaaagctttgtatctcttaaaaccatgcagcagtcagtttccaagttttgctttgcaatcagtagttttcaagggagcttttaaagctgaactgaaatgtttgaaatgtggaacactcttgaccatgaaatatgttctacttacatgcctcagcctttaaaagttctttgcattagagtcaaggattacattcttcctggagccaagcatggggccagctgtaaacaagccgcatttctccttggggagactgataatttaaaaggtttgttgtgtcagaaacattcccagcttcatcaccaaccctttccttccacctctgcccactggagaccacttatatcccgaagcggacgcggcagctgaagtcaggaaaccatgcatcacattagcaggagccaactgcagactttaaactccgttcaacatgtggatgcggcagagaaatgacctgtccagacaagccggggcagctcataaactggttcatctgctccctgtgcgtcccgcgggtgcgtaagctctggagcagccggcgtccaaggacccggagaaaccttctgctgggcactgcgtgtgccatctacttgggcttcctggtgagccaggtggggagggcctctctccagcatggacaggcggctgagaaggggccacatcgcagccgcgacaccgccgagccatccttccctgagatacccctggatggtaccctggcccctccagagtcccagggcaatgggtccactctgcagcccaatgtggtgtacattaccctacgctccaagcgcagcaagccggccaatatccgtggcaccgtgaagcccaagcgcaggaaaaagcatgcagtggcatcggctgccccagggcaggaggctttggtcggaccatcccttcagccgcaggaagcggcaagggaagctgatgctgtagcacctgggtacgctcagggagcaaacctggttaagattggagagcgaccctggaggttggtgcggggtccgggagtgcgagccgggggcccagacttcctgcagcccagctccagggagagcaacattaggatctacagcgagagcgccccctcctggctgagcaaagatgacatccgaagaatgcgactcttggcggacagcgcagtggcagggctccggcctgtgtcctctaggagcggagcccgtttgctggtgctggaggggggcgcacctggcgctgtgctccgctgtggccctagcccctgtgggcttctcaagcagcccttggacatgagtgaggtgtttgccttccacctagacaggatcctggggctcaacaggaccctgccgtctgtgagcaggaaagcagagttcatccaagatggccgcccatgccccatcattctttgggatgcatctttatcttcagcaagtaatgacacccattcttctgttaagctcacctggggaacttatcagcagttgctgaaacagaaatgctggcagaatggccgagtacccaagcctgaatcgggttgtactgaaatacatcatcatgagtggtccaagatggcactctttgattttttgttacagatttataatcgcttagatacaaattgctgtggattcagacctcgcaaggaagatgcctgtgtacagaatggattgaggccaaaatgtgatgaccaaggttctgcggctctagcacacattatccagcgaaagcatgacccaaggcatttggtttttatagacaacaagggtttctttgacaggagtgaagataacttaaacttcaaattgttagaaggcatcaaagagtttccagcttctgcagtttctgttttgaagagccagcacttacggcagaaacttcttcagtctctgtttcttgataaagtgtattgggaaagtcaaggaggtagacaaggaattgaaaagcttatcgatgtaatagaacacagagccaaaattcttatcacctatatcaatgcacacggggtcaaagtattacctatgaatgaatgacaaaagaatcttctggctagggtgttagatatatttatgcatttttggttttgtttttaaatcaagcacatcaacctcaagcccgtttagcaatgaggcagtgtagatgaatacgtaaaataaatgactttaaccaagtagctataatgggacttagcactgtatgcatacttaaaaaggttttgaaaaacaaactacttgagaaatatttgtttatatttttctctaacatcatgctatgtgtcagtctgaacatctgacaacagaaatttcagttattattctagctaagttttgaaaacatttgtcatgctgtttaatagaaaactgcaaaccagagacactgactccattaataaaccatattttgtgccgttttgactgttctgaccaaatactaatgggaacaattcttgacgtttttctgttgctgattgttaacatagagcagtctctacactaccctgaggcaactctacattggaacactgaggcttacagcctgcaagagcatcagagctgaccatacatttaaacagaaatgctggtttatttgcaaaatcaccagtatattttctattgtgtctataaaaaatcagtcatttaagtacaagaatcatattttccattcctttttagaaatttattttgttgtccctatggaaatcattcacatctgacaatttatatgttaaagagttttactctctctattttggtccaatttgtatctagtggctgagaaattaaataattctaaagtatgaagttacctatctgaaaatgtacttacagagtatcattttaaaatggatgtctctttaaaaattttgttacttttaccaacaatgtaatataatttatgtatattttattaataatagtgaattccttaaaatttgttctatgtacttatatttaatttgatttaatggttactgcccagatattgagaattggttcaaatattgagtgtgtttcaatatattatctggcttatttcaacatgagtaatatgagcaaaataagttaaaacctgcgtctgatcaattttcctcatgactagaactaaaacagtaaatttggacaatattaagcctcaaataatcatctccaaactccttctaacactttttaaatcagattggaagacatggacaaatcaggttcatgtgttgcatctttatgtcctttgccaatatccaagatcatcacatatggtagatattcacatggagtttcaaattcagaatagattaccattaccttcctgcccttacacatcctactccttatttaaaagttctatttgtgacttttcatttcctgaaagtttaaaaatacaatttgagaatgtttataatacattctctcctgtcttttcacggttacgtctgttattgctgaaatacaccacattttctttgttctggtcaaggttaactcaatatctgtgtgaaagagaactactaacaacgttacaatagaggctagatttgaaaaaaaaaatctatagatctaattgatacaattgtagaacaaaatgtcaaaataatgttttaagtataagagaagatggaccaaggagagagagatcatttgaaaatctaattgtagcttttctaggctcacattcatgtactacttttagcacccttatgggctgtgctcgccccctggacagttgagctttggattatcttcctcttcaattttccctctattgacccgagtgtctccctctgcttctacagatttatagtactccttggctcttttgagtctccacttttactcactgtctctgggatttttaagatccttttcttctcttataaatcatcctcttaatgaaaattagcctaacaaaagtttggagactggaatcctactttgagccactgacttgaaataactcttttggcaagttgcctgacatcctgtcttaccaaggtggcatatttgcatttttactgcttaaaacatttttttttttttaccatctttatccaaatttatcatattgatggtaggactaacaggctttttagaagctggctttaactttgagtctcaagctacaatgctgttgggcagcctggtcttcccacgtgagggtttaactttgtttatttgcctccagttattccaaaatgcttattaaatgaaagtcccaggaacatgtttattttagtcacctttgctttttaacaattttgttttgtaatcaatgagtaattcatgatgaattatttttgactaatggatagccgaaggccaggcttttaattctaataggtaatgttcttcttttgtcttattgaaacaatgagaatactctgtgcatttcaaatgcactccgattatgctgtggttttattcacataagcacaatatgtgttttatttataacttcataacaaacttataatataataatttaccttagcagacatgcaaaagcttattcttgtgtgacttactttctttaagctaataatataaaaataaatatgtatcttaaaaatctataataaaacattagaaattaaagatatgtgctttttattttgcagatgagttcatttgcttttgtagatgtgttttcagagctaggtacagaggaatgtttgctacctttagcggtgaaaaaagaaagagagtcaagaattttgttggattgtgtttgtgtgtgcatatatttgatatcatcattatatttgtaatctttggacttgtaatcatagcctgtttattctactgtgccattaaatatactttaccttatacataacgaataaaa

SEQ ID NO: 132421 - DNA, 4544 bp, Homo sapiens
  Payload ID: 5859
  Gene Symbol: FAM198B
  Gene Name: family with sequence similarity 198, member B
  Uniprot ID: Q6UWH4
  ENST ID: ENST00000393807
  CDS Start-End: 408-1991
gtgaactgttgcaccgtgcaattgcacactataaatgtctttccttatctgtgtgtactcttatctcactgttctattttttctcctcatttatattaactctttcttacctttttttctgaacttctaggccttctctttccagaactggtggaagacaaatgaaacggccaagatggtaagaaacaagccgcatttctccttggggagactgataatttaaaaggtttgttgtgtcagaaacattcccagcttcatcaccaaccctttccttccacctctgcccactggagaccacttatatcccgaagcggacgcggcagctgaagtcaggaaaccatgcatcacattagcaggagccaactgcagactttaaactccgttcaacatgtggatgcggcagagaaatgacctgtccagacaagccggggcagctcataaactggttcatctgctccctgtgcgtcccgcgggtgcgtaagctctggagcagccggcgtccaaggacccggagaaaccttctgctgggcactgcgtgtgccatctacttgggcttcctggtgagccaggtggggagggcctctctccagcatggacaggcggctgagaaggggccacatcgcagccgcgacaccgccgagccatccttccctgagatacccctggatggtaccctggcccctccagagtcccagggcaatgggtccactctgcagcccaatgtggtgtacattaccctacgctccaagcgcagcaagccggccaatatccgtggcaccgtgaagcccaagcgcaggaaaaagcatgcagtggcatcggctgccccagggcaggaggctttggtcggaccatcccttcagccgcaggaagcggcaagggaagctgatgctgtagcacctgggtacgctcagggagcaaacctggttaagattggagagcgaccctggaggttggtgcggggtccgggagtgcgagccgggggcccagacttcctgcagcccagctccagggagagcaacattaggatctacagcgagagcgccccctcctggctgagcaaagatgacatccgaagaatgcgactcttggcggacagcgcagtggcagggctccggcctgtgtcctctaggagcggagcccgtttgctggtgctggaggggggcgcacctggcgctgtgctccgctgtggccctagcccctgtgggcttctcaagcagcccttggacatgagtgaggtgtttgccttccacctagacaggatcctggggctcaacaggaccctgccgtctgtgagcaggaaagcagagttcatccaagcagcagcagcagcgtgtctttccatgcgcttggcattctttattttcccagcctgggaggatatgagagttccagggaaatgctgtattggacatgcaagactcacctggggaacttatcagcagttgctgaaacagaaatgctggcagaatggccgagtacccaagcctgaatcgggttgtactgaaatacatcatcatgagtggtccaagatggcactctttgattttttgttacagatttataatcgcttagatacaaattgctgtggattcagacctcgcaaggaagatgcctgtgtacagaatggattgaggccaaaatgtgatgaccaaggttctgcggctctagcacacattatccagcgaaagcatgacccaaggcatttggtttttatagacaacaagggtttctttgacaggagtgaagataacttaaacttcaaattgttagaaggcatcaaagagtttccagcttctgcagtttctgttttgaagagccagcacttacggcagaaacttcttcagtctctgtttcttgataaagtgtattgggaaagtcaaggaggtagacaaggaattgaaaagcttatcgatgtaatagaacacagagccaaaattcttatcacctatatcaatgcacacggggtcaaagtattacctatgaatgaatgacaaaagaatcttctggctagggtgttagatatatttatgcatttttggttttgtttttaaatcaagcacatcaacctcaagcccgtttagcaatgaggcagtgtagatgaatacgtaaaataaatgactttaaccaagtagctataatgggacttagcactgtatgcatacttaaaaaggttttgaaaaacaaactacttgagaaatatttgtttatatttttctctaacatcatgctatgtgtcagtctgaacatctgacaacagaaatttcagttattattctagctaagttttgaaaacatttgtcatgctgtttaatagaaaactgcaaaccagagacactgactccattaataaaccatattttgtgccgttttgactgttctgaccaaatactaatgggaacaattcttgacgtttttctgttgctgattgttaacatagagcagtctctacactaccctgaggcaactctacattggaacactgaggcttacagcctgcaagagcatcagagctgaccatacatttaaacagaaatgctggtttatttgcaaaatcaccagtatattttctattgtgtctataaaaaatcagtcatttaagtacaagaatcatattttccattcctttttagaaatttattttgttgtccctatggaaatcattcacatctgacaatttatatgttaaagagttttactctctctattttggtccaatttgtatctagtggctgagaaattaaataattctaaagtatgaagttacctatctgaaaatgtacttacagagtatcattttaaaatggatgtctctttaaaaattttgttacttttaccaacaatgtaatataatttatgtatattttattaataatagtgaattccttaaaatttgttctatgtacttatatttaatttgatttaatggttactgcccagatattgagaattggttcaaatattgagtgtgtttcaatatattatctggcttatttcaacatgagtaatatgagcaaaataagttaaaacctgcgtctgatcaattttcctcatgactagaactaaaacagtaaatttggacaatattaagcctcaaataatcatctccaaactccttctaacactttttaaatcagattggaagacatggacaaatcaggttcatgtgttgcatctttatgtcctttgccaatatccaagatcatcacatatggtagatattcacatggagtttcaaattcagaatagattaccattaccttcctgcccttacacatcctactccttatttaaaagttctatttgtgacttttcatttcctgaaagtttaaaaatacaatttgagaatgtttataatacattctctcctgtcttttcacggttacgtctgttattgctgaaatacaccacattttctttgttctggtcaaggttaactcaatatctgtgtgaaagagaactactaacaacgttacaatagaggctagatttgaaaaaaaaaatctatagatctaattgatacaattgtagaacaaaatgtcaaaataatgttttaagtataagagaagatggaccaaggagagagagatcatttgaaaatctaattgtagcttttctaggctcacattcatgtactacttttagcacccttatgggctgtgctcgccccctggacagttgagctttggattatcttcctcttcaattttccctctattgacccgagtgtctccctctgcttctacagatttatagtactccttggctcttttgagtctccacttttactcactgtctctgggatttttaagatccttttcttctcttataaatcatcctcttaatgaaaattagcctaacaaaagtttggagactggaatcctactttgagccactgacttgaaataactcttttggcaagttgcctgacatcctgtcttaccaaggtggcatatttgcatttttactgcttaaaacatttttttttttttaccatctttatccaaatttatcatattgatggtaggactaacaggctttttagaagctggctttaactttgagtctcaagctacaatgctgttgggcagcctggtcttcccacgtgagggtttaactttgtttatttgcctccagttattccaaaatgcttattaaatgaaagtcccaggaacatgtttattttagtcacctttgctttttaacaattttgttttgtaatcaatgagtaattcatgatgaattatttttgactaatggatagccgaaggccaggcttttaattctaataggtaatgttcttcttttgtcttattgaaacaatgagaatactctgtgcatttcaaatgcactccgattatgctgtggttttattcacataagcacaatatgtgttttatttataacttcataacaaacttataatataataatttaccttagcagacatgcaaaagcttattcttgtgtgacttactttctttaagctaataatataaaaataaatatgtatcttaaaaatctataataaaacattagaaattaaa

SEQ ID NO: 132422 - DNA, 548 bp, Homo sapiens
  Payload ID: 5859
  Gene Symbol: FAM198B
  Gene Name: family with sequence similarity 198, member B
  ENST ID: ENST00000592586
  CDS Start-End: 225-548
tttaatatttgagagagtgagaagccagcaaagcctatggccgcccatgccccatcattctttgggatgcatctttatcttcagcaagtaatgacacccattcttctgttaagctcacctggggaacttatcagcagttgctgaaacagaaatgctggcagaatggccgagtacccaagcctgaatcgggttgtactgaaatacatcatcatgagtggtccaagatggcactctttgattttttgttacagatttataatcgcttagatacaaattgctgtggattcagacctcgcaaggaagatgcctgtgtacagaatggattgaggccaaaatgtgatgaccaaggttctgcggctctagcacacattatccagcgaaagcatgacccaaggcatttggtttttatagacaacaagggtttctttgacaggagtgaagataacttaaacttcaaattgttagaaggcatcaaagagtttccagcttctgcagtttctgttttgaagagccagcacttacggcagaaacttcttcagtctctgttt

SEQ ID NO: 132423 - DNA, 4900 bp, Homo sapiens
  Payload ID: 5859
  Gene Symbol: FAM198B
  Gene Name: family with sequence similarity 198, member B
  Uniprot ID: Q6UWH4
  ENST ID: ENST00000585682
  CDS Start-End: 408-1967
gtgaactgttgcaccgtgcaattgcacactataaatgtctttccttatctgtgtgtactcttatctcactgttctattttttctcctcatttatattaactctttcttacctttttttctgaacttctaggccttctctttccagaactggtggaagacaaatgaaacggccaagatggtaagaaacaagccgcatttctccttggggagactgataatttaaaaggtttgttgtgtcagaaacattcccagcttcatcaccaaccctttccttccacctctgcccactggagaccacttatatcccgaagcggacgcggcagctgaagtcaggaaaccatgcatcacattagcaggagccaactgcagactttaaactccgttcaacatgtggatgcggcagagaaatgacctgtccagacaagccggggcagctcataaactggttcatctgctccctgtgcgtcccgcgggtgcgtaagctctggagcagccggcgtccaaggacccggagaaaccttctgctgggcactgcgtgtgccatctacttgggcttcctggtgagccaggtggggagggcctctctccagcatggacaggcggctgagaaggggccacatcgcagccgcgacaccgccgagccatccttccctgagatacccctggatggtaccctggcccctccagagtcccagggcaatgggtccactctgcagcccaatgtggtgtacattaccctacgctccaagcgcagcaagccggccaatatccgtggcaccgtgaagcccaagcgcaggaaaaagcatgcagtggcatcggctgccccagggcaggaggctttggtcggaccatcccttcagccgcaggaagcggcaagggaagctgatgctgtagcacctgggtacgctcagggagcaaacctggttaagattggagagcgaccctggaggttggtgcggggtccgggagtgcgagccgggggcccagacttcctgcagcccagctccagggagagcaacattaggatctacagcgagagcgccccctcctggctgagcaaagatgacatccgaagaatgcgactcttggcggacagcgcagtggcagggctccggcctgtgtcctctaggagcggagcccgtttgctggtgctggaggggggcgcacctggcgctgtgctccgctgtggccctagcccctgtgggcttctcaagcagcccttggacatgagtgaggtgtttgccttccacctagacaggatcctggggctcaacaggaccctgccgtctgtgagcaggaaagcagagttcatccaagatggccgcccatgccccatcattctttgggatgcatctttatcttcagcaagtaatgacacccattcttctgttaagctcacctggggaacttatcagcagttgctgaaacagaaatgctggcagaatggccgagtacccaagcctgaatcgggttgtactgaaatacatcatcatgagtggtccaagatggcactctttgattttttgttacagatttataatcgcttagatacaaattgctgtggattcagacctcgcaaggaagatgcctgtgtacagaatggattgaggccaaaatgtgatgaccaaggttctgcggctctagcacacattatccagcgaaagcatgacccaaggcatttggtttttatagacaacaagggtttctttgacaggagtgaagataacttaaacttcaaattgttagaaggcatcaaagagtttccagcttctgcagtttctgttttgaagagccagcacttacggcagaaacttcttcagtctctgtttcttgataaagtgtattgggaaagtcaaggaggtagacaaggaattgaaaagcttatcgatgtaatagaacacagagccaaaattcttatcacctatatcaatgcacacggggtcaaagtattacctatgaatgaatgacaaaagaatcttctggctagggtgttagatatatttatgcatttttggttttgtttttaaatcaagcacatcaacctcaagcccgtttagcaatgaggcagtgtagatgaatacgtaaaataaatgactttaaccaagtagctataatgggacttagcactgtatgcatacttaaaaaggttttgaaaaacaaactacttgagaaatatttgtttatatttttctctaacatcatgctatgtgtcagtctgaacatctgacaacagaaatttcagttattattctagctaagttttgaaaacatttgtcatgctgtttaatagaaaactgcaaaccagagacactgactccattaataaaccatattttgtgccgttttgactgttctgaccaaatactaatgggaacaattcttgacgtttttctgttgctgattgttaacatagagcagtctctacactaccctgaggcaactctacattggaacactgaggcttacagcctgcaagagcatcagagctgaccatacatttaaacagaaatgctggtttatttgcaaaatcaccagtatattttctattgtgtctataaaaaatcagtcatttaagtacaagaatcatattttccattcctttttagaaatttattttgttgtccctatggaaatcattcacatctgacaatttatatgttaaagagttttactctctctattttggtccaatttgtatctagtggctgagaaattaaataattctaaagtatgaagttacctatctgaaaatgtacttacagagtatcattttaaaatggatgtctctttaaaaattttgttacttttaccaacaatgtaatataatttatgtatattttattaataatagtgaattccttaaaatttgttctatgtacttatatttaatttgatttaatggttactgcccagatattgagaattggttcaaatattgagtgtgtttcaatatattatctggcttatttcaacatgagtaatatgagcaaaataagttaaaacctgcgtctgatcaattttcctcatgactagaactaaaacagtaaatttggacaatattaagcctcaaataatcatctccaaactccttctaacactttttaaatcagattggaagacatggacaaatcaggttcatgtgttgcatctttatgtcctttgccaatatccaagatcatcacatatggtagatattcacatggagtttcaaattcagaatagattaccattaccttcctgcccttacacatcctactccttatttaaaagttctatttgtgacttttcatttcctgaaagtttaaaaatacaatttgagaatgtttataatacattctctcctgtcttttcacggttacgtctgttattgctgaaatacaccacattttctttgttctggtcaaggttaactcaatatctgtgtgaaagagaactactaacaacgttacaatagaggctagatttgaaaaaaaaaatctatagatctaattgatacaattgtagaacaaaatgtcaaaataatgttttaagtataagagaagatggaccaaggagagagagatcatttgaaaatctaattgtagcttttctaggctcacattcatgtactacttttagcacccttatgggctgtgctcgccccctggacagttgagctttggattatcttcctcttcaattttccctctattgacccgagtgtctccctctgcttctacagatttatagtactccttggctcttttgagtctccacttttactcactgtctctgggatttttaagatccttttcttctcttataaatcatcctcttaatgaaaattagcctaacaaaagtttggagactggaatcctactttgagccactgacttgaaataactcttttggcaagttgcctgacatcctgtcttaccaaggtggcatatttgcatttttactgcttaaaacatttttttttttttaccatctttatccaaatttatcatattgatggtaggactaacaggctttttagaagctggctttaactttgagtctcaagctacaatgctgttgggcagcctggtcttcccacgtgagggtttaactttgtttatttgcctccagttattccaaaatgcttattaaatgaaagtcccaggaacatgtttattttagtcacctttgctttttaacaattttgttttgtaatcaatgagtaattcatgatgaattatttttgactaatggatagccgaaggccaggcttttaattctaataggtaatgttcttcttttgtcttattgaaacaatgagaatactctgtgcatttcaaatgcactccgattatgctgtggttttattcacataagcacaatatgtgttttatttataacttcataacaaacttataatataataatttaccttagcagacatgcaaaagcttattcttgtgtgacttactttctttaagctaataatataaaaataaatatgtatcttaaaaatctataataaaacattagaaattaaagatatgtgctttttattttgcagatgagttcatttgcttttgtagatgtgttttcagagctaggtacagaggaatgtttgctacctttagcggtgaaaaaagaaagagagtcaagaattttgttggattgtgtttgtgtgtgcatatatttgatatcatcattatatttgtaatctttggacttgtaatcatagcctgtttattctactgtgccattaaatatactttaccttatacataacgaataaaatacctagaagtagatttatttacacactgtcttatgaaattcttatgtttatgtcagcacagaacaagcacacatttagagcattcatctgaaaattatatggaaattgaacatgggtcaaataaagatg

SEQ ID NO: 132424 - DNA, 587 bp, Homo sapiens
  Payload ID: 5859
  Gene Symbol: FAM198B
  Gene Name: family with sequence similarity 198, member B
  ENST ID: ENST00000587787
  CDS Start-End: 561-587
attgtaaaatatagtatttttaggattatacaccatatgctaatcttttacccactcttcagtatcacaactttctttctctgtggggaggaaaaatccctgtcccctttctgtcttcttgccttttgattctatttgccatagtctaattgacaccccaaggtcatcagcccctgcctttgtgctaggacacgcaaaccacccaggccaatccctaacctgttttttcaaaaaacctccaatcagagagaatccacgacttccttttgtgaactgttgcaccgtgcaattgcacactataaatgtctttccttatctgtgtgtactcttatctcactgttctattttttctcctcatttatattaactctttcttacctttttttctgaacttctaggccttctctttccagaactggtggaagacaaatgaaacggccaagatgaccacttatatcccgaagcggacgcggcagctgaagtcaggaaaccatgcatcacattagcaggagccaactgcagactttaaactccgttcaacatgtggatgcggcagagaaatgacctgtccagacaagccggggcag

SEQ ID NO: 132425 - DNA, 701 bp, Homo sapiens
  Payload ID: 5859
  Gene Symbol: FAM198B
  Gene Name: family with sequence similarity 198, member B
  ENST ID: ENST00000590648
  CDS Start-End: 139-701
aattcacatgaacacccacatatcttttaaaacccgctttctcaccactgtgacagaattttatctcttcacttgttgagatttctctagagagtccagtactgcatcattttgacaaacctgaatgtggagagatgaatgcttctcatctctgaaacacttcaggatggccgcccatgccccatcattctttgggatgcatctttatcttcagcaagtaatgacacccattcttctgttaagctcacctggggaacttatcagcagttgctgaaacagaaatgctggcagaatggccgagtacccaagcctgaatcgggttgtactgaaatacatcatcatgagtggtccaagatggcactctttgattttttgttacagatttataatcgcttagatacaaattgctgtggattcagacctcgcaaggaagatgcctgtgtacagaatggattgaggccaaaatgtgatgaccaaggttctgcggctctagcacacattatccagcgaaagcatgacccaaggcatttggtttttatagacaacaagggtttctttgacaggagtgaagataacttaaacttcaaattgttagaaggcatcaaagagtttccagcttctgcagtttctgttttgaagagccagcacttacggcagaaacttcttcagtctctgtttcttgataaagtgtattgggaaag

SEQ ID NO: 132426 - DNA, 3425 bp, Homo sapiens
  Payload ID: 5859
  Gene Symbol: FAM198B
  Gene Name: family with sequence similarity 198, member B
  Uniprot ID: Q6UWH4
  ENST ID: ENST00000592057
  CDS Start-End: 404-1399
actgttgcaccgtgcaattgcacactataaatgtctttccttatctgtgtgtactcttatctcactgttctattttttctcctcatttatattaactctttcttacctttttttctgaacttctaggccttctctttccagaactggtggaagacaaatgaaacggccaagatggtaagaaacaagccgcatttctccttggggagactgataatttaaaaggtttgttgtgtcagaaacattcccagcttcatcaccaaccctttccttccacctctgcccactggagaccacttatatcccgaagcggacgcggcagctgaagtcaggaaaccatgcatcacattagcaggagccaactgcagactttaaactccgttcaacatgtggatgcggcagagaaatgacctgtccagacaagccggggcagctcataaactggttcatctgctccctgtgcgtcccgcgggtgcgtaagctctggagcagccggcgtccaaggacccggagaaaccttctgctgggcactgcgtgtgccatctacttgggcttcctggtgagccaggtggggagggcctctctccagcatggacaggcggctgagaaggggccacatcgcagccgcgacaccgccgagccatccttccctgagatacccctggatggtaccctggcccctccagagtcccagggcaatgggtccactctgcagcccaatgtggtgtacattaccctacgctccaagcgcagcaagccggccaatatccgtggcaccgtgaagcccaagcgcaggaaaaagcatgcagtggcatcggctgccccagggcaggaggctttggtcggaccatcccttcagccgcaggaagcggcaagggaagctgatgctgtagcacctgggtacgctcagggagcaaacctggttaagattggagagcgaccctggaggttggtgcggggtccgggagtgcgagccgggggcccagacttcctgcagcccagctccagggagagcaacattaggatctacagcgagagcgccccctcctggctgagcaaagatgacatccgaagaatgcgactcttggcggacagcgcagtggcagggctccggcctgtgtcctctaggagcggagcccgtttgctggtgctggaggggggcgcacctggcgctgtgctccgctgtggccctagcccctgtgggcttctcaagcagcccttggacatgagtgaggtgtttgccttccacctagacaggatcctggggctcaacaggaccctgccgtctgtgagcaggaaagcagagttcatccaaggtaacagattcacatgcttcgttatttgcagctgttggggattctggttcattttcttttttccctcactctctttttctaaatgatttttctccacccacggttcacatttggacagcagcagcagcagcgtgtctttccatgcgcttggcattctttattttcccagcctgggaggatatgagagttccagggaaatgctgtattggacatgcaagagtaagcccatactgtataatctttgctctccatttccctcgcttcacttcccagtggcttattaaatctaattaaagccaacggcaatttgcatgatgaggagaggaagctaggctggaggcaaagaacttgctgacagtcaggcatactattaaataggttactatgggaggaagtagaagtttttaaaagtaagggggaagcgggttatcgttcttgagcagatggaatcttcttaagccgcgcagagccagaccatgttaggtttaaccccccctttttttttcaatggatttaacctctttatttaacaaataaaaagaatgagcaaaaattggtgatttgttcagtatgtatactaactagctgtgtggttttatcaagcccctgactatgatctattgagtctgtctttcaagattctcccgtcttgggtgacaaacattttggcaggttctaacacatgtagccagttactgcagttgccagcaaaaggactggtctgcggtcatgcccatgccatataaaggatattctctgaatattaaagctattccagggctcgaatacaaagtacagtgagtcagtggcttatgtttgaatgcagaatgatgccagaagttacaactttgaatccagattggcccaagaggctaaaatgtaccccaaagagattataagctgaaaggatacttaactttctccatgttaccatgaaatttagcatttcagtgaggttcccagggagcctagaatggaatggattaaaatccctgggagtggctgagacccaactgcatttccaatggctttagcattataatttcattttaaaatggatacccctggaagtaccagtgatttacttagaaaaattggacattccctactgatggtggttcttgtctaagtgctccagattcacaggtatgctttgatgtctcaagtttataaagcagtccaccacagttatgccaatgtaagaaaccttctcaaacatttaatctaatgttgataaaaatgaatttttattgggtgcccacaatttgctaaggattatacaaattgattcatatgtgttggctcctagaattttcataacaatgctatgaagtggggactattattatttccatttagtagatgagaaaattgaggcttattgagacaaagtaattggcctcaactcccacagctagtaggtggctaagctgggttttgactatagacccagcaaacttcagaacataacttcttagccactggacttaggtgaatatgtaacttattatccaaactggaaccgtgtggcgtgaaaggagatgctggtgggcattgggacaacaggcccacactgactgttctgagcagagtagagcacaggatcccccttgttatgctgaaatcccattcattttcatgtcataaaggccccagagaggagaagatgaactcctgtgtatatcctgaggcagagttctctgatatgtcctttgagcttcccttagacgctcttagactactgtattgggagaatgcagtagtggctaagagcctgggccgtggagttggactgactaggtttgaacttaccaatcatacgacttggaaatgttgccatgtctctttatgcctcagtttcctcagctgtaaaatgacaatactgcctaccatatgagattgttgttagttaatacagggaaaacacttagaaccagtatttgccacaagataaaccttcaataaatattggttattattattattattgtaccaagcacatgaggtaccaagttcattgaattcctcacataatctccaagtctcatgtgttacttcgttacgtgataggactatgactaaaactgctcaattaaacttttgtaatcccaa

SEQ ID NO: 132427 - DNA, 574 bp, Homo sapiens
  Payload ID: 5859
  Gene Symbol: FAM198B
  Gene Name: family with sequence similarity 198, member B
  ENST ID: ENST00000593260
  CDS Start-End: 1-574
ttttctccacccacggttcacatttggacagcagcagcagcagcgtgtctttccatgcgcttggcattctttattttcccagcctgggaggatatgagagttccagggaaatgctgtattggacatgcaagaatggccgcccatgccccatcattctttgggatgcatctttatcttcagcaagtaatgacacccattcttctgttaagctcacctggggaacttatcagcagttgctgaaacagaaatgctggcagaatggccgagtacccaagcctgaatcgggttgtactgaaatacatcatcatgagtggtccaagatggcactctttgattttttgttacagatttataatcgcttagatacaaattgctgtggattcagacctcgcaaggaagatgcctgtgtacagaatggattgaggccaaaatgtgatgaccaaggttctgcggctctagcacacattatccagcgaaagcatgacccaaggcatttggtttttatagacaacaagggtttctttgacaggagtgaagataacttaaacttcaaattgttagaaggcatcaaaga

SEQ ID NO: 132428 - DNA, 7457 bp, Homo sapiens
  Payload ID: 5860
  Gene Symbol: FAM199X
  Gene Name: family with sequence similarity 199, X-linked
  Uniprot ID: Q6PEV8
  ENST ID: ENST00000493442
  CDS Start-End: 167-1333
cgcaccccggcaagcagcagcgggccgcgacgcccagcctgccagtgagctgcgacgggcacaccccggagcgtcggcgactgcggacaggttagagtgggggcaggggcgggcgcgggagcagcccagggccagagagggagcccgagccaggccatctccaaccatgtccgacgaggcctcggccatcacttcctacgagaagtttctaacccccgaggagcccttcccactcctgggacctcctcgcggggtgggcacctgcccgagcgaggagccgggctgcctggacatcagcgacttcggctgccagctgtcctcctgccatcgcaccgacccgctccaccgcttccacaccaacaggtggaacctaacttcttgtggaacaagtgttgccagctcagaaggcagtgaggagctgttttcatctgtgtctgttggagatcaagatgattgctattccctgttagatgatcaggacttcacttcttttgatttatttcctgaggggagtgtctgcagtgatgtctcttcttctattagcacttactgggattggtcagatagcgagtttgaatggcagttaccaggcagtgacattgccagtgggagtgatgtactttctgatgtcatacccagtattccaagttcaccttgcctgcttcctaaaaagaaaaacaagcaccggaatttagatgaactcccttggagtgcaatgacaaatgatgagcaggtggaatatattgagtatctgagtcggaaagtgagtactgagatgggtcttcgggagcaacttgatattattaagatcattgatccttctgctcaaatctcccctacagacagtgagtttattattgaacttaactgtctcacagatgaaaaactgaagcaggtcagaaactatatcaaggaacatagccctcgccaacggcctgcaagagaggcctggaagagaagcaactttagttgtgcaagcaccagtggagtgagcggtgccagtgccagcgccagcagcagcagtgccagcatggtcagttctgcaagcagcagtgggtccagtgttggaaactctgcttcaaactccagtgccaacatgagtcgagcacacagtgacagcaacctgtctgcaagtgcagcagagcggattcgggattcaaaaaagcgatccaagcagcggaagttacagcagaaggccttccgcaagaggcagctgaaggagcagaggcaggcccggaaggagaggctcagtgggctcttccttaacgaagaggtgctgtccttgaaagtgactgaggaagaccatgaagcagatgttgatgttttgatgtaataagggtgaatttatcaacgttctttgtgagcattaaaatactccatccttatgggtttacatgcatcttgaccaaaattttggttagggctgtgctgatgtaccattaataatttaagccagtggttcttggcaggtgatcccaagacctgcagcttcagcatcacttgagaagttgttaggaatgcatactagtgggccccgcccccagacatagtgaatcagaaaccaacagggaggcgcctagcattgtttttttaacaagtgctgggttattctgatgcacagtctagtttaagaaccactactttgggtaaacgttttgactgtttaaagtttatggcggtgaagtgggcgtcttcaaagactagtacttacacagtttagaagatttcaaggtactgctgacagtagtttattatgtcagtatacatacatgtgtagagatcataatttagttcccttcttaatgttacaatttcttagtttacttttcctaaagggccatagcataattcttgattcctggtggaaatcttttctgaggtgtgggggtgggcaaggtgtggattgctgtttacgatagtgccttcattagttttagttctgtctgttttcattcattattgactcaaaggtattagaacaggcccttatctttttcctattagatttatttttgttttttactttatgtaagttcagaatccttttttaagtgatgactactgatgaaataatgttactagtagctgaattttagacttgatgctatgttgattaatatttaaatggtgaaagtaattaggcaaaataagcaattctgcttttctgttgctttcagaatttttaggctgtaaaattgtctcaggcaggaagtcagtctatatctctctcaagttcttattgtaggtcatttttttttcagcacagctctaatttttaaatatttggtataacagcttctggcatgtgacctagttaatgttgaaaattaactgatgaaaacccttgtagatctgctaaacttctctataaattgctagaaatatacagagcaatgagatatagaaaacaccttagcttgttggttattaatagagctctaattttaactgtgaaatcatggagtttctttaaatgttttcctagagtgtttgttatcatgaacattagaaatagcattattccttttcttctaccacatgtcttgaacattcacatgggttaaagaagatggaaactgatactactgacaatcaagctgctttctgactttcataattttctttatattgtggatagcattttgaaggtgaccgtgattctgtaggaagagctgtaatcaatatttttcaaactctaagagtacagaggttagtaagatttcttttttttttactttttgttacgtcaagtagcttattaagaaaaagattcatgacttaaattcttaattctcagttgatacaaaggcttataatcatgtgttttaaaattttgatttcattttcgttccttgaaggttaaagaatggaaactggggataaaaattaatacactgcagctttgccaaggtctgtgatatggttgtaaccttttaaagactactaaagtcataatttgaaatttttactaaaataaaacatatgtgtctatggttttcaattggagtagtctttcttactttcccccttcccctctttggttctcctaaccagcttagaggacccaaagagagcttagggatagacaccagaatactctgtggaggtggaacaacttaacctcactgttttcccttccaagtataggaagagcaaatagagcatagtaactgtatctaaattctctacctgctcttagcaaaagcaaaatcccacagaatgattgcctgctgtctttacctattcttcaaggaaaacaggccacttttggagaccatagagcaccatttatctgtcaaatacttggaaactatttacttaacggtcatcagtaaaaaaccctaaacaaggtcatgatataatttaagaccaattcccctactctcccaataatcacatagtcttattactttcaatttaacttgagtcactattaagcaagtttaccaaagtgccacaaagttgatttttaacgtttgtaaaggtttgaatgtttatagaagtgcatcatgaaattttgtgtaaatccagatgaactgtcattatagtactataaattagagatagtccataaagttgggttgaaggagattgaaaatatttcctttgattaaaagaaaataattaactaacttgggcttgcttgtgattgaagagggagattagatagtcctctgtccccccaaaaaagaaactagcagagaaagacataaaaagctctttggtgtctgttcatgtgctgtacattttttccgttttaatgtcttgtgtagataattcaaagtttgaactatttctttcttggaataagtaataatttattcaatatggtgtatctctgagttcaatttaaaacaatccaactcagtaatatttatttttaaatacaaatcctaactaaccaattaattaataaaaaggcaagacttacttgctgtagtattggttctcatctgtagagaactgacattggagcaaattttaagtctcccctttgaaaataagccttgttaactgagggcgtaatacatttcccacagatttatccagaaacattttattagagatcttatagtagtatctcagttcctactacagctttctaaaggatgagacttgcatttaacaaaatgacatatataatatttttctatagttttgcaactgaattaaaggaaggtgatgtattataatgtgtagtgaggtataaagggctagttcattctctcccaacaagaacttagaataaaataacacttttttttcatgagacttacctcatttttgttaggctatggcagttttgtccagttcctctgtcccttgagtgaattagatattggtgaattaatctcagaaactgacctataaaataatgactcattatagattgggtgaacttctcattttatttagcttttaaaagtgctaaatcctctcataaaggaaaaattataggaaactatagcggtatccagattctgatgagctttaaaaattataaaatatagcaaatgtcttcatattttagccagaaatattagtacacaaccaatatagaagtcttgtttgtttctgggttctccagcagagactttttgtttgtggcttactctgtatagcctcatgtgccttaaaggtggtgaactctagtttttgtcaatatcaggcttttcaaaactcaaaaacaatccaaatgttgtaatttgttttgcataatgcccatggaattggatatcagtaagcaaagccattaaatcgaaccaatcaatgctaatagagtataaaaacaaaaaccttcaaattttaagtttcatttgtgtaactttattttcggcctagctagatcattgaagagccttgaaagttatctaaagtatggcttaatgtatttttttccctctgaaaaagatcatatgccaggatacttcttcaaaccagatcacttttaatatctagaaagataattttcaaggtataggcaaaagcacttcaaggacagagattatgtagcaagttgattctctaggaattctttgaactcatttgtgtaatagctggaacacactcctcttctttcctttaacaaatgaacttttagcacttctgtcttcaaggaaaaacatttgtttggaattgaagggtactcgcagtccgtttatagtttgggacaattaataggaaaatccccagttgcattcaaataatagtgttgatgttgagggcactgactcattcagcatgtctgaactagaagtaaatttaattctgaaaggactgttagttaggaaataagtatttgtatacatatgtactgtggtaactttggattcattttaagtctgataaagtaagataaactttgtcttaaaaataaaattatgctaagtgaataaaaactgagatattttaagctaggcatctttgttagcatagtatccggaacataactacttataatgcttaggtcttatttctttggaaaataagttacttattccagaagccttagaaggaattctgaaaattcttctaactggccattaagagtaaggaagttgaatggtactgctgaagatctgagttgactcactgaaattttattttcttatttttttaacattaaaattatttctttttggctctccctctagttattttttaaattaaggtaattactgttttaacctagagcatataatggcaaattaaattttaatttgacactcataccgaactcagaaaagcttgtttgatcttctctaaattctgtatgtagtactttttttaattgtcacatttctttgttacatctttgtgtccaacaaaacctgtggaaatctgtgttcatttttgtggtgagggatgggggtgaaaaaggggagacttgctctaattatgcatatacatttgactatgtaaaggtagttgtagactatatgtataaataacaagttaacacttaatattctaaattgttctaaggaacagtggcctgaagccatgactagttttgtggagctgctggctcttttaacagtagctgacctattggatttaaactgagactgaaattgacatttgtggttaggttatctagctgaggcttttaacaatggagcagataatgtctgttcctgtagtggatccatttaatttcctatttgagtactctcacttaacaagtattatctattctgaacctttgtgttgggaatttaaggactattgtcaaaggctattaatggtaaacaagtatatgcaaaacaattcacatatgggtaaaaatttcaaattgtgggtttttgtttttgctttttagtttcaaagattagttatgtagcagcaatatcataaccaaagcaagtaggaagttgactggtttggagaatcttcaagtagttttaaatactgtaatgtatcagattgttaaccaggatttttttttcctgtattactgctaaatatattactatattaatgcacttttgtatatataactgtcttctgtacattctgtacttactacagtgtatataaagcctgttttccctgaagctgtgagggaataacaatagttgtatcataagtcgtttctattttgagttccttcttgtacttgaaagtagttcagtagtgaaatctaaatgagtgtgtatggttgtaattaaaactggcaatgtggcagagctgtcttttgaaactgaataccagaatgaaaagtgttgttttggttaagaactcttataatatattatttcttttgatgtaccctgagttgttacacagcccactcactgctgcttactactttatacttctgagtcagctcctttcatgctctatcccagaatatttaccaacagaggagaactgctcccttttctgtttctcacagtttggttatggctttataaacttttatttggtgaaagccccagatacccaaatgtcattggcaaaacttatttttttttctggacagatcagatttctagagagagcagatttctagagagattagcattcatagtaagtgaaaattgtctaatttttttaatccatgctattactgggcagtaggtctaattttttttgacaaaaaatagatctattttccttatatattgatttagaatcttaagttagaattttatagaagaaatgtctgagcagttctatgtatggaggagcaattcagcttttcagcagcaactttatcttttgccactagagggagatctgtggttgctttctcctttggagaatagctgctttgcttttatttttaatttctaaggttggaatagaacttattctcaaaattcctttagtgttattaaatattttcatttattagtcaaaggtaagttaattaagcttgtttaatgatgccaatcttatgcttttctgtaatcttcaatttttaataaatgtgagttagatactaagtgaaa

SEQ ID NO: 132429 - DNA, 1642 bp, Homo sapiens
  Payload ID: 5861
  Gene Symbol: FAM20A
  Gene Name: family with sequence similarity 20, member A
  ENST ID: ENST00000590074
  CDS Start-End: 1-383
acttccacctctggccccaagtacagcgccagctgcggcctcgggagcgcccgcgggggtgcccgtgcaccggccgcgcctcctccctggcgcgggactcggccgcagctgcctcggaccccggcacgatcgtgcacaacttttcccgaaccgagccccggactgaaccggctggcggcagccacagcgggtcgagctccaagttgcaggccctcttcgcccacccgctgtacaacgtcccggaggagccgcctctcctgggagccgaggactcgctcctggccagccaggaggcgctgcggtattaccggaggaaggtggcccgctggaacaggcctcagttcctgcttttgaaaggaagagggggagtctgtgacccctgaggcctccttgcaactctgttttccaagctttgcacatcttccgaatttcttcttcaaagtctaccctaatgaaatatcagacaattttccaagtgtgcttcatgaacttctgggaggtgcttcacagtttctgcaaatgattgattgaattttcactttgaaaaaatatactttaaggcgacacaagatgtacagagagcagatgaaccttacctccctggaccccccactgcagctccgactcgaggccagctgggtccagttccacctgggtattaaccgccatgggctctactcccggtccagccctgttgtcagcaaacttctgcaagacatgaggcactttcccaccatcagtgctgattacagtcaagatgagaaagccttgctgggggcatgtgactgcacccagattgtgaaacccagtggggtccacctcaagctggtgctgaggttctcggatttcgggaaggccatgttcaaacccatgagacagcagcgagatgaggagacaccagtggacttcttctacttcattgactttcagagacacaatgctgagatcgcagctttccatctggacaggattctggacttccgacgggtgccgccaacagtggggaggatagtaaatgtcaccaaggaaatcctagaggtcaccaagaatgaaatcctgcagagtgttttctttgtctctccagcgagcaacgtgtgcttcttcgccaagtgtccatacatgtgcaagacggagtatgctgtctgtggcaacccacacctgctggagggttccctctctgccttcctgccgtccctcaacctggcccccaggctgtctgtgcccaacccctggatccgctcctacacactggcaggaaaagaggagtgggaggtcaatcccctttactgtgacacagtgaaacagatctacccgtacaacaacagccagcggctcctcaatgtcatcgacatggccatcttcgacttcttgatagggaatatggaccggcaccattatgagatgttcaccaagttcggggatgatgggttccttattcaccttgacaacgccagagggttcggacgacactcccatgatgaaatctccatcctctcgcctctctcccagtgctgcatgataaaaaagaaaacacttttgcacctgcagctgctggcccaagctgactacagactcagcgatgtgatgcgagaatcactgctggaagaccagctcagccctgtcctcactgaaccccacctcc

SEQ ID NO: 132430 - DNA, 804 bp, Homo sapiens
  Payload ID: 5861
  Gene Symbol: FAM20A
  Gene Name: family with sequence similarity 20, member A
  ENST ID: ENST00000590873
  CDS Start-End: 1-66
cagagacacaatgctgagatcgcagctttccatctggacagggaatatggaccggcaccattatgagatgttcaccaagttcggggatgatgggttccttattcaccttgacaacgccagagggttcggacgacactcccatgatgaaatctccatcctctcgcctctctcccagtgctgcatgataaaaaagaaaacacttttgcacctgcagctgctggcccaagctgactacagactcagcgatgtgatgcgagaatcactgctggaagaccagctcagccctgtcctcactgaaccccacctccttgccctggatcgaaggctccaaaccatcctaaggacagtggaggggtgcatagtggcccatggacagcagagtgtcatagtcgacggcccagtggaacagttggccccagactctggccaggctaacttgacaagctaagggctggcagagtccagtttcagaaaatacgcctggagccagagcagtcgactcgagtgccgaccctgcgtcctcactcccacctgttactgctgggagtcaagtcagctaggaaggaagcaggacattttctcaaacagcaagtggggcccatggaactgaatctttactccttggtgcaccgcttctgtcgtgcgttgccttgctccgtttttcccaaaaagcactggcttcatcaaggccaccgacgatctcctgagtgcactgggaaatctgggtataggtcaggcttggcagccttgatcccaggagagtactaatggtaacaagtcaaataaaaggacatcaagtggata

SEQ ID NO: 132431 - DNA, 2955 bp, Homo sapiens
  Payload ID: 5861
  Gene Symbol: FAM20A
  Gene Name: family with sequence similarity 20, member A
  Uniprot ID: Q96MK3
  ENST ID: ENST00000592554
  CDS Start-End: 724-2349
gcagcgccggcttcggatcgggagttggccgtcagctgcgccagaggcaggtgccagcggagagtgggtgggggtgccggcgccaggccaggctcggggaggccccgcgctacctctgcctctaggagtccaggcgcacagacaagctccccggagccgctcctgcttcgccaactccccactcgcgccgcccgtgccagccgccggcactggcgtctccgccgcccgcaggaggagtcgcgggagcactagcagccgccgccgagcgacagcatcctcaggagagacgccccgggctttgcagccggcggcctccgtccgccctccgcggtcgccccccgccccgtcgcccgtccgcccgcggtggcagccggcgccggcgccccggggcccttcacctgccgcgagcgtccgggcgggcgggcgcacgggagaaaaggcgcaagaagcgggcaccccgggaaccccattccctcggctcactcggcgcggagaagcgacgcccgctgactccgagagccccggtgctccgtgcacctggtccccaagttgaggagcgacacccctccacaggggactagcccgcgcggggagcattccggtctcactgaccccggcccacccgcgggactccaggcacctcttctgcccgcaccccgcgacccctcccgggaccccggagacagccggcctgcccccggcgtcccccttggccagcacgccatgccggggctgcgccgggaccgcctactgactctgctgctgctgggcgcgctgctctccgccgacctctacttccacctctggccccaagtacagcgccagctgcggcctcgggagcgcccgcgggggtgcccgtgcaccggccgcgcctcctccctggcgcgggactcggccgcagctgcctcggaccccggcacgatcgtgcacaacttttcccgaaccgagccccggactgaaccggctggcggcagccacagcgggtcgagctccaagttgcaggccctcttcgcccacccgctgtacaacgtcccggaggagccgcctctcctgggagccgaggactcgctcctggccagccaggaggcgctgcggtattaccggaggaaggtggcccgctggaacaggcgacacaagatgtacagagagcagatgaaccttacctccctggaccccccactgcagctccgactcgaggccagctgggtccagttccacctgggtattaaccgccatgggctctactcccggtccagccctgttgtcagcaaacttctgcaagacatgaggcactttcccaccatcagtgctgattacagtcaagatgagaaagccttgctgggggcatgtgactgcacccagattgtgaaacccagtggggtccacctcaagctggtgctgaggttctcggatttcgggaaggccatgttcaaacccatgagacagcagcgagatgaggagacaccagtggacttcttctacttcattgactttcagagacacaatgctgagatcgcagctttccatctggacaggattctggacttccgacgggtgccgccaacagtggggaggatagtaaatgtcaccaaggaaatcctagaggtcaccaagaatgaaatcctgcagagtgttttctttgtctctccagcgagcaacgtgtgcttcttcgccaagtgtccatacatgtgcaagacggagtatgctgtctgtggcaacccacacctgctggagggttccctctctgccttcctgccgtccctcaacctggcccccaggctgtctgtgcccaacccctggatccgctcctacacactggcaggaaaagaggagtgggaggtcaatcccctttactgtgacacagtgaaacagatctacccgtacaacaacagccagcggctcctcaatgtcatcgacatggccatcttcgacttcttgatagggaatatggaccggcaccattatgagatgttcaccaagttcggggatgatgggttccttattcaccttgacaacgccagagggttcggacgacactcccatgatgaaatctccatcctctcgcctctctcccagtgctgcatgataaaaaagaaaacacttttgcacctgcagctgctggcccaagctgactacagactcagcgatgtgatgcgagaatcactgctggaagaccagctcagccctgtcctcactgaaccccacctccttgccctggatcgaaggctccaaaccatcctaaggacagtggaggggtgcatagtggcccatggacagcagagtgtcatagtcgacggcccagtggaacagttggccccagactctggccaggctaacttgacaagctaagggctggcagagtccagtttcagaaaatacgcctggagccagagcagtcgactcgagtgccgaccctgcgtcctcactcccacctgttactgctgggagtcaagtcagctaggaaggaagcaggacattttctcaaacagcaagtggggcccatggaactgaatctttactccttggtgcaccgcttctgtcgtgcgttgccttgctccgtttttcccaaaaagcactggcttcatcaaggccaccgacgatctcctgagtgcactgggaaatctgggtataggtcaggcttggcagccttgatcccaggagagtactaatggtaacaagtcaaataaaaggacatcaagtggatacctgacttctcaggatccttattctagctacaagtcaaagataactcctggtccagacaaaacacctggcctatcacaagctgactaaaaatctgcactttgggccagcgcaggcaacagtaactctgacaggttcaaattagacctcacactttctactcatattctagtcactggacccatctgaatcagtaatccctactgcccggtcctggagtaacttcttagagatattataacaagtggcaaa

SEQ ID NO: 132432 - DNA, 2798 bp, Homo sapiens
  Payload ID: 5861
  Gene Symbol: FAM20A
  Gene Name: family with sequence similarity 20, member A
  ENST ID: ENST00000619787
  CDS Start-End: 1-438
atgttcacttcaccaagtgaggggaaaccagggaatatggaccggcaccattatgagatgttcaccaagttcggggatgatgggttccttattcaccttgacaacgccagagggttcggacgacactcccatgatgaaatctccatcctctcgcctctctcccagtgctgcatgataaaaaagaaaacacttttgcacctgcagctgctggcccaagctgactacagactcagcgatgtgatgcgagaatcactgctggaagaccagctcagccctgtcctcactgaaccccacctccttgccctggatcgaaggctccaaaccatcctaaggacagtggaggggtgcatagtggcccatggacagcagagtgtcatagtcgacggcccagtggaacagttggccccagactctggccaggctaacttgacaagctaagggctggcagagtccagtttcagaaaatacgcctggagccagagcagtcgactcgagtgccgaccctgcgtcctcactcccacctgttactgctgggagtcaagtcagctaggaaggaagcaggacattttctcaaacagcaagtggggcccatggaactgaatctttactccttggtgcaccgcttctgtcgtgcgttgccttgctccgtttttcccaaaaagcactggcttcatcaaggccaccgacgatctcctgagtgcactgggaaatctgggtataggtcaggcttggcagccttgatcccaggagagtactaatggtaacaagtcaaataaaaggacatcaagtggatacctgacttctcaggatccttattctagctacaagtcaaagataactcctggtccagacaaaacacctggcctatcacaagctgactaaaaatctgcactttgggccagcgcaggcaacagtaactctgacaggttcaaattagacctcacactttctactcatattctagtcactggacccatctgaatcagtaatccctactgcccggtcctggagtaacttcttagagatattataacaagtggcaaaaataaaagagggatttgctaagaatatcagaaaaggagtgttccaatttgaagagtattacaattgaaataacatcaaatatgtcacactaagcagccagtaacagaataaataattacaacgaaggaaaaaaaaaggaaagtcctccaaggtcaggatggcatgggaacaggcctagcagggacacaagcctggagtaaggcaggaaaagagccaaggctgactacagcccaccaaccacaatcttcttccctaagaccccaggattgtccccggcccatccccaaaagaagaaaggggctatgtggaaaggtgaggccctctagatgcccctccctgtgacggctggctcaaaaaagactaagtcaggttttttattgaagcctcccttagaagaaagtgtagtagggattccttgtctcctctaccttctccctgacttgttgatatctgaaactccttttaataggaggctttgtttcttattccataattaatgaccgaaaacacaaaggacagtaaggtcttcattccatggagtgactagtcagtcaacaaaagtaaaaatgcctcatttcatcaaatcaacttttccagtaaaggccagagttcaaatactgtaagcatgagaatagaatggagctgtcactaaagagagtacaaggtcaagaaccagaaatgtctccaagctttctgcagtgtgagcaaagatagcctcgactggacaaataacacttctgaccccgtggtacccccacatgactggtatgctgcccctggactttgtgtctctctaaaatcactaccattcactgagatctgaccaggtgaggcactcaccaacgctacagaagcaacacacaggtttccaatcctctcaaacacagatacaacccccatcctccaatgtgcatggaagaactttaaatctcagagagagtaagcaaaatcacacaatttagtggtttagacctattccaaagtcttcttttcactgtaacacaaaacccaacagtatcccacccaatttatgaagtcaaatttgtttgcttaaaaaaaaaatcagctgggcatgggctcacacctgtaatcccagcactttgggcctaaacaggcagatcgcttggtctcaggagctcgagaccagcctgggtaacatgacaaaaccctgtctctacaaaaaaatacaaaaaaaaaaaaatttttttttaaatcaactctttaacagagaaaccttaatcccaaagatttccttaactgttgtggccctactgcagcatagggctccccacttcattcactgtctctcctgcttcaagatgtttcttccctgtggatgaagaaccaggagatcacacacagaaatgggaaaatatctgggtaaaaacattcaaagaatagcacaaaatggtttgggacttccaaataagactctcaggaaagcaggctacagctctacctcaaaacccgccacctcctataacgaaggactggttttccaatggcctatatacacattttgctgcactctacaaacagaaagcaataggcttgaatttcaccatgatatgtggtacacctaccttattattcacttatctttcaaccttccattactttttgattagtaacaaaattaagactcatttctcaaaaatatcagaaaaccaaccgtttcattcttactcgagttcttccagcatgttcattttgaactgtttacctcccatgaaataaaaagtctcttgactctg

SEQ ID NO: 132433 - DNA, 5984 bp, Homo sapiens
  Payload ID: 5862
  Gene Symbol: FAM20B
  Gene Name: family with sequence similarity 20, member B
  Uniprot ID: O75063
  ENST ID: ENST00000263733
  CDS Start-End: 337-1566
gtgtgggactgccgctctgcgcggcgagaggtggcctgggaatggccgggccgggggtgggccggagccgctgtggcggcggcggcggctgggggcggtgagcgcggcgtggggctgcccctccccggaggcggcgggggcggccggggccgcgccgcaccgcaccgcgcgggcggccatggagcgagcctagggcccgacaggaactgtggaaggtgcatcagtgaagaaatggaccaatgtgtataatcatggaatctccttgctaaccatcaccaccagctctccttaatacatgagcaagagtgggtcaggggagaaggaaaagaggtcaacatgaagctaaagcagcgagtcgtgctgttagcaattctccttgtcatttttatcttcaccaaagttttcctgattgacaacttagatacatcagctgccaaccgggaggaccagagggcctttcaccgaatgatgactggcttgcgggtggagctggcacccaagctggaccataccttgcagtctccctgggagattgcagcccagtgggtggttccccgggaagtgtaccctgaagagacaccagagctgggggcagtcatgcatgccatggccaccaagaaaatcattaaagctgatgtgggttataaagggacacagctgaaagccttactgatacttgaaggaggccagaaagttgttttcaaacctaagcggtatagccgagaccatgtggtggaaggggaaccgtatgctggttatgatagacacaatgcagaggtagcagcctttcacttggacaggattctgggtttccaccgagcccccttggtagttggcagatttgttaatcttcggacagagatcaaacctgtcgccacagagcagctgttgagcaccttcctaactgtaggaaacaatacttgtttttatgggaagtgctattactgccgagaaacagaaccagcttgtgctgatggagacataatggagggatctgtcacactttggcttccagatgtgtggcctctgcagaagcaccgtcacccatggggcaggacttaccgagaaggcaaattggccaggtgggagtatgatgagagctactgtgatgctgtgaagaaaacgtccccttatgactctggcccgcgcctcttggacatcattgacacagctgtctttgattacctgattggcaatgctgaccgccatcactatgagagctttcaagatgatgaaggcgctagtatgctcatccttcttgataatgccaaaagctttgggaacccctcgctggatgaaagaagcattcttgcccctctctatcagtgttgcatcattcgggtgtccacctggaacagactgaactacctaaagaatggtgtgctaaagtctgccttaaaatctgccatggcccatgaccccatctccccagtgctctctgatcctcatctggacgccgtggaccagcggctcctgagtgtcctggccaccgtgaagcagtgcaccgaccagtttgggatggacacagtactggtggaagacaggatgcctctctcacacttgtaattctcgacacaaaataagtgaaacttctttttacaaagatagagaaacagcacaatcaattccaaatggtatgagatggattggaagtggccagcagcaagttctggtgacgggacagagtggccttggatgtctttggtattttctgtagtagaaactaaagcaaagaccacaagtttcagagcatggagacattcctgctgaatcgccttctcacctcctcggcaattgctcattctagggttgggcatcatagttggtcagtcttaattcccatgccaaaggacaaacaggtgtgacatttggatagatgaatactgggattggctctggagcatgtgttttgagttgaaccttgcagtcctttctctacgcccgtggattttgtggaaacactttgcaatctctttgtcttttttttttttaccagaactagttacattggaatgcttactgtcctacagagtggcagcaaataaaaccttgcattccatcaagccaaaatagcacactctgttagaggagatacatgtttaagatagaattggagggaaggacaaaaacagaaaaatgtttgggcttttaagccattgggtagtattgttttgatgatcttagaggagggaagaagagagagagacccaatggtagaaccagaatcagggagatgactgaactactgaaaaacaggttcccttgtatttaggatcttaaggtgtataaaaagcaaacatgactttgcacctaagtaaattctgcattctcatagttgtgtcccaattaaccaaaaagttgtctctagagaaaatactattacaatctaagcatgattctctgtggagactaattttttccccttttgccaaaagcagtccttcccaaattaacaaagcaaactgaaataataccttgaataacaggttgcctgtggtctctgtcatcctcgtttctcttctgaaatgaatttccacctctgcctttaaggcatttttgtcactgaagctgctgttcccaagagatcggcaacctttttgtccctttctcataagaaagggacactcctacaggtgagagtgtataccttactctctcagataagtggctggacttatcttgtgatttggggccatggaagattggaaacaaagattttaagccttcttctttttttcttttttcttttttttttgagaccaagtctcactctgttgcccaggctggagtgcagtggcacgatcttggcttactgcaacctccgtctcccaggttcaagcgattctcttgcctcagcctccagagtagctgggattacaggcgcccgccatcgtgcccagctaatttttatatttttagtggagacagggtttcgggtttcaccatgttggccaggttgatcttggactcctgaccccaggtgatccacctgcctcagccttccaaagtgctgggattacaggcatgagccaccgtggccggccaagattttaagccttctgagccttgaaattgaggaggttaaaaggaagagccttaagattttgatttatgtcaaatcctaattctatcattcagtcttgtttggagttctgaacccatgatgttgtattatgcttctttctcctcttagcactctcaaatttcaggtttgtaaaacacagtttttgttttgtgttctggcaaagtgatctcaacatgtaagtagttgcagtaaaacacaggggcaaaggaagacaggcctgatgtgcccactcatctatggactcagagctgtgtgctttgctcctgcatcttgttgaggtgctgttccagctttgcatttctgtcaagtagaggcgaatatataaacagtgtggttgaatacatttaatgccagccattggaaactagttttaggcaaccactctcaaaaacagctttagaatttatgcccagttttcttgcattgaaagataactgagtaataacctgtaactatttttaaatggcatgaaattaggaaacttttgtacattttatatacattttgagatgaacagaacaatgggctgagttataaaaagcgtgtattgaatttaagaagacagactagcacaaaacacagaattcgtgttaaccaaaggaggcattgatttcagttttaaggctactcagtgttgtgtgtccagggaaattcacagctcagtatgagaataccttggttagtgctcacccacaagcttccaggagccagctgggaggagacaataggaagagatgtcatctctgctctccctgtaaatgttagttgaactaagttatggatttgtggtctttcaaatacatgacgcctttagtatgccacactgaaatgaataagaagtcttctgaaactgggaacttcataacattgaaggcagaagattctgctaaggaaaaaagcaggcaggaaagaaaatgtctcatcctttcttgaaagcatttgcagaaaatatatcatttcattttattcccatctgttttcaaactcgtgatcttaaaaggcattctgatgataaatttagaattttcatctataaaatttagaactctaatccataaagttagaattgagctaatagagtggtatgacatggcactaaaaatataaatttttgttgtaagtcaggattggagtaagctggaaaagtatgtttaggcaaatcttggagaaaaccaaccataaacttacagctctaaaattcagaaagccctaaaatttcaaacactgtttgaaagaagaggtgggggccgggtgccgtggctcatgcctgtcatcccagcatttgggaggctgaggcaggcagatcacctgaggccaggagttcgagaccagcctggctggctagcatggtgagaccgtctctactaaaaatgcaaaaattaacagggcacggtggcatgcgcctgtagtcccagctactcgggaggctgaggcaggagaatcacttgaatccaggaggcgaaggttgcagtgagctgagattgtgctgctgcactccagcctgggagacagagcgagactctgtcttaaaaaaaaaaaaaggaggtgaatttttttttaagttttgtaacactgtcctactttatttattagaatctaaggctgttacaatcaagtcgttgcagggtttggatcagctgtaagttaggtatgcctaccaaacatccaaaggtagacgtggagacattttaatactacaaaactaggaaaatcagaactcatggccatttcctgccctcctccaacttgttaaaacatgtttattctaaagttcgaatggataaatttgagtataaaggttttgttataaaactgttctttagtgtaaggctgcattgtgggtttgggggaaatgtaaataattttctgtgtaaaacaaattcataggatctgatttgctcagagtattattcaagaatgtattaataaggcattgccccctgtttgcactcagggttaatatgtcaaatgaaatttaagaaggaaatggaagaattcaggtacattaattgcatattattttgggaaagatgagtcctatacgtggcaatttttcaatgtcatctgaagccagcattatcttccaaagaaatcgatcttttttttctaaaaaaaaaaaatgcttttgccttcccttcccttcccatccgccatatttcttcagcctttcttctcgatcacccgtgtattctttgaccagtaaatgaccacacctcaatgatggtaaaacagcatcatcagtaagctatcttatatgcctcatcctgtgagtttgagcttcaggaaacatgagtaaaagtatatgtaatgtatatagtcgtatatgtattctagcaagaaaaacatatttattttgacaaaggggaacactgactttctgaaggattcagaaagaaccttagtgaaaggttctcagtctctgagagtggaccctaattaacataaagaccattcatcagcgaataactactgagcaactctagtgtgccagcacaggccagacatactagtgagccaggcacatctggccttgggaaactcatcctacaggggaaggccagtttttttcccttcaattcctcaagtctgggtggtgacaaggtaggggctaggtactggactaccacaggtttttaggaactaaggtgtttctcataaacacaaaatgttgggtgaaactgggaacaactactcagaagctcatttatttgcttaaatggaaagtgtgggagccactaccctctcttttgatctgccaaggatttcctctcagagctgttgcacagacagagattgtacttggtaagataccaaacaagacagatatggatctaaatttctaatgtgttctatgggtttcaattctgaaaaaagaaaatgaataaagattttaataaat

SEQ ID NO: 132434 - DNA, 603 bp, Homo sapiens
  Payload ID: 5862
  Gene Symbol: FAM20B
  Gene Name: family with sequence similarity 20, member B
  ENST ID: ENST00000440702
  CDS Start-End: 189-603
ggccgcgccgagcgagcgctgggattggccgtcgggcaggcgctacgctaggacggaactgtggaaggtgcatcagtgaagaaatggaccaatgtgtataatcatggaatctccttgctaaccatcaccaccagctctccttaatacatgagcaagagtgggtcaggggagaaggaaaagaggtcaacatgaagctaaagcagcgagtcgtgctgttagcaattctccttgtcatttttatcttcaccaaagttttcctgattgacaacttagatacatcagctgccaaccgggaggaccagagggcctttcaccgaatgatgactggcttgcgggtggagctggcacccaagctggaccataccttgcagtctccctgggagattgcagcccagtgggtggttccccgggaagtgtaccctgaagagacaccagagctgggggcagtcatgcatgccatggccaccaagaaaatcattaaagctgatgtgggttataaagggacacagctgaaagccttactgatacttgaaggaggccagaaagttgttttcaaacctaagcggtatagccgagaccatgtggtggaaggggaaccgtatg

SEQ ID NO: 132435 - DNA, 2751 bp, Homo sapiens
  Payload ID: 5863
  Gene Symbol: FAM20C
  Gene Name: family with sequence similarity 20, member C
  Uniprot ID: Q8IXL6
  ENST ID: ENST00000313766
  CDS Start-End: 232-1986
gcggccgctccggagaggccgagcggggacgggcccgagatggcgcggggacccagcgctccggcggcgggcgccctgcacgcggcccgggcccggggacagccccggagctggtagccgcccggcaccgatggaccttgacccgcgaggcggcgccgcgctcgtgcccagctgcagctagaggggcgcgcgggcagaacgcgctccaggcccgggccggcccgcgcggccatgaagatgatgctggtgcgccggttccgcgtgctcatcctgatggtgttcctggtggcctgcgcgctgcacatcgccctggacctgctgcccaggctggagcgacgcggcgcgcggccctcgggggagcccggctgttcgtgcgcgcagcccgccgccgaggtggccgcgcccggctgggcccaggttcggggccgccccggggagcccccggccgcctcctccgccgccggcgacgcgggctggcccaacaagcacacgctccgcatcctgcaggacttcagctccgacccctcctccaacctctcgtcccactcgctggagaaactgccgcccgcggccgagccggccgagcgcgccttgcgggggcgggatcccggcgccctaagaccccacgaccccgcgcaccggccgctgctgcgagaccccggcccgcgtcggtccgagtcgccccccggccccggcggagacgcctccctcctggccaggctgttcgagcacccgctttaccgggtggcggttccgccgctcacggaggaggacgtcctgttcaatgtgaacagcgacaccaggctcagccccaaagcggcggagaacccggactggccgcatgcgggtgctgaaggtgcagaattcctctcccccggggaggcggccgtggactcctatcccaactggctcaagttccacattggtatcaaccggtacgagctgtactccagacacaacccggccatcgaggccctgctgcacgacctcagctcccagaggatcaccagcgtggccatgaagtcggggggcacgcagctgaagctcatcatgaccttccagaattacgggcaagcgctgttcaaacccatgaaacaaacgagggagcaggagacaccccctgactttttttatttctctgactacgagaggcacaatgcggagattgctgccttccacctggacaggatcctggacttccgccgggtccctcccgtggccggcaggatggtcaacatgaccaaggagatccgggacgtcacacgggacaagaagctctggaggaccttcttcatctctccagccaacaacatctgcttctacggcgagtgttcctactactgctccacggagcacgccctgtgcgggaagccagaccagatcgagggctcgctggcggccttcctgcccgacctgtccctggccaagaggaagacctggcggaacccttggcggcgttcctaccacaagcgcaagaaggccgagtgggaggtggaccctgactactgcgaggaggtgaagcagacaccgccctacgacagcagccaccgcatcctggacgtcatggacatgacgatcttcgacttcctcatgggaaacatggaccgtcaccactacgagacttttgagaagtttgggaatgaaacgttcatcatccacttagacaatggaagagggtttgggaagtattcgcacgacgagctctccatcctggtgccgctacagcagtgctgcaggatccggaagtccacctacctgcgtctgcagctcctggccaaggaggagtacaagctgagcctgctgatggccgagtctctgcggggggaccaggtggcacccgtgctgtaccagccgcacctggaggccctggaccggcggctccgcgtcgtgctaaaggccgtccgggactgcgtggagaggaacgggctccacagcgtggtggatgacgacctggacactgagcacagagccgcctcggcgaggtagtgtccgccggccgctgcgctgcccgggacggagacagaggcgccggacctcccagcaagcgcatgcgcccgtcgtgaattcagtgaattcagaggcaggacgggatcatccggagtcgggagctgctgccacaggaggcgaggctccccaggtctcataggacacattttgtcagtgtttgaccagaaaagcttgggaaggaagcgctgtctgtgctcacggacagaggcggccggcgccggaggcattccatcctttctgtagggaaaggagcctttatttactattttgtatttatatttgatgaataagtatataaacagagacgtgtacacagatgccaatcacctaccaaaccaaacacgaggaccgccctccctggttctgggggcccctcaaggccaagctcacccctcaagtgctctcacactcgggacctaattcaagtaaaaaccctttctccttcctggggcctcggctcctggagggctggagggtctcgtctgaggacgggaggaggctctcgctggacgtctggcctgtgcgctggtggacggatgcctacgtggttttggaggacccgatgaccaggcgtcctgcgagtccgcccgctggcctgcagcacccacctcggacttggctgtggacggttggtgcaagtgcatcctgcagggctggctgtgcgcagctgtgggctgacctttgcagagttttgtggaatagtttgcaatgtcataaaagtgcaataaaggtacagcagatgtg

SEQ ID NO: 132436 - DNA, 1015 bp, Homo sapiens
  Payload ID: 5863
  Gene Symbol: FAM20C
  Gene Name: family with sequence similarity 20, member C
  ENST ID: ENST00000630666
  CDS Start-End: 232-1015
gcggccgctccggagaggccgagcggggacgggcccgagatggcgcggggacccagcgctccggcggcgggcgccctgcacgcggcccgggcccggggacagccccggagctggtagccgcccggcaccgatggaccttgacccgcgaggcggcgccgcgctcgtgcccagctgcagctagaggggcgcgcgggcagaacgcgctccaggcccgggccggcccgcgcggccatgaagatgatgctggtgcgccggttccgcgtgctcatcctgatggtgttcctggtggcctgcgcgctgcacatcgccctggacctgctgcccaggctggagcgacgcggcgcgcggccctcgggggagcccggctgttcgtgcgcgcagcccgccgccgaggtggccgcgcccggctgggcccaggttcggggccgccccggggagcccccggccgcctcctccgccgccggcgacgcgggctggcccaacaagcacacgctccgcatcctgcaggacttcagctccgacccctcctccaacctctcgtcccactcgctggagaaactgccgcccgcggccgagccggccgagcgcgccttgcgggggcgggatcccggcgccctaagaccccacgaccccgcgcaccggccgctgctgcgagaccccggcccgcgtcggtccgagtcgccccccggccccggcggagacgcctccctcctggccaggctgttcgagcacccgctttaccgggtggcggttccgccgctcacggaggaggacgtcctgttcaatgtgaacagcgacaccaggctcagccccaaagcggcggagaacccggactggccgcatgcgggtgctgaaggtgcagaattcctctcccccggggaggcggccgtggactcctatcccaactggctcaagttccacattggtatcaaccggtacgagctgtactccagacacaacccggccatcgaggccctgctgcacgacctcagctcccagaggatcaccagcgtgg

SEQ ID NO: 132437 - DNA, 1015 bp, Homo sapiens; identical to SEQ ID NO: 132436
  Payload ID: 5863
  Gene Symbol: FAM20C
  Gene Name: family with sequence similarity 20, member C
  ENST ID: ENST00000633408
  CDS Start-End: 232-1015

SEQ ID NO: 132438 - DNA, 1943 bp, Homo sapiens
  Payload ID: 5864
  Gene Symbol: FAM200A
  Gene Name: family with sequence similarity 200, member A
  ENST ID: ENST00000408938
  CDS Start-End: 337-1943
ccggatgaggaactcggaggaggagctgggcccgcgcgtccatgattcgaaggctcgttttcgcagcttttccacgtctttttccggtcccactgccctccatgctaactcactgggcgtctctagccgttataccaacaatgactgcgaccagtgttgggaaagcgccccctgggcccctccctgacgccagcccatccttgagactccctgcaaggaggcggcccgacccagtgggatagcaaaacctgatctcataaaacctaggtcacaaaggacagccctgcaaaacagaccctatttggatcaagtgagccagttcctggaacctgaataatgactcctgaatcaagggatactacagatttgtctccagggggtacccaggagatggaaggcatcgtgatagtgaaggtggaggaggaagatgaagaagaccattttcaaaaggaaagaaacaaagtagagtcatcgccacaagttctcagtcgctctacaactatgaatgagagagccttattgtcatcgtatttagttgcatatagagtggcaaaagagaaaatggctcacacagcggctgaaaaaattatccttccagcatgtatggacatggtacggacaatttttgatgacaaatcagctgataaactaagaactatacctcttagtgataatacaatatctcgtcgaatctgtacgattgcaaaacatttggaagcaatgcttattacacggctgcagtccggtatagactttgcaatccaactcgatgagagcactgatattgcaagttgtcccacactcttggtttatgtcagatatgtgtggcaagatgattttgtagaggatctcttatgttgtttaaatttaaattcacatataactggattagatttatttactgaattagaaaactgccttcttggtcagtataaattaaactggaaacattgtaaaggaatttcaagtgatggaacagcaaatatgaccggaaaacacagcagacttactgaaaaattgttagaagcaacccacaacaatgctgtttggaatcactgttttattcatcgagaagctttggtatccaaagaaatttcaccaagtctgatggatgtattgaaaaatgcagtgaaaactgttaattttattaaaggaagctcactgaatagccgacttctcgaaatattttgttcagagattggagtgaaccacacccacttattgtttcatacagaagttcgttggctttctcaaggaaaagtattgagcagagtatatgaactcaggaacgagatttacatttttctcgttgaaaagcaatctcatttggcaaatatttttgaagacgacatttgggtaacaaaattggcatatttaagtgatatttttggcattcttaatgaattaagcctgaaaatgcaggggaaaaacaatgatatatttcagtatcttgaacatattctaggattccaaaagacgttattattgtggcaagcaagacttaaaagtaaccgccctagctactatatgtttccaacattattgcaacacatcgaagagaacattattaatgaagactgcttaaaagaaataaaattagagatattgttgcatctcacttctttgtctcaaacttttaattattactttccggaagagaaatttgaatcattaaaggaaaatatttggatgaaagatccatttgcttttcaaaacccagaatcaataattgagttaaacttggagcctgaagaagagaatgaattattgcagctcagttcatcattcacactaaagaattattataagatattaagtttatcagcattttggattaagattaaagatgactttccactgctaagtaggaagagtatattgctgttactaccattcacaactacatatttgtgtgaactaggattttcaatcttgacacggtt

SEQ ID NO: 132439 - DNA, 2480 bp, Homo sapiens
  Payload ID: 5864
  Gene Symbol: FAM200A
  Gene Name: family with sequence similarity 200, member A
  Uniprot ID: Q8TCP9
  ENST ID: ENST00000449309
  CDS Start-End: 381-2102
gtgacgcacttccggcttttgtgacgctttccctgggctctgaaggccagggggcttggatgtgagtctagtgctcctggtccccaaagtcacaaccccttctatcccagcatcccagacttctccgggcggggacagagttggacgtgcatggctgtgtcctgcaatcccctcgccacgaccgcccgggacggagtggaagcgggtccgtgcccccgttcctcgcgccagcctcggcggtggcaagcgctgtcccccagcagaggtgtccctggatacaggatagcaaaacctgatctcataaaacctaggtcacaaaggacagccctgcaaaacagaccctatttggatcaagtgagccagttcctggaacctgaataatgactcctgaatcaagggatactacagatttgtctccagggggtacccaggagatggaaggcatcgtgatagtgaaggtggaggaggaagatgaagaagaccattttcaaaaggaaagaaacaaagtagagtcatcgccacaagttctcagtcgctctacaactatgaatgagagagccttattgtcatcgtatttagttgcatatagagtggcaaaagagaaaatggctcacacagcggctgaaaaaattatccttccagcatgtatggacatggtacggacaatttttgatgacaaatcagctgataaactaagaactatacctcttagtgataatacaatatctcgtcgaatctgtacgattgcaaaacatttggaagcaatgcttattacacggctgcagtccggtatagactttgcaatccaactcgatgagagcactgatattgcaagttgtcccacactcttggtttatgtcagatatgtgtggcaagatgattttgtagaggatctcttatgttgtttaaatttaaattcacatataactggattagatttatttactgaattagaaaactgccttcttggtcagtataaattaaactggaaacattgtaaaggaatttcaagtgatggaacagcaaatatgaccggaaaacacagcagacttactgaaaaattgttagaagcaacccacaacaatgctgtttggaatcactgttttattcatcgagaagctttggtatccaaagaaatttcaccaagtctgatggatgtattgaaaaatgcagtgaaaactgttaattttattaaaggaagctcactgaatagccgacttctcgaaatattttgttcagagattggagtgaaccacacccacttattgtttcatacagaagttcgttggctttctcaaggaaaagtattgagcagagtatatgaactcaggaacgagatttacatttttctcgttgaaaagcaatctcatttggcaaatatttttgaagacgacatttgggtaacaaaattggcatatttaagtgatatttttggcattcttaatgaattaagcctgaaaatgcaggggaaaaacaatgatatatttcagtatcttgaacatattctaggattccaaaagacgttattattgtggcaagcaagacttaaaagtaaccgccctagctactatatgtttccaacattattgcaacacatcgaagagaacattattaatgaagactgcttaaaagaaataaaattagagatattgttgcatctcacttctttgtctcaaacttttaattattactttccggaagagaaatttgaatcattaaaggaaaatatttggatgaaagatccatttgcttttcaaaacccagaatcaataattgagttaaacttggagcctgaagaagagaatgaattattgcagctcagttcatcattcacactaaagaattattataagatattaagtttatcagcattttggattaagattaaagatgactttccactgctaagtaggaagagtatattgctgttactaccattcacaactacatatttgtgtgaactaggattttcaatcttgacacggttaaaaacaaagaagagaaataggctcaatagtgcaccagatatgcgggtagcattatcttcatgtgttcctgactggaaggaacttatgaacagacaagcacacccatcacattaaatacaaactttacaaaattctgtgtatagccaggtgtggtggcttacgcctgtaatcccagcagtgggagaccgaggtgggcagatcacttgagttcaagaccagcctggccaacatggtgaaaccccatctctactaaaaatagaaaccttagccaggcgtggtggcacatgcctgcagtcccagttacttgggtgcctgaggcaggagaatctcttaaaccaggaaggcagagattgcagtgagctgagataatcccactgcattccagcctgggcaacagcgtgagacttcatctcaaaaaaaaaaaattgtatttgtacttttaaagggattttgcagtatgttgtagttaaacgttaataaaattatatttgt

SEQ ID NO: 132440 - DNA, 2962 bp, Homo sapiens
  Payload ID: 5865
  Gene Symbol: FAM200B
  Gene Name: family with sequence similarity 200, member B
  Uniprot ID: P0CF97
  ENST ID: ENST00000422728
  CDS Start-End: 839-2812
ggagggaagtgtggggagagcagaggcgcagctctgctggagagacctgaggcttgcagcgctgggcccggccgggtcgctgcggctgggctggaggtcaaggatgcattccaggaaagttctataaaaatataccatcaactccaacctgatatttgacctagccatggaaaacctcattggctcctcactggatcagaccataaaaatgatccaggaatgaaaatctaagataaattcccaccacttcaagatgttcttatacaagtcaacagtctagcagatcagccagtctctttcatcatcaagcagacatactcaaggtaccaacacagcaaaggcacaaaatgtctctatatcagtatttttcatggtatatgtgagacccattagtgaggcatgaaatcaattctgtgagtcacaatgaacatttgtctaaaaaacaaaataaaatgtaaaataccaaagtgttttgcatgaatcctttgcctgaattgtgcacattgcaaggaatgctgaggtcaatttcaatatgcgagaggggtatttgatggaggagatatgatgaatagaatgtatattggctaagaaatggttttcagtcattgattcctgggtgtcttgcttgattttcataatagcacggttaatgttctatagtcaagttttatattacaattacttgcaactagttgtgaagtctgaaatattcgattcaattgcaaactttgagtgtagtttttgaaaagatgttatttagactgtatatttttttcttcttttttgagttagtgccaattataacattttaatcaaactggaacaaattgctattaaaatggatcatttctttattaaaagaaagaggaatagtgaagtgaaatatacagaagcatgttcaagttcatctgttgaatctggaattgtgaatagtgacaatattgagaaaaatactgactccaatctgcaaacttcaacttcatttgagccacatttcaaaaagaaaaaagtaagtgcaagacgttataatgaagattacttaaaatatggctttatcaaatgtgaaaaaccctttgaaaatgacagacctcagtgtgttatttgtaataatattcttgcgaatgaaagcttaaaaccttcgaaattaaaaaggcacttagaaactcagcatgctgaacttattgataagcctcttgaatattttcaaagaaagaaaaaagacataaagttatcaacacaatttcttagttgttctactgctgttagtgagaaagccttattatcatcatatttagttgcatatcgtgtggcaaaagagaaaatagctaacacagctgctgaaaaaattattcttccagcatgtttggatatggtgcgtacaatatttgatgataaatcagctgataaattaaaaactatacctaatgataacacagtatctcttcgaatttgtactattgcagaacatttagaaacaatgcttattactcgtttacagtctggtatagattttgcaatccagcttgatgaaagcactgatattggaagctgcacaacacttttagtttatgtcagatatgcgtggcaagatgattttttggaggattttttgtgttttttaaatttaacctcacacctaagtggattagatatttttacagaattagaaaggcgcatagttggccaatataaattaaactggaaaaactgtaaaggaattacaagtgatggcacagcaaccatgactggaaaacatagcagagtaattaaaaaattactagaagttactaataatggtgctgtgtggaatcattgttttatacatcgtgaaggtttagcatccagagaaattccacagaatctcatggaggtattgaaaaatgcagtgaaagttgttaattttattaaaggaagctcattgaatagccggcttcttgaaacattttgttcagagattggaactaatcatacccacttactatatcataccaaaattcgttggttgtctcaagggaaaatactaagcagggtttatgagctcaggaatgagattcacttttttctcattgaaaaaaaatctcatttggcaagtatttttgaagatgatacttgggtaacaaaattggcatatttaactgatatttttagcattcttaatgaactgagtttaaaactacaggggaaaaacagtgatgtattccaacatgttgaacgtatccagggatttcgaaagacattattgttatggcaagtaagacttaaaagtaatcgtcctagctattacatgtttccaagatttttgcagcatattgaagagaatattattaatgaaaacattttgaaagaaataaaattagagatattgttgcatctcacttctctgtctcaaacttttaaccatttctttccagaagaaaaatttgaaacattaagggaaaacagttgggtaaaagatccatttgcttttcgacaccctgaatcaataattgagctaaacttggtgcctgaagaagagaatgaattattgcagcttagttcttcatatacattgaagaatgattatgaaaccttaagtttatcagcattttggatgaaggtaaaggaagactttccattgttaagtagaaagagtgtcctgctattgctaccattcacaacaactagtttgtgtgaactagggttttccatcttaacgcagttaaaaacaaaggaaagaaatgggctgaattgtgcagcagttatgcgggtagcattatcttcctgtgttccagactggaatgaacttatgaacaggcaagcacacccatcatagtaaataaaaatcttacctagcttttgtctttgtatttcttattttgtagtatttttctatgttatatttaaatggtactataatactgtgatacttttgttatgttttaatttttgttatatttaataaaattattttatgttcattgaa

SEQ ID NO: 132441 - DNA, 1027 bp, Homo sapiens
  Payload ID: 5865
  Gene Symbol: FAM200B
  Gene Name: family with sequence similarity 200, member B
  ENST ID: ENST00000503617
  CDS Start-End: 955-1027
ttttcggctggaatggggaatttgtgaggtaggccggaagtggtgttgcggagggaagtgtggggagagcagaggcgcagctctgctggagagacctgaggcttgcagcgctgggcccggccgggtcgctgcggctgggctggaggtgaggcgaaagaagggcatcctctgatgggagtggaccggagtccgctaaagcgaagcattccagggtcaaggatgcattccaggaaagttctataaaaatataccatcaactccaacctgatatttgacctagccatggaaaacctcattggctcctcactggatcagaccataaaaatgatccaggaatgaaaatctaagataaattcccaccacttcaagatgttcttatacaagtcaacagtctagcagatcagccagtctctttcatcatcaagcagacatactcaaggtaccaacacagcaaaggcacaaaatgtctctatatcagtatttttcatggtatatgtgagacccattagtgaggcatgaaatcaattctgtgagtcacaatgaacatttgtctaaaaaacaaaataaaatgtaaaataccaaagtgttttgcatgaatcctttgcctgaattgtgcacattgcaaggaatgctgaggtcaatttcaatatgcgagaggggtatttgatggaggagatatgatgaatagaatgtatattggctaagaaatggttttcagtcattgattcctgggtgtcttgcttgattttcataatagcacggttaatgttctatagtcaagttttatattacaattacttgcaactagttgtgaagtctgaaatattcgattcaattgcaaactttgagtgtagtttttgaaaagatgttatttagactgtatatttttttcttcttttttgagttagtgccaattataacattttaatcaaactggaacaaattgctattaaaatggatcatttctttattaaaagaaagaggaatagtgaagtgaaatatacagaagcatgttcaagttcatctg

SEQ ID NO: 132442 - DNA, 4377 bp, Homo sapiens
  Payload ID: 5865
  Gene Symbol: FAM200B
  Gene Name: family with sequence similarity 200, member B
  Uniprot ID: P0CF97
  ENST ID: ENST00000622362
  CDS Start-End: 916-2889
acgcatgcgcagagggccgatccagttcttttcggctggaatggggaatttgtgaggtaggccggaagtggtgttgcggagggaagtgtggggagagcagaggcgcagctctgctggagagacctgaggcttgcagcgctgggcccggccgggtcgctgcggctgggctggaggtcaaggatgcattccaggaaagttctataaaaatataccatcaactccaacctgatatttgacctagccatggaaaacctcattggctcctcactggatcagaccataaaaatgatccaggaatgaaaatctaagataaattcccaccacttcaagatgttcttatacaagtcaacagtctagcagatcagccagtctctttcatcatcaagcagacatactcaaggtaccaacacagcaaaggcacaaaatgtctctatatcagtatttttcatggtatatgtgagacccattagtgaggcatgaaatcaattctgtgagtcacaatgaacatttgtctaaaaaacaaaataaaatgtaaaataccaaagtgttttgcatgaatcctttgcctgaattgtgcacattgcaaggaatgctgaggtcaatttcaatatgcgagaggggtatttgatggaggagatatgatgaatagaatgtatattggctaagaaatggttttcagtcattgattcctgggtgtcttgcttgattttcataatagcacggttaatgttctatagtcaagttttatattacaattacttgcaactagttgtgaagtctgaaatattcgattcaattgcaaactttgagtgtagtttttgaaaagatgttatttagactgtatatttttttcttcttttttgagttagtgccaattataacattttaatcaaactggaacaaattgctattaaaatggatcatttctttattaaaagaaagaggaatagtgaagtgaaatatacagaagcatgttcaagttcatctgttgaatctggaattgtgaatagtgacaatattgagaaaaatactgactccaatctgcaaacttcaacttcatttgagccacatttcaaaaagaaaaaagtaagtgcaagacgttataatgaagattacttaaaatatggctttatcaaatgtgaaaaaccctttgaaaatgacagacctcagtgtgttatttgtaataatattcttgcgaatgaaagcttaaaaccttcgaaattaaaaaggcacttagaaactcagcatgctgaacttattgataagcctcttgaatattttcaaagaaagaaaaaagacataaagttatcaacacaatttcttagttgttctactgctgttagtgagaaagccttattatcatcatatttagttgcatatcgtgtggcaaaagagaaaatagctaacacagctgctgaaaaaattattcttccagcatgtttggatatggtgcgtacaatatttgatgataaatcagctgataaattaaaaactatacctaatgataacacagtatctcttcgaatttgtactattgcagaacatttagaaacaatgcttattactcgtttacagtctggtatagattttgcaatccagcttgatgaaagcactgatattggaagctgcacaacacttttagtttatgtcagatatgcgtggcaagatgattttttggaggattttttgtgttttttaaatttaacctcacacctaagtggattagatatttttacagaattagaaaggcgcatagttggccaatataaattaaactggaaaaactgtaaaggaattacaagtgatggcacagcaaccatgactggaaaacatagcagagtaattaaaaaattactagaagttactaataatggtgctgtgtggaatcattgttttatacatcgtgaaggtttagcatccagagaaattccacagaatctcatggaggtattgaaaaatgcagtgaaagttgttaattttattaaaggaagctcattgaatagccggcttcttgaaacattttgttcagagattggaactaatcatacccacttactatatcataccaaaattcgttggttgtctcaagggaaaatactaagcagggtttatgagctcaggaatgagattcacttttttctcattgaaaaaaaatctcatttggcaagtatttttgaagatgatacttgggtaacaaaattggcatatttaactgatatttttagcattcttaatgaactgagtttaaaactacaggggaaaaacagtgatgtattccaacatgttgaacgtatccagggatttcgaaagacattattgttatggcaagtaagacttaaaagtaatcgtcctagctattacatgtttccaagatttttgcagcatattgaagagaatattattaatgaaaacattttgaaagaaataaaattagagatattgttgcatctcacttctctgtctcaaacttttaaccatttctttccagaagaaaaatttgaaacattaagggaaaacagttgggtaaaagatccatttgcttttcgacaccctgaatcaataattgagctaaacttggtgcctgaagaagagaatgaattattgcagcttagttcttcatatacattgaagaatgattatgaaaccttaagtttatcagcattttggatgaaggtaaaggaagactttccattgttaagtagaaagagtgtcctgctattgctaccattcacaacaactagtttgtgtgaactagggttttccatcttaacgcagttaaaaacaaaggaaagaaatgggctgaattgtgcagcagttatgcgggtagcattatcttcctgtgttccagactggaatgaacttatgaacaggcaagcacacccatcatagtaaataaaaatcttacctagcttttgtctttgtatttcttattttgtagtatttttctatgttatatttaaatggtactataatactgtgatacttttgttatgttttaatttttgttatatttaataaaattattttatgttcattgaacaaaaatttaatgaatttctgttagaggccaggaactattctagagacatttgggatacaaaagtgaacaaaacaggtaattccctagtagagtttatatcctggcaaggagaaattgacaataaacctaataaataaggtttataatatttagaagctattaagtgctatggaaagagtagtaagaaggaaggtcagggaagtactggggaaccaaaccatgaagggttctgtagaccattattgggcctctggcttttgtcagtggactagagaacagttgaagggtttaagcgaaggagagaaatgatctgagctaggttttaaaagacactctggtcactattttaaattcttagggtaagtctgaattaaatgttactttcccctcactgggcatggtggctcagacctgtaatccccgcactttggcaggccatggcagaaggctctgttgagcccaggagttcaagaccatcctgggcaacatagtgagaccttatttctactaaaaatattttaaaaataagtcaggtgtggtggtgcacacctatagtcccagctactcaggaggctgtggcaggagggtcgcttgacctcaggagtttgaagttgcagtcatctatgattgcaccactgcagtccagcctgagcaacagagtgaaaccctgtctcgagaaaattaaatgttacttccctaaaaaaaccttttctaaccaccctagggtaaatcctccattattcctttatttctttgttttccttgtagtatataatttgtaataattttgattactgattgtcattctgccaccctggagtatataatttttaattatctgattactgttattcttccatagtaggggaggtgatatccatttgcctgatacatagtatgtgttcaatacacatttgctaaagaataaatgaatcaataatacctaacatctctaatttgcagtcattcccaagagtaattattaaatatgtggcaaatttctttgcctttttacttttaaaaatctaattttgacataactgctgtaaccatccagaaacggcattgatgttgcttcacgttgctgatgcttaagcaatgtatattgtgtaatatacaatgtagtcttcaaactaatttcaacttctgcctttctgtgtactcccttatcccactgggtgatattatttggcatggtcattgtcattaaaatcatacaggatagtaattcctttccatctgctaccatgcctagccttatttaatttttcagattttctgttctattgaaggtaattgattttttctttttttttaatgcttgaaataaagtgttg

SEQ ID NO: 132443 - DNA, 975 bp, Homo sapiens
  Payload ID: 5866
  Gene Symbol: FAM204A
  Gene Name: family with sequence similarity 204, member A
  ENST ID: ENST00000369170
  CDS Start-End: 523-975
ccgccggttcgggctccggcatgatgagtctgggagggcctcttgtgggcagccgagggaggcggcatgggcggcctcatagctcctcggccgagcctcccggagcaggctagaaaagcccccggcccggggccgcggaagcgacggcggggccgccctcagccttcctcgaaaggggcgtcgcagcggcctccccagcctgttatgtggagggggttctccgtcccacccaggtcaaagtgagaggggattgaggaggctgtcgatagggaaaacaggctcacgtttacagttgctgtattccggaaaacagctccagttaatgggactgccagcaggctagacatccttcgccggaatgtgcagcgcttagttctgtgcccgggaggggcttctctctcttttgggattggagtgtggcattgccgccagaaagcctgcagaattccgggttgtgcagccaagcaggaacggtgtacctttctagacccatcctcttgcaatcttggaccctaagaaaagatgtggagtgggctgctacctcctggcctaaatgaaagtgacgctgagtcaaactcggaagatgaagctacgttggagaactctggacttaacttacaggaagataaagaggatgagagcatcagaaaaacagaaatcatagatttctcaacagatgaaccaaaaactgaaacagagtcaaatgtaaatgcctatgaagagtgtccttctggaattcccatagatatgtggaataaatttcaagaattgcataaaaaacattctgaacagaaaagcacaacctcaagattcagagggaaaagaagaaaacgctccagaaaagataaattgaagaatgaaaaagaattacatagtgaaccgtcctcaaatgaaacccagtggaaagagcttactcagtattttggagtcaatgatagatttgacccgcctgttaaaaggaaaaaagttgagaag

SEQ ID NO: 132444 - DNA, 872 bp, Homo sapiens
  Payload ID: 5866
  Gene Symbol: FAM204A
  Gene Name: family with sequence similarity 204, member A
  Uniprot ID: Q9H8W3
  ENST ID: ENST00000369172
  CDS Start-End: 60-761
gcgatgttgacggggtcctaagatggctgctgggcgaccacttcctgacagaagaaaagatgtggagtgggctgctacctcctggcctaaatgaaagtgacgctgagtcaaactcggaagatgaagctacgttggagaactctggacttaacttacaggaagataaagaggatgagagcatcagaaaaacagaaatcatagatttctcaacagatgaaccaaaaactgaaacagagtcaaatgtaaatgcctatgaagagtgtccttctggaattcccatagatatgtggaataaatttcaagaattgcataaaaaacattctgaacagaaaagcacaacctcaagattcagagggaaaagaagaaaacgctccagaaaagataaattgaagaatgaaaaagaattacatagtgaaccgtcctcaaatgaaacccagtggaaagagcttactcagtattttggagtcaatgatagatttgacccgcctgttaaaaggaaaaaagttgagaagtcaggccttgaaaagaggatagaccaggctgtggaggagtggaatattgagaaggctgaggaactcagcaaccagctagctactcgagagcttggtgtaaaaattgccaaagcagttgcctgccacaactttgtaaaagccaaaaaggaggttgaaaattcacaggctgcccgaaaaaagaagaaacttgcatgggggtttgaagcaaagaagagatgggaaaccaaaagcaacatgggatacatgtaacttgccagagtgcttcaagacatttgtagactcaaatgctcaatttactgagaatgttttcctgcctatgttaatatgtcagaaaattgatagcactaaaacaaaaataag

SEQ ID NO: 132445 - DNA, 13889 bp, Homo sapiens
  Payload ID: 5866
  Gene Symbol: FAM204A
  Gene Name: family with sequence similarity 204, member A
  Uniprot ID: Q9H8W3
  ENST ID: ENST00000369183
  CDS Start-End: 261-962
gcgatgttgacggggtcctaagatggctgctgggcgaccacttcctgacagctccagttaatgggactgccagcaggctagacatccttcgccggaatgtgcagcgcttagttctgtgcccgggaggggcttctctctcttttgggattggagtgtggcattgccgccagaaagcctgcagaattccgggttgtgcagccaagcaggaacggtgtacctttctagacccatcctcttgcaatcttggaccctaagaaaagatgtggagtgggctgctacctcctggcctaaatgaaagtgacgctgagtcaaactcggaagatgaagctacgttggagaactctggacttaacttacaggaagataaagaggatgagagcatcagaaaaacagaaatcatagatttctcaacagatgaaccaaaaactgaaacagagtcaaatgtaaatgcctatgaagagtgtccttctggaattcccatagatatgtggaataaatttcaagaattgcataaaaaacattctgaacagaaaagcacaacctcaagattcagagggaaaagaagaaaacgctccagaaaagataaattgaagaatgaaaaagaattacatagtgaaccgtcctcaaatgaaacccagtggaaagagcttactcagtattttggagtcaatgatagatttgacccgcctgttaaaaggaaaaaagttgagaagtcaggccttgaaaagaggatagaccaggctgtggaggagtggaatattgagaaggctgaggaactcagcaaccagctagctactcgagagcttggtgtaaaaattgccaaagcagttgcctgccacaactttgtaaaagccaaaaaggaggttgaaaattcacaggctgcccgaaaaaagaagaaacttgcatgggggtttgaagcaaagaagagatgggaaaccaaaagcaacatgggatacatgtaacttgccagagtgcttcaagacatttgtagactcaaatgctcaatttactgagaatgttttcctgcctatgttaatatgtcagaaaattgatagcactaaaacaaaaataagcataaaatttgggattttgattatcagctcttttcagtctttctttaaggactttgtcctattgaagtgaataaaatgaagcattctgttatttgtataagaaatgtaagaaaaaaaatatagaaagaagaggataggattttgtttatttgtatggatggacccttggtataaaatcacttttggcgctttccattcatttggtttagcacagccagtgagcttctcgtactttctttctttttttttttttttttgagacagagcctcgcttgctctgtcacccaggctagagtgcagtagcacgatcttggctcactgcaaccactgcttcctgggttcaagtgattctcatgcctcagcctcctgagtagctgggattatggacaaatgccaccacacccggctaattttttttttttttttgtatttttagtagagacagagttttgctgtgttggtcaggctggtcttgaactcctggcctcatatgattcacctgcctctgcctcccaaagttctgggagtacagacatgagctaccatgctgcccttgtattttcttatctgtacccagtgtaactacacgtttactggaactgtgtttttaagactgacagttgtttataatggattagtcgtaagtaccaaaaagtctcagttgatattatctttacaaatgacttgaccttaatgttataaaagtagttactgtttttttttaattggaggcagacttgatatttcagagttgcatagtaaaagcaatttgttaatttttgtgtactttcagataaactattacaataaagaaaggagcagaatgtagtatttggaagatgatttaaattcagcaacgcctaaaaatgtcttcctaagtatttttctcagccatgtcattctttaaattatgagatggttcttagaagagaaaatggtgtaattgtattaaacagacaattataactcaagataatataactttgaaccttctaagaactgatttgtttggttttcctcccattccccattcctccttaaaagattgaatgaattaatgagcagaaagagaggattggtaacatgggaaatcgttttcattagatgtacatttcctggttctgacaggaaaggggctccagaaaatcataaaacaagcaggtgaacaagaccaggtgtgtcggcacctccctgctcagtgcccagcggaggtaaagaaccactcagcatggtttttgtcagttcacctcttctgtcgttgtcagaggtttcctacctgtctgatataaactttctctgggttgataatataaattcagaaacatgtaaaatgaatcatgattatattactgttatttttagacttaaaatagtaacaaaattttatttatggtggcacatttaatggctttttttttctgtgttctggaataagagaatacctagctactatttaagcatccaaaaatcatatcttgctttcatttagttgagaaaagccagcatagagaaagcaaagttttagaatattatgtgtcatactaattcagtatccagaccaaatgttggaaagtcttattttatgatttaatatcccttgttccattttacagatatgatcatgtaaaacttacctacaatattcatttcaaactgctaaattaggtaaatacagacttttagtatagaaacctttcctctaaaaatccattatgggggaaatattcactatacaatccagtggttttgtctgaaatcctaaaaatgttatttttgagcaggcgagtggtatagatattctcacacttggggccccgatatgggcatttccctttgacttcagtctcatttttttttttttttctgtttctactccttagagcatttagtgacccctgcaggcatgttgcacttcccatactgaagccttgccagagtggcctcctgtagggtctgacttgggatcctgtccagccaaggaagcccttcttcagcctgctccagtgcccgcagttgccccctcagcatcccctcggggttctcatgtagatgggaacattttaactacgcggaaggcaggcatttcagcagaattaagtatagcgggggctcatctaataaaggaagccacttctcccaagtcgtcactcctttctgggcatgggttgtggaaagctctaaaacgttatgtgtagcagaagaaggggttggagggaagatttgtggggacaggttgtcttggattggccctgctgacatgtcatttgagagcagttttattttatcctttctaataggaattaggtattttactcctagaaacattattccttgagtacgcatgctgctcaaaggatgtagtcatttgtccactccattctagtcacagcaaaataaggattctttttggatcagtaataactttggttcctaaaacttcaatatgtgcatttactaccaccagaatgcctgagttagatcagtaatgtaaacgtcagttattgttaactgagattaatatgtttcaggccgttggtatggcattaatgtaactatgatttactatttaagtactttaggctaaaacatcttactaaagaacagtaattttgagctttacagcactggttctgagaaagggaagttggcagtgcattcttgtttgggagccctcaggatgtttctgattttcagcagaacattctatgtctttcaccgaaaggagagattgaatatataatcttaggtttgctataattagttctgatgacagagttaaatacctcagccaagactgtaaatcagtacgtaaacaggtttctgcaactgatcataaatctcaaactgcatattttaaacacttatttttttaggatgacagataagggagcagcaggctaaggataggaataaaatgttatctgaacttttaagtcacaacttagaactcacattaaaatcttctgattttctttataccttttgtctaaaatattatcttttagcttattaataactttaataagacaagtttgaatttaattcacaaaaaatgaagatataatttataaaatgtccaaatttttgttaagacattactttttaagaaatgtgtgtcttgctaaatataaaacatattgtatgaggttgttgtttaaacaaaatgagagttgtacattattttttaagagatgataaagtttgaggaggcaagccgatgttatgtcagatctcattttgaagttagtgaaacctagtctaatccagaaccaactgaatccaagttttccattttggcagaagttgcttttatttttagtatctggcagagcaacaaatgctttgcatgtcagttcaatattttttcctgccaactgtttattcattggcttaaaatttacactctactaaagtcttagctctgactttcatgaaacaaatagtaatatttggacaaaatatgtacatgaaaatctttttccagaaccaaatgtagactggtatttgtgacatcagtgccttctagcatggtgacgggtcgaaaaatactttgaaaagttgaaggctgtgtaaacccacggcagtgcatctcaagtgatttttattatgaggtaatcagagtatctaggttttcaaatttaaattagtgggtgactttatgctagaaagtagaatatgtgttagaataaatttatcaatatatattcttggcctttgtaggatactgagacaataaggtccatttttcatttttgaggttggggagctctgtagattttgataaaatgtgcagaactgcattctttaatctttattatttcatcctccctccacactgcttgctttaaaagaaaaaaatacctacacacattttctagtgttaactgctgtaatcagcatagacttcctgggaagggattcttgccttcagtaaaggacatgacagcatgtggccaatggagattgccacgaggaaacctggaaaggcattgaaccattttgtgctactgttaaaatgaggtgtgttgtctctttattatctcctactcaatagtgagtattctggaggtgtctgttccctttccggaatttcttcaaatacagagatgcttcagagtagcttcctgccacattggctttcatgatcttaatccctggaacacagctataggcttctgggagatagtttattaaatgccatgcagaatgctatgtttttagatgtgcatgtaaatcaagaattagctgaggaatatctttttattagtagtagtagtaactcatttttagattcaagtaaagtttgttttccaggtgagatgacatttttaagaaattgaatttaagtatgtgcttttatatccggaccaggtttctcaaggaagcagaatacaagggaatgaaaggggaagggagggtagtgcccaagagaaacctcggctcctaagtgctcccctgccaggtttcccccgtgcctgcccactggcaccatcctggcagctccagcccacaccccctcctggaccctgggctgcctctcgctgaatagctgcagggggcctgctatgtgacaggtatggaatgaggtaatccttttccacctctaatttctgaagggtgtgtctgtccagtttttacttgttcattgaatttaaagccttaggaaccaacagctacagtgcaagctgtaattattgatgtctgtttcatattcatctgtaagttctggcatttgatcaagaagtcaatatatcacttcatcttcaggctgaatgtgtctcagctataaaggttttattgtttgatggatagcatacaattatgactgcccacaataaaaagtgttttcatttgtaagatgggtgatactagaagtaattatgaatgtcacaaggaatagtgaaacaatgaagctttgcgtttctttgaatttctccctacataatgcccaaggaacatttcctgaatgcctactatatgtcagataaactaactcttgcagatgcaaggatgaataagcaaaatctaataggaaatatatgtaaaccatgttttgaacaactccattttcaggcgggctattagaaaatcagtgagtttttctttgctgaatacaaagacataatctacatataagaagtaatgtagacttaaaaattttagttacctgagtatatacttactgtacaggttgctgaatttcctagctaggcagtcagctacagtggcttatcagcttagtgactgatccatacttgctcacatcagagtgggtgggattgatgccctgactgtctcccctggagatgaggagcattggtggggtttgactcaggaatgaatgcaaatgtttgttctgcacattactcagtgattttaagcttaaagttttcttagactgcattaacgtgtcctttattttagcttgggtgggccacagtaccttcccatgttagggtaatgcttcctactactacaaatatgccccccaaaatataatgactcaagcacaatacaagcttatttcttgttcatgagacaaaggagaatgttgcttgctatcaacgagggctctgttccgggctgtcattcagagacccaggctgacagcgactcaccgccttctttccctagtaatcctggatgtcccctcgatgccagtcagctggaagggaaaagagcatggaagagcactggcgggaagttacgggcctggcctggaagtggaacacattagttctcactttgcactggctcagacttccttacttcatcacactaaccacaagggaagctggaaaatatagactgggaggaaagaaattttagtaaatagcttgcagtatctgccacattgcctcaatcacatacgatgtagtaactttacattttgctgatgttgagtagcacaaactactatttgtgatttgatggagtcatttttacttgggtgtgttgacagagctgagtcaaagtagctgttcatattaccgtgtagtgggtgtggtgtcacagtgtgatacctgctgaaagagcattgcatgctcagtcagtgaggcaaaggcagtgcttattatgccataaagggctgttgggactttaccaggtaggcgagtagaagcgagtgcatcctaggtagaaggaacggcgtggcacatttgaggtacagcaaggactttagcaggggccaggggagagaatgagaacagggaagtagagcagcagaaagagatggcgttgaaaagagctggccagaaccaactcacacacaactttgagagatgctggggagattggacttgtgcggggaagagttgggtgtctatggatggtgatgtgggatgaagaaggtagtcagagagcaggcttttaaagagtaatgttatattagtagtttagtaatatagagttagacatttagtatttagtaaagtaggtcatatttatacttgttgtgtcatggtacctgtggaatgccatggaaatgtcaaatggacacttctatgtagcaacctggaggtcagaagggagggaggttgcagaaataggtcgatgaaagaggtcttgaaaggtggcatgtcaacaggaacaaatgccgctgagctgtcaggcaagataatggtggagaggtggctgttggagttagcatcagatggcaccggtgatcttggccaaatcagacatccagaccagaattgcaatagatggtgcaattgcaatcttaggttggatttcctagaaacagtgcctcagatctcttgtggaggtgatttgtaaaagtatgcacttcaggaaacatttgtaagggagggagcaaagcccatgaggaaggggaatgcctgaaaggggtaaagccttggccttgtgctgggggaagagggctctgtgaactctgcttgtggcaaaggagctgttttttttctttttttctttttgagacggagtcttgctctgtcgccaggctagagtgcagtggtgtcatctcagctcacttcaacctctgcttcccaggttcaagcaattctcctgcctcagcctcccgagtaggtggaactacaggcatgcaccaccacgcccagctaatttttgtatttttagtagagacagggtttcactatgttggccaaggtggtctcaatctcttgaccttgtgatccgcccacctcagcctcccaaagtgctgggattacaggcatgagccaccgcgcccggctggagctggcttttaaacccggtatcagtctcagtcagtcagtcactgcaggccagcattttacatgggatgaaaggagggatggatggaaggggtggaggatacatacctggtccttccagttaaactatttaataaataatcatgactgagaatataagccttagaagtactgttattgttctgtaaattttttaaaaacactttgaggattcattgttatttatgctccttgccttggagggacatcttggttctacatatgtataaatgtctagcagattgaaaatctgaaattcttctttcattactcttcccatacagtgctcttgcactattcctctaagaaagccaaagacacattatacttgttttttagatgaggaaatcaaggtgctgggaagtttaagagaactctacagccattcatctagcataaaagggctgacgttagaacgcaggccaggcctttgcctcttccctaccccattccagtggttcttgaagtgggatccatgccctcctgcaagcagaatcacttgttaaaaatgtaaactccagggtccctctctgggggcagggcctgggattccacattttcaaaagctcctctgtaattagtgcatacaaagaagactcattgtcttggagcagcacccgcttcttacacggggagtctgggatgggaaagaggaaagcaagtcagtgcaacttgcacatgtcttatcacaaaccatagggaaggaggtgccttgtggtataaatactgagtttaatgccattaatataaacgctcatattcccaaacagactgcctgtactagtacattacttccattttccaaaaaaggaaaagaaaggttccgtgtcaaagaactcaattggaatcctcgcttggtacttgcttccttgccagcagtgctcaaaaagagaaaaagaaaatccaaagtccatgtacataaaagttccattcccgatggtggagggcttaattaaagtcctcagatgtttctgtgcaccttggaaaacatttttatgaaattcatatattaccagaagtggctccaacaattcttgcagttaaaaaccttgtaactcatgcagctccatcaggagcaagctgcctttttcaagatttgttttgctgcttcctttacctccgtagcctgtggcagtgacggctgctcaagggccttaactgccaggatggcactagaggattttccaaggttaaggtcagataacagaatctggaagaaatggatccctcttcctgcatttccttttctcattatttcaataaatgcattgaaggcttgtgatgtgtctggcactacagcaggcactgaggatgccacgctgaacaaagcggctggatcttcatggggctcatatcctagagggaaagacataataagcagactctgcagtgtcacacaacatcacctaggaaatatagagatgcaagtgctcaggcgccaggccagacgtgaattcaactgtggtagcaagaccttgtatcttctgatgggacgttgaagtgtgagaaccactggactctcatatggtgataaactttggagaaaaaggacggaggcaggtgtgttgctgatgccagcaaatgttagaatagtgaaactgctacaccctggactatgaagcaagccagatttgaatcccagctctgctacttacaagctgtgtaacctccggcaggctacttaatctctctgtaccttgggttctcctgagaaatggagataataatagtagctatcttatagagatgtgaggattaaaggaactaatgaatatgaaagtgctgagaatagattctcacatatagcaaacaatatacttgttgggagacaattctctggacaattcttgcatttctacacgtcttggaagcaaggcactaagtacccttttgttccaaactatctttgcaaggatgtttgtatataacatccttggaagattgagatagtgtctcactctagagcaaagaacagacatgcttactcccattacaaaagattcggtttcctaactcagagttcctgttcttgaatgaaagtcatgcagtatacaggtgtcttttggccctcttaactgtcatactgtaggaatcaatgcaaaaatgctgatggctatttctgttgtgagtaaatgtctgaactgagagtctagtgtcttctatcagcatttgtaaaactggccaactgacttgctaagttgcaagtagggtgaaatctcagacccttcgtagtccttgacaattctgtgaaagtgtgtaagtgtttgttagtactaatgttgttattactccacagtacgtgccaattttctggaagaaacaaaaatgtaattgatggccctagccttcaaagagttcccagttgagccaaggaggttaaatatgcgaagatgacgcaaaagacatacagcagcaggaaagcaaagctttggaatgaaacttgggtttgaatgtaggctgtggatgctcaccagctatggcaactctgagcctcaacaaatttctatttgtaaagtgctgttgttaataatgcttactgtgtgaggttgtgaacattaagatagtgcatggagagagcttagcacgggtctggcatgcagtaagcactcagttaccattactgatgttgctgtattgcatttgtgcttaggatacaagcagagcactttctctcccctccctgggtctttagggaagtaaggccccagtactgtacttcctttcaggtggaagctgctttccttggaaccaccaaaccccaactcagtatgtccctggattctgcccaaagaattccccagggctaagctcctataggtgggtggctaaaggactggcttcagagtcagacagctctcagtggatatatacttagagatttaatatgatatatactgctttgaagtttatgtggtttttgatgattttattaatgtgcataatagtcctagcatataatatgtgttcagccaatgttaatcagtgccctaggctacaccaccatgatctaatgggccattcaattttcatgactgtattcctaggatatttctcaatgactcatacatggtaggtgttcagtaaatatttgttgatttaattggcttgagtgaacaaaagaagtaatacgtcctttcatcttttctttcaagatatttctgcattaaatcatcctcagtatatttttttgaaagccaagttttcccaaagctcctcatttcctcatctccctctgtgccactggtttttcagttgctgggggctacagaccctctctctagaaagatggacatgtgaacataagcactgcattttgcacacaatttccgtggttcagaaaccacctgaacttttccttctagaggaccctgcttaaacacttccattctagggtgtccagcccattaagatggccaagaaatcacatcccactcatctcccccaaatcagcaagctgtcatggacggtcctcaatacagttgctactttgttcctctataatcaaggccacacaagacccacttccaatctacttgtgatttagggatagcaaaggattaaagcaattcaagtattttagattcctattgatagcagaattgtggttttcaagacgtgctaatggaaaaattgttagtaaaaataggttcatgcagtcttattgatcatgcttgtaattctgaagattccacttgtactttttgtaaccatatttctcttctcttccattctctagttgtgagaaaacccagttgtccaataattgtcaagctttcctcggccttagggaatgagcactcaagacctttctgggccaagtgtggtcgccgactcctgtaatcctagcactttgggaggccgaggagggagagctgcttgagcctaggagttcaagactagcctgagcaacagcaggacttcatcactacaaaaaataaaaaattagccatatgtggtggtacacccctgtagtcccccagctactcgggaggctaaggtgggaggattacttaaacccgagaggtcgaggctgcagtgagccgtgatcgcaccactgcagtccagcctgaccctgtctcaaaaaaaaaaaaaaaaaaaaaaccttctggaagcagaaaggaggaggttttccaaaaccaaatcatgtcaagtacctagcttgacctcaaaaaaaaatacagaagcagggttggtaattgattgacaggaagggcagctcaaagcaggaaatggagagtggtatgaaaacacttaagcagtactgcccaaaggaagaacctgaaaagttcagccatagattttctgagaagatgaaagtgtaggcattagcatactcaagaatcaggcagacagttttccccatttggaagctgaaaaaggaatgatctgctgcccaagacaagaaaatgatgtgggcccagagggaaccgtcactcacacgtacactgtccagggggccagagaaggattacagccgccattttggcttctctagagtgaagcagcaaaacaatgtctagtggttgctaggcaaccattagtccatcgctgcccttttccattaaacattatctgccttcttagattgttttatttttttaaacaggataggtaatgcaacagagaattaacggtgcaacctaacaatgaaaacgcatttgaggttcccgaatcagtgaaggctttgcaaaggttagatcactcttgggtggatgccgaagatagtgacagttgactgaaacctcttccccagacatttcatcactggtcctcatgtttcctagtgccaaaaataataatgtggacgtaacaataatctctgtacattgtaaaatgtctgtcctctgctacgacctgctccaagctagatcttgtcctgaagcaagtttctctatcggcaaagagtggatgtcagaggtggtaaaatggagttctagccctggtcagctttgcagatagctaagatcatggtatccaaagaacctgagcaaaagtacatggaaataacacctgtttatgcaaggaacgctttctgacacataaaaatgaagagtaactggtaggagagaataagcgtctttattcagatacacatcgcattcggattttaaacatacctaatgacttttacaacaagaggacactgaggtacccagaaagagggtggaaaatcaggatgaagggagttactgctagcctgtcatgtaccatgcacacaacctatctttttaaataccagtggatttcctgtctggctcagggggcctgtctaggaagagattcaaggaaagtagatgggttagttccagggactggggctcaaaaatttaaagccacacgtaacgttagctctctcactcccacacacatttaagataaaggagatggcagtagtgtgctgcccagaggatggaatacgcagataactaggtttctatactggttctactcactagtctgatcttgggtaattttttgggtcattgttctgtaagggagggcaataataactacttggtcagggctgttgtgacaattcagcaataaaacatggtcaattgca

SEQ ID NO: 132446 - DNA, 1000 bp, Homo sapiens
  Payload ID: 5866
  Gene Symbol: FAM204A
  Gene Name: family with sequence similarity 204, member A
  ENST ID: ENST00000470476
  CDS Start-End: 55-714
gttgacggggtcctaagatggctgctgggcgaccacttcctgacagaagaaaagatgtggagtgggctgctacctcctggcctaaatgaaagtgacgctgagtcaaactcggaagatgaagctacgttggagaactctggacttaacttacaggaagataaagaggatgagagcatcagaaaaacagaaatcatagatttctcaacagatgaaccaaaaactgaaacagagtcaaatgtaaatgcctatgaagagtgtccttctggaattcccatagatatgtggaataaatttcaagaattgcataaaaaacattctgaacagaaaagcacaacctcaagattcagagggaaaagaagaaaacgctccagaaaagataaattgaagaatgaaaaagaattacatagtgaaccgtcctcaaatgaaacccagtggaaagagcttactcagtattttggagtcaatgatagatttgacccgcctgttaaaaggaaaaaagttgagaagtcaggccttgaaaagaggatagaccaggctgtggaggagtggaatattgagaaggctgaggaactcagcaaccagctagctactcgagaggaaaatcatgggagtaatgttgtgtgtttctcagtgtcagcgatccagagactcgtgctgtctctttgtccctttcctgatggtgttacttcgattaactacttcagcttggtgtaaaaattgccaaagcagttgcctgccacaactttgtaaaagccaaaaaggaggttgaaaattcacaggctgcccgaaaaaagaagaaacttgcatgggggtttgaagcaaagaagagatgggaaaccaaaagcaacatgggatacatgtaacttgccagagtgcttcaagacatttgtagactcaaatgctcaatttactgagaatgttttcctgcctatgttaatatgtcagaaaattgatagcactaaaacaaaaataagcataaaatttgggattttgattatca

SEQ ID NO: 132447 - DNA, 4225 bp, Homo sapiens
  Payload ID: 5867
  Gene Symbol: FAM205A
  Gene Name: family with sequence similarity 205, member A
  Uniprot ID: Q6ZU69
  ENST ID: ENST00000378788
  CDS Start-End: 41-4048
atagagggatggttgatctcatgctaatgaagtttagaccatgttgagccctacttttgttctgtgggaagttggatatcccttatacatctatggctccatcttcatcgttattgtaattatctggcaagtgaaaaggagccaccatgaattgagttcagaacctaaaaggagctgctgccggtgtcaccaaaaagtcaggcaaagagctagagatgcagcatcaacagctaggagacgttcccgggaagaagctgagaagccacagaagctgctctccatcattaaaagccagggctggcttcctctggagagaagtgtgcggcgaatcctgtgtgcagatccctgctgccaaatctgcaattctgtggctctggagattcagcaattgctggtgggtgagaacaaccagatctccctgactttatcggggccattgcagggctcctcttgcctagagatgctgtctacgtctagtatgtctttagatcagagtctggagtttcattcctggcacaccagagagctttcactgtcatctgtaaccccaacactgtcacaattaacagatcagaaatctttaacccagtcagctgcccagtcaacgtatgcagatggcatacaagattactgggctgatcacctccagctagggcaggaatttcaagtgccagatgtgctccggggcccaaacaccatagcttcttcaaggattgagaagccaagggctccactgaaccaggaggagatgacgcagagcaaccccagccttgtccagggaaaccaaggccagcatcacttgaattcccaggtctccttgctgtccctgaacccagaaaccctgaaccggatgcatccaatggccttgcatatggtcctccctgcccacctgccatttctcagtcctgaagtgctgaggcttcttgaggtacatgttaaaaaatggatgcatttccagaggtgggggctcccaagacgtgtggaggagtccctgaggcagcttatgccaaacccaccattgtattaccaacctggaaatgaccagccagtttctttcaacctgaagaatactcctcaggtctctcttcatagatttgagaccatttccctccagacctggtgttcatgtgtggctggccagcccatccagaccttctgggtttctgaatggtccacaatgaacccagaacaaagacaccactgtcagcaaactccaaaccctatggctctagccttgccctctccagcccttaaagccctaagtggcccccatccacagtctgggggacaagataatgactcagggagtgatctccagcagaaatacagccagctattctgtgggctcccttctctgcacagtgagtccctggttgccactttcatgggatctcaaggcctccccaagattgaaaatgtgcccaagccccccttgaaggatccttttctcttcaatgagctctccttcccccaactgctccctaaaacttcaccccagtcagccccaccctcttccccactttccccaaactggatgtctccatctgaccatcaacgagctcagatcaatgtcccatttctgactctggctgagtatgaagccttggagtggcacctgctacagaggcaactccagcttcagtggggctggccagctgccctccagaggtctcagcacacccagtgcctcatgcagcatgagccctgtggcaaagctcagtctcctgagaccacgacagcttcccagacagggaagtccatctcagtgctcaccagggaactactcttcttcccggagcatgcccggaagctgctggaattccacatccagaaacagttgattcgccatcgctggggcctgcctcagaagatccagcagtccatccagttgctccttacctccactgatcagcagactgtgtccagcagcagcacagccctagccaacgtgagcatcccccagcctgtagccctagaggccaacggggcttgcgatgtgctgtcacccattgcggccccagtgtccatccccaggccacacttgttaactcaggtcaaggcaatactgcagagccacatcgactccaaatgtggacaaatccaccagggcaagatccccgcctgtgtacacaggtcctgggactgcagaatttctggggtcctggcagtggctccttttccctgcattccagaaagccagttcctggaactgcagacagcaagtgacccggacctgcatcacaaagttatgccctggatgccaacggcccttgatcagcagcaacaggctttaccaggtactgtcactgaacaccctaagctgctccgagtcttgtctgtggaagccattgagaaactggagacaactttacggcacaagcatctggccttcctgtcggggctgcctgctctgtattatgtggcgctccccagggccctggccccggcagtcactagccaatctgtcatcacagagatggagcctagtcccgtggaaatcccagcagagcctctgattcagatggtttcatttgaagaacagtgtataagtcttgggccatgccctcaaggcaacaatgagagttgtacagacgttgcaaaagagttccagcctgcagtgccagtaaaaggaacaatggagacgctgcctctagaaagccagacgcatcctactagcccccactcactccagacacatatcttgaccaaactaaacttccacctgagaaaaaaggtcctagagatacaatggggaattcccattagggcaaggaagtccagggaacaaactgttgcagcaccagagaacatatccacacagaagtctcttgaaagtctaaaccaccaaggggagacattgctccaggaactgcccatcccaccagacactcttcctgcccctaatccagaaggggttcaccttaaagaacagctggccaatgacttgaaggcagtgcagcagaaccaaaagcaatccaattccaaagctgtaccccagggttctgcccactcggtctccaagatctcacagcccagtggggacatgacagaggcccacatgccttgtgttcaggtagaggccaatgtgaacaaacccagcctggaggaaccctgtggccctgagcctcaaagccctagcaagagcaaggacccagcccatgtccccatgctagcaggaaacagagaggacccagaggaaaccaaagcagccagggaccacagagaaggggatgcggggtttgggcgctcctcaaccagagaagagagacgccctgctgaagaccagaggccagcagggatgcttccaaacaagacaccccgagggtcctggcgatggagccgtagctttcatcttgctgatccctgtcaacacagcccccagcatcaccctcagcttaagctcccacagctacctccacgagtccctggggagaaagagtctgagaaggacctgcaagacagtcaaaccaagctaactgtcatccttgaaccagcgacaattcctgagaatgcccagactgtgttgccccaggcttcacagggtcagcctttcctgagccaaccaactcaggctaagcctttgcagggccaaactttgcaaggccaagttttgcatgggctggtgatgccagtccatgctcaaaagaagcccagccttacagagtctagcttcagaaataaaattaaatgttttctgcagcatattaaccccaagacaaaaggcaaagggcatgaggactccatgttctcagccgctgcgaaggtggccaaaaccagaaaagaaaatgttgcaaagagcctggctccagccaagagccctgtggggagaagtaagacggagaagccgacagggtgctccaaggcccaatctcgtcctgctcagaagctggtgggcccagccttcttggatggtccccaatccctagacgataagctccggctacactccagacaacctggctctgcctcagccctgggctacccccgccactgccctcgtcactgtcctcgagaggcttgtgccaacaaaccagggcacccaacctagctcctgaccctcacctcagatagaaacattggtccgctcaaggagaacatgcagagccatgaaaaagagtttataggctccccaactgctgcagccctccagaggaccagtattgtcatttccataaatgtgcaggtgggacagatgccactagaaatacactctatatttctcagc

SEQ ID NO: 132448 - DNA, 468 bp, Homo sapiens
  Payload ID: 5868
  Gene Symbol: FAM205C
  Gene Name: family with sequence similarity 205, member C
  ENST ID: ENST00000603592
  CDS Start-End: 40-426
gaaagactagggagagggatggctagtgaggtttagatcatgttgagccctacctttgttttgtgggatgttggatatcccttatacacctatggatccatctgcattattgcattaattatttggcaagtgaaaaagagctgccaaaaattaagcttggtacctaacaggagctgttgccggtgtcaccgaagagtccaacaaaagtctggagatagaacatcaagagctaggagaacttcacaggaagaagccgagaagttgtggaagctgctgtttctcatgaaaagccagggctggcttcctcaggaaggaagtgtgcggcgaatcctgtgtgcagacccctgctgccaaatctgcaatgttatggctctggagattaagcaattgctgaagctccagaagttggcttggataacaagatgaagctgtttctgcactggattaaccctgaaatgaaagatcgaa

SEQ ID NO: 132449 - DNA, 983 bp, Homo sapiens
  Payload ID: 5868
  Gene Symbol: FAM205C
  Gene Name: family with sequence similarity 205, member C
  ENST ID: ENST00000340783
  CDS Start-End: 57-683
ttaggttctaagacagtgaaagactagggagagggatggctagtgaggtttagatcatgttgagccctacctttgttttgtgggatgttggatatcccttatacacctatggatccatctgcattattgcattaattatttggcaagtgaaaaagagctgccaaaaattaagcttggtacctaacaggagctgttgccggtgtcaccgaagagtccaacaaaagtctggagatagaacatcaagagctaggagaacttcacaggaagaagccgagaagttgtggaagctgctgtttctcatgaaaagccagggctggcttcctcaggaaggaagtgtgcggcgaatcctgtgtgcagacccctgctgccaaatctgcaatgttatggctctggagattaagcaattgctggcagctccagaagttggcttggataacaagatgaagctgtttctgcactggattaaccctgaaatgaaagatcgaaggcatgaggaatccattctcctttctaaggctgagacagtgacccaagacaggacaaaaaacattgagaagagtccaactgtcaccaaagatcatgtgtggggagctacaacacagaagacaacagaggaccctgaggctcagcctccttctactgaggaggaaggcctgatcttctgtgatgcccccagtgcctaaataatctgctctagcaacactcccttcagtccagccaatcctgggtcctgtgccactcctacaaatgctccaaactctgtcctcaaatgacttgtgccactcaaccaggaaatctatcccaggtctaactcacctcagcagaaggcactgttttatgcaagaatacccatcacaagaaaaaggagttcataggttcctgaacctctgcaatcccctgaaaaaggctttcattgccatttccattaacatgcaggtgaagcagggcattctccaaatatactttgtacctttaagcaaaga

SEQ ID NO: 132450 - DNA, 1017 bp, Homo sapiens
  Payload ID: 5868
  Gene Symbol: FAM205C
  Gene Name: family with sequence similarity 205, member C
  Uniprot ID: A6NFA0
  ENST ID: ENST00000603640
  CDS Start-End: 1-1017
atgttgagccctacctttgttttgtgggatgttggatatcccttatacacctatggatccatctgcattattgcattaattatttggcaagtgaaaaagagctgccaaaaattaagcttggtacctaacaggagctgttgccggtgtcaccgaagagtccaacaaaagtctggagatagaacatcaagagctaggagaacttcacaggaagaagccgagaagttgtggaagctgctgtttctcatgaaaagccagggctggcttcctcaggaaggaagtgtgcggcgaatcctgtgtgcagacccctgctgccaaatctgcaatgttatggctctggagattaagcaattgctggcaggtgagaacaaccagatctccctgacttcactggggccatcacagggctcctcttgcctagaggctttgtccacatctagtgtgtcttttaagcatagtcaggatctgggctccccgaaatccaaagagctttcactggcatctgtaactccaacactgtcacaattaatggatcagaaatctttaacccagtcagctgcccggtcagctggtgcagacagcgtccaagattcctgggctgatcactttcagcgaggacagagatctcaagtcccagctgtgtcccaggtcatgggatctctgtcttcaaactttgagaagcctggaattcctctgagccagcaggagaggacgaaaaacaactccaaatttgtcctggagaaccaagaagctccagaagttggcttggataacaagatgaagctgtttctgcactggattaaccctgaaatgaaagatcgaaggcatgaggaatccattctcctttctaaggctgagacagtgacccaagacaggacaaaaaacattgagaagagtccaactgtcaccaaagatcatgtgtggggagctacaacacagaagacaacagaggaccctgaggctcagcctccttctactgaggaggaaggcctgatcttctgtgatgcccccagtgcctaa

SEQ ID NO: 132451 - DNA, 2134 bp, Homo sapiens
  Payload ID: 5869
  Gene Symbol: FAM206A
  Gene Name: family with sequence similarity 206, member A
  Uniprot ID: Q9NX38
  ENST ID: ENST00000322940
  CDS Start-End: 307-852
cttacggcggccggccttctttgtaggcctggcaccgtagaggtagaggagctacattggccgcgtcccctgtccctctgccctcttgcccatctgcccaaacttttgtatttgatctctgttttgatgtcgaaccccaaagcactgtaattggggggggcgggggggggggtggaacctgcggacctgagagcagcgcgcgtgcgcacgacacgcgctgtgcgccggaagagcacgcccagtccgggctgcgcggaggaagcgctggggtcccggagggcgggggtggcggcgccggaggtcgccatggctaccgagcccgaagccgcggagccggtggtgccttcgctcgtggatcgatacttcactcgctggtacaaaccggatgtcaaaggaaaattttgtgaggaccactgtatactacagcactctaaccgaatatgtgtcatcacattggcagaatctcatccagttcttcaaagtggaaaaacaattaaaagcatttcctatcagatcagtaccaactgtagcagacttcagaacaaggtctctgggaaatttaagcggggggcacagtttctaacagagcttgcacctctctgtaagatttactgctcagatggtgaagaatatactgtgtctagttgtgttagaggacgtttgatggaagtgaatgaaaacatcctccataagccatctattcttcaagaaaagccatctactgaaggctacattgcagttgtgttacccaaatttgaagaaagtaaaagcataacagaagggttactgacacaaaaacaatatgaagaagtcatggtgaaacgcattaatgccacaacagctacgtcatgaggattgacatggaacaaaaagcaaagtgggattcttgttacctggcctaaaccatcagggtactaaaggagaagaaccagtatatgtaaagcatacctaacagccagccatatgcaggggaggcctagtgcttcacttagttttccctctctgtcttcataatgagccttggttcccatttgtctacagcctgccagatctggcctgcccatgtactcacactgttctcttgcatctctctaacaactggcatgcaaggcatgtttttctgattaaaaacaaacaaagctctttgaagaagatttagaaaatacagaagagttttaagtagccaagtaaaaataatttacccatcatcccataatccagaagtaaatacatttgacccttgagcaacataggtttgaactgcaagggtccacttatgcatggactattttcaactataaacgagtcaaaaatatatcattaaccaaacacgaaacccacttatagagcaggttcatatactcaggttccaaagggccaactgcaggacttgagttctcacgtatggatttgggtatatgtggaagttcctggaaccaatcccctatgtaaaccaagggataactactacattttaacctacttctgtttgaacatatggtatggttattgcttttgcctcgttttcctaacagtttgaagtttaaaaaaacctaacccacctttcttacccagtcttctataatgtgcctaccaaaaagcctagtcctagcccatctgcctcaactcctctcccttttaggttgtagggaagaggccggagtgtagagtatattatatcttctgtcccccttatgccaacaagatggccttcccctctgaaacaaagtaaaactgcaacactgtgacttcttaaatgagggatatgtgaaaaggctatgaaaaatacaaaggctttcctaggaaatgtgttataatgcagcgggaagctaattcttgaaatatgcacattatagttactcagtctcacatactctagttactggcaaagaagttactgagaatatgtcattcaaaggcataggggcctttgaatggaacaaatgctttcacatcatttaaagtaaaaaaaaacctccaacaactgtgaatttatagtttaagagtgatttacactgaatttcaaataaaaggactataaaacgtgttatttttctgtaagggctataacatacatgtcaatatcactgtttttaaataaaatatacttttatacagaagaaatcattcgatg

SEQ ID NO: 132452 - DNA, 499 bp, Homo sapiens
  Payload ID: 5869
  Gene Symbol: FAM206A
  Gene Name: family with sequence similarity 206, member A
  ENST ID: ENST00000374624
  CDS Start-End: 1-348
atggctaccgagcccgaagccgcggagccggtggtgccttcgctcgtggatcgatacttcactcgctggtacaaaccggatgtcaaaggaaaattttgtgaggaccactgtatactacagcactctaaccgaatatgtgtcatcacattggcagaatctcatccagttcttcaaagtggaaaaacaattaaaagcatttcctatcagatcagtaccaactgtagcagacttcagaacaaggtctctgggaaatttaagcggagaattatctatctagaaaaggtagaagacgtcatcaagaggaaaatgatgcctctaagcttgggactgcatcttccccactcttaatcctccttctataggaaggaatcttcacgagcacaggatccctcacttctgtctgctgcctcacctatcccatcccataaaaggaggtggatgctcatcttttcagtctttctggtgactttgcaaaaataaattgaacacattaaccctt

SEQ ID NO: 132453 - DNA, 389 bp, Homo sapiens
  Payload ID: 5869
  Gene Symbol: FAM206A
  Gene Name: family with sequence similarity 206, member A
  ENST ID: ENST00000445175
  CDS Start-End: 1-389
atacttcactcgctggtacaaaccggaatatgtgtcatcacattggcagaatctcatccagttcttcaaagtggaaaaacaattaaaagcatttcctatcagatcagtaccaactgtagcagacttcagaacaaggtctctgggaaatttaagcggggggcacagtttctaacagagcttgcacctctctgtaagatttactgctcagatggtgaagaatatactgtgtctagttgtgttagaggacgtttgatggaagtgaatgaaaacatcctccataagccatctattcttcaagaaaagccatctactgaaggctacattgcagttgtgttacccaaatttgaagaaagtaaaagcataacagaagggttactgacacaaaaaca

SEQ ID NO: 132454 - DNA, 927 bp, Homo sapiens
  Payload ID: 5870
  Gene Symbol: FAM207A
  Gene Name: family with sequence similarity 207, member A
  Uniprot ID: Q9NSI2
  ENST ID: ENST00000291634
  CDS Start-End: 49-741
ccagcttccgggaggcgctccgcacgtttgccgtgctccgccgggaagatggggaaagtgagggggttgcgcgcccgagtgcaccaggctgccgtgaggccgaaaggggaggccgcccccggccccgcgccccctgccccggaggcgacccctccgccggcctcggccgcggggaaggactgggcgttcatcaacaccaacatctttgccaggaccaagatagaccccagcgccttggtgcagaagctggagctggacgtgaggagtgtcacttccgtcaggagaggtgaggcaggctcgagtgcacggagcgtcccttccatcaggagaggtgcagaggccaagaccgttttgcccaagaaggagaaaatgaagctgaggcgtgagcaatggttgcagaaaatcgaagccataaaactggctgagcagaagcacagggaggagcggaggcggagggccacggtggtggtgggggacctgcaccctctcagggatgccctgcccgagctgctggggctcgaggctggcagccggcgccaagcccgcagcagggagagcaacaagccccggccctcagagctcagccggatgagcgcagcccagagacagcagcttctcgaggaagaaaggacccggtttcaggagctgctggccagtccggcctacagagccagccccctggtggccatcgggcagacgctggcccggcagatgcagctggaagatggcggccagctctgaccagggcagcgggcatgccacaactcctcaggacacatgtgggccaagtagagagcgccggcccctcaaggaccatggcctgagcctggtggacgcccttccctctggtcggttgtggggctcaataaatggctctgtgaacttcccctgcactgccagggccgttcccatgagctgcttccctga

SEQ ID NO: 132455 - DNA, 880 bp, Homo sapiens
  Payload ID: 5870
  Gene Symbol: FAM207A
  Gene Name: family with sequence similarity 207, member A
  Uniprot ID: Q9NSI2
  ENST ID: ENST00000397826
  CDS Start-End: 47-694
agcttccgggaggcgctccgcacgtttgccgtgctccgccgggaagatggggaaagtgagggggttgcgcgcccgagtgcaccaggctgccgtgaggccgaaaggggaggccgcccccggccccgcgccccctgccccggaggcgacccctccgccggcctcggccgcggggaaggactgggcgttcatcaacaccaacatctttgccaggaccaagatagaccccagcgccttggtgcagaagctggagctggacgtgaggagtgtcacttccgtcaggagaggtgcagaggccaagaccgttttgcccaagaaggagaaaatgaagctgaggcgtgagcaatggttgcagaaaatcgaagccataaaactggctgagcagaagcacagggaggagcggaggcggagggccacggtggtggtgggggacctgcaccctctcagggatgccctgcccgagctgctggggctcgaggctggcagccggcgccaagcccgcagcagggagagcaacaagccccggccctcagagctcagccggatgagcgcagcccagagacagcagcttctcgaggaagaaaggacccggtttcaggagctgctggccagtccggcctacagagccagccccctggtggccatcgggcagacgctggcccggcagatgcagctggaagatggcggccagctctgaccagggcagcgggcatgccacaactcctcaggacacatgtgggccaagtagagagcgccggcccctcaaggaccatggcctgagcctggtggacgcccttccctctggtcggttgtggggctcaataaatggctctgtgaacttcccctgcactgccagggccgttcccatgagctgcttccctga

SEQ ID NO: 132456 - DNA, 643 bp, Homo sapiens
  Payload ID: 5870
  Gene Symbol: FAM207A
  Gene Name: family with sequence similarity 207, member A
  ENST ID: ENST00000458015
  CDS Start-End: 34-643
cgctccgcacgtttgccgtgctccgccgggaagatggggaaagtgagggggttgcgcgcccgagtgcaccaggctgccgtgaggccgaaaggggaggccgcccccggccccgcgccccctgccccggaggcgacccctccgccggcctcggccgcggggaaggactgggcgttcatcaacaccaacatctttgccaggaccaagatagaccccagcgccttggtgcagaagctggagctggacgtgaggagtgtcacttccgtcaggagaggtgcagaggccaagaccgttttgcccaagaaggagaaaatgaagctgaggcgtgagcaatggttgcagaaaatcgaagccataaaactggctgagcagaagcacagggaggagcggaggcggagggccacggtggtggtgggggacctgcaccctctcagggatgccctgcccgagctgctggggctcgaggctggcagccggcgccaagcccgcagaaagcaggggctgtgtgcagtgtcaaacctggggtccatcctttcatggcccagctgcccaggctcgagggtggcaggtcacgcgctgcaggcccaggcagctccaggctggcatcccgcggcggaggcaccagagcactgggtccagaatagga

SEQ ID NO: 132457 - DNA, 5239 bp, Homo sapiens
  Payload ID: 5871
  Gene Symbol: FAM208A
  Gene Name: family with sequence similarity 208, member A
  Uniprot ID: Q9UK61
  ENST ID: ENST00000355628
  CDS Start-End: 232-5061
agaagaactgcccgagggaggagcggctccgaggaccgggcagcgcatttggggtgcccgctacagggccccccaagaggctgccaggtcgggagcgcagcctgaggccacggggggaagggggtgggtgggctgagagcagctcggcggcgagactggcccgccgccccttccccccacacccgtcgaccttgtgggcagaagcttcccagagctccttaggccggcgcgatggcgactgctgtggagacggaggcctgtcagccgacggatgcgagttgggaaagtggcggcggcggagacgacgagatgaagcaggcgcttccggagcttgagtcctcccaacaaaatggcggcggcggcggcctcaacatcgctgagcccagcggcggcgctgggcgtgaggagaacgcgggggccgaggccgcccagagcctcagccacgagcagcctcaggactcctctgaggcgggcgcggccgccctgcccagaggccccgaagagcccgaaaggcctgttaggaggagttttcagatccccaggaagagcagagaaaagaaagcacttttccagccattaactccaggctctcgagaatttgaagatgttgtaaatattctccattcttcttaccttgaaccaacctcagtaacaaattttaactacagacgtgcttgcttggtacacaatgagcttttggaaaaggagtttacagaaaagcgaagagaactgaagtttgatggtcgtttagataaggaactttcagaatcctatgcatttctgatggttgatcgataccaggttcaaaccatatgtgaaaaaggattacatgtgggtcagtccaaaataacaattcttggcagtccttccatgggtgtctatctttctaggtatgctgatttattacaagcgaatcctttggacacgggggcaatgggtgatgttgttatttttaaaataatgaagggtaaaataaagagtatatatgaccccatgggtgtaaaaagtttggaatctatgttaaataagagtgctttggaccccacaccaaagcatgaatgtcacgtgtcaaagaatgccaatcgaattacatcacttttggcttacagagcctatgagcttactcagtattatttttatgagtatggctttgatgagctaaggcgaagaccaagacacgtttgtccatatgcagttgtgtcttttacttacaaagatgatatacaaactccgaagtttgtaccttcatcaagatctaacagctttaatacagatagaaacatagataaatataactataccttgtggaaaggacagcttttaaataaaggaaaacttttgtgttatatttctctgaggtcagccactcgtgcttttttgcctatcaaactacctgagaaattagatgttgaaacagttatgagtattgatcatctgaaacagaaaatccctccagcactgttttataaggaaacatacttaggtccaaatgaagttttgaagaatggaatgtattgcagcctttatgaagttgtggaaaagacaagaattggaagtaacatggagagtttactgcaaaaactagacagagaaaaacttgttcttgttaaacctttgggagaccgaggatacctttttcttctctccccttatcagatggttcctccatatgaatatcagactgccaagtctcgagtcctacatgctttgtttctatttcaagaacctagaagcatagttacttcacaaaaaggttcaaccaatgcagcaccacaggagaggcatgagagcatgccagatgtattaaaaatagctcagtttttacaattttctttgattcagtgtcgaaaggaattcaaaaatataagcgccataaattttcattctgttgttgaaaagtatgtaagtgaattttttaagcgaggttttggttcaggtaaacgagagtttattatgtttccatatgattcacgattagatgataaaaaattcttatactcagctcccagaaataaatcccatattgatacttgtttgcatgcctatatttttcggcctgaagtgtatcagttacctatttgtaaattaaaagaactatttgaagaaaatagaaaacttcagcagtttagtccactttcagattatgaaggtcaagaagaagaaatgaatggtacaaaaatgaaatttggaaaacgaaataactcaagaggtgaagccattatatctggaaagcaaagatcatctcattctttggattatgataaggatagagtcaaagaattgattaatttaattcagtgtaggaaaaagagtgtgggtggggactcagacacagaagatatgagaagcaaaactgtcttgaagaggaagcttgaggatctacctgaaaatatgagaaagctcgccaaaaccagtaatttatctgaaaattgccatctgtatgaagagtctccacagcctattggctcacttggacatgatgctgacttgaggcggcagcagcaggatacctgtaactccggcattgctgacatccataggctgtttaattggttatcagaaacactagcaaatgcgcgccattctgatgcatctctgacagacacagtcaacaaagccttaggattgagcactgatgatgcctatgaagagctgaggcaaaaacatgagtatgagttgaactctaccccagataagaaagactatgagcagcctacttgtgcaaaagttgaaaatgcacagtttaagggtactcagagcttattactagaagttgatgcaacatctaagtattctgttgctatttctaccagcgaagtgggcactgaccataagctacatttgaaagaagatccaaatttaattagcgtgaataattttgaagattgcagtttgtgtcccagtgttcccattgaacatggatttcgtagacaacagtctaagtcaaataatgttgaagagactgaaatacattggaaactgattccaattacagacacactaaagggcaccactgaggatgacgtgttgacaggtcaggtggaggagcagtgtgtgccagcagcagaggcagagccgcctgcagtgagcgaaaccacagagaggacagtgttaggagagtacaatctcttttctaggaagatagaagagattttgaagcaaaagaatgtttcatatgtcagtacagtttccacacctatcttttcaacacaagagaagatgaaacggctttccgagttcatatattctaagacttccaaagctggtgtgcaggagtttgtagatggtttgcatgagaagctaaatactattattattaaagcatcagccaagggtgggaatttgccaccagtcagtcctaacgattctggtgctaagatagcatcgaatcctctggaaaggcatgtcataccagtttcctcaagtgacttcaacaataaacatctccttgagccactgtgtagtgatcctttgaaagataccaactctgatgagcagcattccacttcggctttaactgaagtagaaatgaaccagcctcaacatgccacagagttaatggtgacttctgatcatattgtacctggtgatatggcccgggaaccagtagaagaaacaacaaaatcccccagtgatgtaaacatttctgctcaaccagctctttcaaattttataagccagttagaacctgaagtatttaatagtttggttaaaatcatgaaagacgtccagaaaaatactgtgaaattttatattcatgaagaagaagagagtgtgctctgtaaagaaataaaggaatatcttatcaaattaggcaatacagaatgtcatcctgaacagtttttggaaagaagatcaaaattagataaactattgattattattcaaaatgaagacattgcaggtttcattcacaagatacctggcttggtgactttaaagaagctcccctgtgttagttttgctggtgttgatagcctggatgatgttaaaaatcatacatacaatgaattatttgtatctggaggttttatcgtatctgatgaatcaattctaaacccagaggttgtcacagttgagaaccttaaaaattttttgacattccttgaggaacttagtactccagaaggaaaatggcaatggaaagtccactgtaaatttcagaagaaactaaaggaactaggcagattgaatgctaaagctctaagtctgttgacgcttctgaatgtctatcagaagaaacatctggttgaaattttgtcataccacaattgtgattcacaaactcgaaatgctccagaattggattgccttatcagacttcaggctcagaacatacagcaacgacacatagtctttttaacagagaagaacatcaagatgctttccagttatacagataatggaatagtggttgcaactgctgaagacttcatgcaaaactttaaaaatcttgtgggctatcacaattcaatcacagaagaaaaccttccacagcttggtgctaatgagaatcttgagtcgcagtcagctcttttagaaaacgatgaaaaggatgaagaggatatgtctctggattcaggggatgaaatctcacatatagaagtatgcagcaattttcattcagaaatatgggagaaagagaccaaaggatcacgtggaacagatcaaaaaaagaatactcaaattgagttgcaatcgtctcctgatgtgcaaaacagtttattagaagataagacttaccttgattctgaagagagaacttctattgatatagtatgctctgaaggagagaacagcaattcaacagaacaagattcatatagtaactttcaggtttatcatagtcaattaaatatgtcccatcagtttagtcattttaatgttctcactcatcagacatttttggggacaccatatgccctttcatcaagtcagtctcaagaaaatgagaattacttcttatctgcttatactgaaagcttggatagagataaatctccacctcccttaagttgggggaaaagtgattcttccaggccatattcacaagagaaataactgtagtaactttttttttaagagattgttgtggactttgtttattaacaatttatatttcattctctaaacaaaaggttcttgttctttctcaaatgttttttcttttatttaaatcatgatggcctgtaacagttgaagcatctaaaaattgaaataaatatatatttttaacata

SEQ ID NO: 132458 - DNA, 7119 bp, Homo sapiens
  Payload ID: 5871
  Gene Symbol: FAM208A
  Gene Name: family with sequence similarity 208, member A
  Uniprot ID: Q9UK61
  ENST ID: ENST00000431842
  CDS Start-End: 926-4627
aatgactgttaatttctttgcctcctctttgattccatctcttgacctctatatcatttcaaaggagcattgagtgaacatccatccttgtaccttgaatattccatgaatgctcctgcttcagggcctctgcatttgctgttctctcactttccccagtaagctgcataattcattctacatttcttcacgtatttccttatgattgaggtttctctgttttttttttttacctctatactcttatgtctctttttatagcactgaaaaccatcatgatctgttatatatcattgttttctgtcttcctcattagatttatgtaggttggaactttgttctgtttatctctataatcctattacctagaactgtgcctggtaaataagagcttagtatgtatttactgaatgatgaattaatatatttatatattgaggctgtgtcttctaatgtcagcaaaataattgacaagagactttggtggacactgttctctcttggttaatatttttggaaaaaacaactcccttaaatttgggtaaatgtggtaatttgagcgaagtaagtacttctgttttctctaagtagacttggatttactagactttgtaatgagtaatttctttgttcttcctacctggaggaaggacttaactgtagtatgccattaaaaattgcacttatatcatcttacatgttaatttttatgattatactaatgagtaatgtttttcttttcttttaaaaaatttgtagatctaacagctttaatacagatagaaacatagataaatataactataccttgtggaaaggacagcttttaaataaaggaaaacttttgtgttatatttctctgaggtcagccactcgtgcttttttgcctatcaaactacctgagaaattagatgttgaaacagttatgagtattgatcatctgaaacagaaaatccctccagcactgttttataaggaaacatacttaggtccaaatgaagttttgaagaatggaatgtattgcagcctttatgaagttgtggaaaagacaagaattggaagtaacatggagagtttactgcaaaaactagacagagaaaaacttgttcttgttaaacctttgggagaccgaggatacctttttcttctctccccttatcagatggttcctccatatgaatatcagactgccaagtctcgagtcctacatgctttgtttctatttcaagaacctagaagcatagttacttcacaaaaaggttcaaccaatgcagcaccacaggagaggcatgagagcatgccagatgtattaaaaatagctcagtttttacaattttctttgattcagtgtcgaaaggaattcaaaaatataagcgccataaattttcattctgttgttgaaaagtatgtaagtgaattttttaagcgaggttttggttcaggtaaacgagagtttattatgtttccatatgattcacgattagatgataaaaaattcttatactcagctcccagaaataaatcccatattgatacttgtttgcatgcctatatttttcggcctgaagtgtatcagttacctatttgtaaattaaaagaactatttgaagaaaatagaaaacttcagcagtttagtccactttcagattatgaaggtcaagaagaagaaatgaatggtacaaaaatgaaatttggaaaacgaaataactcaagaggtgaagccattatatctggaaagcaaagatcatctcattctttggattatgataaggatagagtcaaagaattgattaatttaattcagtgtaggaaaaagagtgtgggtggggactcagacacagaagatatgagaagcaaaactgtcttgaagaggaagcttgaggatctacctgaaaatatgagaaagctcgccaaaaccagtaatttatctgaaaattgccatctgtatgaagagtctccacagcctattggctcacttggacatgatgctgacttgaggcggcagcagcaggatacctgtaactccggcattgctgacatccataggctgtttaattggttatcagaaacactagcaaatgcgcgccattctgatgcatctctgacagacacagtcaacaaagccttaggattgagcactgatgatgcctatgaagagctgaggcaaaaacatgagtatgagttgaactctaccccagataagaaagactatgagcagcctacttgtgcaaaagttgaaaatgcacagtttaagggtactcagagcttattactagaagttgatgcaacatctaagtattctgttgctatttctaccagcgaagtgggcactgaccataagctacatttgaaagaagatccaaatttaattagcgtgaataattttgaagattgcagtttgtgtcccagtgttcccattgaacatggatttcgtagacaacagtctaagtcaaataatgttgaagagactgaaatacattggaaactgattccaattacaggagggaatgcaagaagcccagaagaccagctggggaaacatggtgagaaacaaacaccagacacactaaagggcaccactgaggatgacgtgttgacaggtcaggtggaggagcagtgtgtgccagcagcagaggcagagccgcctgcagtgagcgaaaccacagagaggacagtgttaggagagtacaatctcttttctaggaagatagaagagattttgaagcaaaagaatgtttcatatgtcagtacagtttccacacctatcttttcaacacaagagaagatgaaacggctttccgagttcatatattctaagacttccaaagctggtgtgcaggagtttgtagatggtttgcatgagaagctaaatactattattattaaagcatcagccaagggtgggaatttgccaccagtcagtcctaacgattctggtgctaagatagcatcgaatcctctggaaaggcatgtcataccagtttcctcaagtgacttcaacaataaacatctccttgagccactgtgtagtgatcctttgaaagataccaactctgatgagcagcattccacttcggctttaactgaagtagaaatgaaccagcctcaacatgccacagagttaatggtgacttctgatcatattgtacctggtgatatggcccgggaaccagtagaagaaacaacaaaatcccccagtgatgtaaacatttctgctcaaccagctctttcaaattttataagccagttagaacctgaagtatttaatagtttggttaaaatcatgaaagacgtccagaaaaatactgtgaaattttatattcatgaagaagaagagagtgtgctctgtaaagaaataaaggaatatcttatcaaattaggcaatacagaatgtcatcctgaacagtttttggaaagaagatcaaaattagataaactattgattattattcaaaatgaagacattgcaggtttcattcacaagatacctggcttggtgactttaaagaagctcccctgtgttagttttgctggtgttgatagcctggatgatgttaaaaatcatacatacaatgaattatttgtatctggaggttttatcgtatctgatgaatcaattctaaacccagaggttgtcacagttgagaaccttaaaaattttttgacattccttgaggaacttagtactccagaaggaaaatggcaatggaaagtccactgtaaatttcagaagaaactaaaggaactaggcagattgaatgctaaagctctaagtctgttgacgcttctgaatgtctatcagaagaaacatctggttgaaattttgtcataccacaattgtgattcacaaactcgaaatgctccagaattggattgccttatcagacttcaggctcagaacatacagcaacgacacatagtctttttaacagagaagaacatcaagatgctttccagttatacagataatggaatagtggttgcaactgctgaagacttcatgcaaaactttaaaaatcttgtgggctatcacaattcaatcacagaagaaaaccttccacagcttggtgctaatgagaatcttgagtcgcagtcagctcttttagaaaacgatgaaaaggatgaagaggatatgtctctggattcaggggatgaaatctcacatatagaagtatgcagcaattttcattcagaaatatgggagaaagagaccaaaggatcacgtggaacagatcaaaaaaagaatactcaaattgagttgcaatcgtctcctgatgtgcaaaacagtttattagaagataagacttaccttgattctgaagagagaacttctattgatatagtatgctctgaaggagagaacagcaattcaacagaacaagattcatatagtaactttcaggtttatcatagtcaattaaatatgtcccatcagtttagtcattttaatgttctcactcatcagacatttttggggacaccatatgccctttcatcaagtcagtctcaagaaaatgagaattacttcttatctgcttatactgaaagcttggatagagataaatctccacctcccttaagttgggggaaaagtgattcttccaggccatattcacaagagaaataactgtagtaactttttttttaagagattgttgtggactttgtttattaacaatttatatttcattctctaaacaaaaggttcttgttctttctcaaatgttttttcttttatttaaatcatgatggcctgtaacagttgaagcatctaaaaattgaaataaatatatatttttaacatatattgtacttgaattatctcatgttggcacttctaagttttactttttgtatgttacctgtacttaggcttcaaattgaagcctgttttatgtgtaaaatcagatgcttgcaggaggacggtaaacagcaaaggctttacttctttttctctaatgtcacctgatataaagtacttttgttgaagtgaattattttgatgtaggcttttgtatactgtgtttacacaggtataagtcagtaatagcagtgttaatatttacaggattttggctcgatacctcaagatttatctaacagtgcagtttcatttagataataaactatgtacataggacacattttttatctctaggcttagtcatgtaaaaactgcctattgctaaaattctggtaactttttgagagtattggataattttcagtacctgcgcaatccttgatttaatgaaattaaattttttatttcaaaagataggcttctgtttatcaaaggcgttgaacaatttgatttttaaattagttttagcaaaatggaagtataatgggaatatatttttgaggtggtcttagtagtaattaccatttgttgaacacattaatgctatactagacagatacagtggagatagctttcaaacccgtatctattcctaactactgcctctaatactaattactaacttgttactaatgctaacttttaaaaatgtttttgaaaattgcaatttctacaaataaatgtcatagtgcaaataaatgtcaggatttagagaaggagcctaaactgaatttgtgttatttcagtaaaagttatggagttatgggtctagacgtgttaataagttagacagaactttggcactttagaacaaatgcatgagtggtatttcagttcctaagttacataaaaagtgtgaaagaacactgtgaggtcccagcaacgccagactatattaaggtaagtagaaagtgtttttatagggcttcaatacccaggtggtgacagagcagaagaaccggtttttttttttttttttttactactaagcttttacaaaagaagtatctgttttattgtatagaacaagtacagcattttactacatagtatacaagtttttaatgagcatttaaaaaaataagtaaatctaggctatttgaaaaatacagttgagccagtgagcacattttataatttggaagacacaaatcaaatgtgaaggatttgattttctacatttaaaatgaagaaccaaaactctcttcttgattttcagctaaaggcaggagactactttccaactccttttgcttctggagaaggccctgaaatcacattgatatatgtttgttagtaaaatgtgcacacctgacttgcaatgttgtgttaaactagaattatattcacttggaaaacatatcgcttaggataaaattttgtcattcaaaaattttttcagaaatgcttgtactagaccacctcatttggatatatagctatcacatttgtaagattctgtttttagcataaaaatcaatagggatgaaaattttcttagaactcaagactccataactatgggggtaaatgaagtcatcccttctcccccagtccacccccaagtgctcttagatactgaaggagtctcccttaacatacagtgttttttttttgttgttgttgttttgtttttttttggagatggagtctcgctctgtcgcccaagctggagtacagtggtgcaatctcactgcaagctctgcctcccaggttcacaccattctcctgcctcaacctcccgaatggctgggactacaggcacccaccaccacgcctggctaactaactaactaactttttgtatttttagtagagacagggtttcactgtgttagccaggatggtcttgatctcctgacctcatgatctgcctgcctcagcctcccaaagtgctgggattacaggcttgagccactgctcctggccaacatccagtattttatcttgactgtcctaaccttaccttagatgctaacagaagggtcctgctgaaataacactgggtgctatattgatgggtaaatgtgtacatcctattccttcctctttatctcacaatttttgtctccactaagcaagaagtaaactaacacttcgtcactctaaagaaataacttatgtaaaactcttagtaaccctgtttgtcttcaaatgagtaaatagaccaaagtggggggacaattttctagttctgtagagggaaaaacatctgagtcaacattttgaaatgcagagggtattggtacatgacg

SEQ ID NO: 132459 - DNA, 5600 bp, Homo sapiens
  Payload ID: 5871
  Gene Symbol: FAM208A
  Gene Name: family with sequence similarity 208, member A
  Uniprot ID: Q9UK61
  ENST ID: ENST00000493960
  CDS Start-End: 12-4550
aggccggcgcgatggcgactgctgtggagacggaggcctgtcagccgacggatgcgagttgggaaagtggcggcggcggagacgacgagatgaagcaggcgcttccggagcttgagtcctcccaacaaaatggcggcggcggcggcctcaacatcgctgagcccagcggcggcgctgggcgtgaggagaacgcgggggccgaggccgcccagagcctcagccacgagcagcctcaggactcctctgaggcgggcgcggccgccctgcccagaggccccgaagagcccgaaaggcctgttaggaggagttttcagatccccaggaagagcagagaaaagaaagcacttttccagccattaactccaggctctcgagaatttgaagatgttgtaaatattctccattcttcttaccttgaaccaacctcagtaacaaattttaactacagacgtgcttgcttggtacacaatgagcttttggaaaaggagtttacagaaaagcgaagagaactgaagtttgatggtcgtttagataaggaactttcagaatcctatgcatttctgatggttgatcgataccaggttcaaaccatatgtgaaaaaggattacatgtgggtcagtccaaaataacaattcttggcagtccttccatgggtgtctatctttctaggtatgctgatttattacaagcgaatcctttggacacgggggcaatgggtgatgttgttatttttaaaataatgaagggtaaaataaagagtatatatgaccccatgggtgtaaaaagtttggaatctatgttaaataagagtgctttggaccccacaccaaagcatgaatgtcacgtgtcaaagaatgccaatcgaattacatcacttttggcttacagagcctatgagcttactcagtattatttttatgagtatggctttgatgagctaaggcgaagaccaagacacgtttgtccatatgcagttgtgtcttttacttacaaagatgatatacaaactccgaagtttgtaccttcatcaagatctaacagctttaatacagatagaaacatagataaatataactataccttgtggaaaggacagcttttaaataaaggaaaacttttgtgttatatttctctgaggtcagccactcgtgcttttttgcctatcaaactacctgagaaattagatgttgaaacagttatgagtattgatcatctgaaacagaaaatccctccagcactgttttataaggaaacatacttaggtccaaatgaagttttgaagaatggaatgtattgcagcctttatgaagttgtggaaaagacaagaattggaagtaacatggagagtttactgcaaaaactagacagagaaaaacttgttcttgttaaacctttgggagaccgaggatacctttttcttctctccccttatcagatggttcctccatatgaatatcagactgccaagtctcgagtcctacatgctttgtttctatttcaagaacctagaagcatagttacttcacaaaaaggttcaaccaatgcagcaccacaggagaggcatgagagcatgccagatgtattaaaaatagctcagtttttacaattttctttgattcagtgtcgaaaggaattcaaaaatataagcgccataaattttcattctgttgttgaaaagtatgtaagtgaattttttaagcgaggttttggttcaggtaaacgagagtttattatgtttccatatgattcacgattagatgataaaaaattcttatactcagctcccagaaataaatcccatattgatacttgtttgcatgcctatatttttcggcctgaagtgtatcagttacctatttgtaaattaaaagaactatttgaagaaaatagaaaacttcagcagtttagtccactttcagattatgaaggtcaagaagaagaaatgaatggtacaaaaatgaaatttggaaaacgaaataactcaagaggtgaagccattatatctggaaagcaaagatcatctcattctttggattatgataaggatagagtcaaagaattgattaatttaattcagtgtaggaaaaagagtgtgggtggggactcagacacagaagatatgagaagcaaaactgtcttgaagaggaagcttgaggatctacctgaaaatatgagaaagctcgccaaaaccagtaatttatctgaaaattgccatctgtatgaagagtctccacagcctattggctcacttggacatgatgctgacttgaggcggcagcagcaggatacctgtaactccggcattgctgacatccataggctgtttaattggttatcagaaacactagcaaatgcgcgccattctgatgcatctctgacagacacagtcaacaaagccttaggattgagcactgatgatgcctatgaagagctgaggcaaaaacatgagtatgagttgaactctaccccagataagaaagactatgagcagcctacttgtgcaaaagttgaaaatgcacagtttaagggtactcagagcttattactagaagttgatgcaacatctaagtattctgttgctatttctaccagcgaagtgggcactgaccataagctacatttgaaagaagatccaaatttaattagcgtgaataattttgaagattgcagtttgtgtcccagtgttcccattgaacatggatttcgtagacaacagtctaagtcaaataatgttgaagagactgaaatacattggaaactgattccaattacaggagggaatgcaagaagcccagaagaccagctggggaaacatggtgagaaacaaacaccaggtatgaaatcaccagaagaacaactggtgtgtgtgccaccacaggaggcctttcctaacgacccccgggtaataaatagacagagaagttctgattaccagtttccatcctctccatttacagacacactaaagggcaccactgaggatgacgtgttgacaggtcaggtggaggagcagtgtgtgccagcagcagaggcagagccgcctgcagtgagcgaaaccacagagaggacagtgttaggagagtacaatctcttttctaggaagatagaagagattttgaagcaaaagaatgtttcatatgtcagtacagtttccacacctatcttttcaacacaagagaagatgaaacggctttccgagttcatatattctaagacttccaaagctggtgtgcaggagtttgtagatggtttgcatgagaagctaaatactattattattaaagcatcagccaagggtgggaatttgccaccagtcagtcctaacgattctggtgctaagatagcatcgaatcctctggaaaggcatgtcataccagtttcctcaagtgacttcaacaataaacatctccttgagccactgtgtagtgatcctttgaaagataccaactctgatgagcagcattccacttcggctttaactgaagtagaaatgaaccagcctcaacatgccacagagttaatggtgacttctgatcatattgtacctggtgatatggcccgggaaccagtagaagaaacaacaaaatcccccagtgatgtaaacatttctgctcaaccagctctttcaaattttataagccagttagaacctgaagtatttaatagtttggttaaaatcatgaaagacgtccagaaaaatactgtgaaattttatattcatgaagaagaagagagtgtgctctgtaaagaaataaaggaatatcttatcaaattaggcaatacagaatgtcatcctgaacagtttttggaaagaagatcaaaattagataaactattgattattattcaaaatgaagacattgcaggtttcattcacaagatacctggcttggtgactttaaagaagctcccctgtgttagttttgctggtgttgatagcctggatgatgttaaaaatcatacatacaatgaattatttgtatctggaggttttatcgtatctgatgaatcaattctaaacccagaggttgtcacagttgagaaccttaaaaattttttgacattccttgaggaacttagtactccagaaggaaaatggcaatggaaagtccactgtaaatttcagaagaaactaaaggaactaggcagattgaatgctaaagctctaagtctgttgacgcttctgaatgtctatcagaagaaacatctggttgaaattttgtcataccacaattgtgattcacaaactcgaaatgctccagaattggattgccttatcagacttcaggctcagaacatacagcaacgacacatagtctttttaacagagaagaacatcaagatgctttccagttatacagataatggaatagtggttgcaactgctgaagacttcatgcaaaactttaaaaatcttgtgggctatcacaattcaatcacagaagaaaaccttccacagcttggtgctaatgagaatcttgagtcgcagtcagatgctgttttgacattaacccctttggagctgggagttgggatttcccaacattaaacgtgaacacatttcgcagaagcttttagcatcggattatctggacattcacatctagtgtgagtgttgtgactaagtgaacttgtggcagaagaccaagctttaagggattgtggacttgcagaccctgacgcgttatattgtgtgagtagtgtataattttaaaacttaaacaaactgtgtatttcaatagaggaggactttttgttttttaaatgtagctcttttagaaaacgatgaaaaggatgaagaggatatgtctctggattcaggggatgaaatctcacatatagaagtatgcagcaattttcattcagaaatatgggagaaagagaccaaaggatcacgtggaacagatcaaaaaaagaatactcaaattgagttgcaatcgtctcctgatgtgcaaaacagtttattagaagataagacttaccttgattctgaagagagaacttctattgatatagtatgctctgaaggagagaacagcaattcaacagaacaagattcatatagtaactttcaggtttatcatagtcaattaaatatgtcccatcagtttagtcattttaatgttctcactcatcagacatttttggggacaccatatgccctttcatcaagtcagtctcaagaaaatgagaattacttcttatctgcttatactgaaagcttggatagagataaatctccacctcccttaagttgggggaaaagtgattcttccaggccatattcacaagagaaataactgtagtaactttttttttaagagattgttgtggactttgtttattaacaatttatatttcattctctaaacaaaaggttcttgttctttctcaaatgttttttcttttatttaaatcatgatggcctgtaacagttgaagcatctaaaaattgaaataaatatatatttttaacatatattgtacttgaattatctcatgttggcacttctaagttttactttttgtatgttacctgtacttaggcttcaaattgaagcctgttttatgtgtaaaatcagatgcttgcaggaggacgg

SEQ ID NO: 132460 - DNA, 3441 bp, Homo sapiens
  Payload ID: 5871
  Gene Symbol: FAM208A
  Gene Name: family with sequence similarity 208, member A
  ENST ID: ENST00000614531
  CDS Start-End: 159-3266
cagatgtattaaaaatagctcagtttttacaattttctttgattcagtgtcgaaaggaattcaaaaatataagcgccataaattttcattctgttgttgaaaagtatgtaagtgaattttttaagcgaggttttggttcaggtaaacgagagtttattatgtttccatatgattcacgattagatgataaaaaattcttatactcagctcccagaaataaatcccatattgatacttgtttgcatgcctatatttttcggcctgaagtgtatcagttacctatttgtaaattaaaagaactatttgaagaaaatagaaaacttcagcagtttagtccactttcagattatgaaggtcaagaagaagaaatgaatggtacaaaaatgaaatttggaaaacgaaataactcaagaggtgaagccattatatctggaaagcaaagatcatctcattctttggattatgataaggatagagtcaaagaattgattaatttaattcagtgtaggaaaaagagtgtgggtggggactcagacacagaagatatgagaagcaaaactgtcttgaagaggaagcttgaggatctacctgaaaatatgagaaagctcgccaaaaccagtaatttatctgaaaattgccatctgtatgaagagtctccacagcctattggctcacttggacatgatgctgacttgaggcggcagcagcaggatacctgtaactccggcattgctgacatccataggctgtttaattggttatcagaaacactagcaaatgcgcgccattctgatgcatctctgacagacacagtcaacaaagccttaggattgagcactgatgatgcctatgaagagctgaggcaaaaacatgagtatgagttgaactctaccccagataagaaagactatgagcagcctacttgtgcaaaagttgaaaatgcacagtttaagggtactcagagcttattactagaagttgatgcaacatctaagtattctgttgctatttctaccagcgaagtgggcactgaccataagctacatttgaaagaagatccaaatttaattagcgtgaataattttgaagattgcagtttgtgtcccagtgttcccattgaacatggatttcgtagacaacagtctaagtcaaataatgttgaagagactgaaatacattggaaactgattccaattacagacacactaaagggcaccactgaggatgacgtgttgacaggtcaggtggaggagcagtgtgtgccagcagcagaggcagagccgcctgcagtgagcgaaaccacagagaggacagtgttaggagagtacaatctcttttctaggaagatagaagagattttgaagcaaaagaatgtttcatatgtcagtacagtttccacacctatcttttcaacacaagagaagatgaaacggctttccgagttcatatattctaagacttccaaagctggtgtgcaggagtttgtagatggtttgcatgagaagctaaatactattattattaaagcatcagccaagggtgggaatttgccaccagtcagtcctaacgattctggtgctaagatagcatcgaatcctctggaaaggcatgtcataccagtttcctcaagtgacttcaacaataaacatctccttgagccactgtgtagtgatcctttgaaagataccaactctgatgagcagcattccacttcggctttaactgaagtagaaatgaaccagcctcaacatgccacagagttaatggtgacttctgatcatattgtacctggtgatatggcccgggaaccagtagaagaaacaacaaaatcccccagtgatgtaaacatttctgctcaaccagctctttcaaattttataagccagttagaacctgaagtatttaatagtttggttaaaatcatgaaagacgtccagaaaaatactgtgaaattttatattcatgaagaagaagagagtgtgctctgtaaagaaataaaggaatatcttatcaaattaggcaatacagaatgtcatcctgaacagtttttggaaagaagatcaaaattagataaactattgattattattcaaaatgaagacattgcaggtttcattcacaagatacctggcttggtgactttaaagaagctcccctgtgttagttttgctggtgttgatagcctggatgatgttaaaaatcatacatacaatgaattatttgtatctggaggttttatcgtatctgatgaatcaattctaaacccagaggttgtcacagttgagaaccttaaaaattttttgacattccttgaggaacttagtactccagaaggaaaatggcaatggaaagtccactgtaaatttcagaagaaactaaaggaactaggcagattgaatgctaaagctctaagtctgttgacgcttctgaatgtctatcagaagaaacatctggttgaaattttgtcataccacaattgtgattcacaaactcgaaatgctccagaattggattgccttatcagacttcaggctcagaacatacagcaacgacacatagtctttttaacagagaagaacatcaagatgctttccagttatacagataatggaatagtggttgcaactgctgaagacttcatgcaaaactttaaaaatcttgtgggctatcacaattcaatcacagaagaaaaccttccacagcttggtgctaatgagaatcttgagtcgcagtcagctcttttagaaaacgatgaaaaggatgaagaggatatgtctctggattcaggggatgaaatctcacatatagaagtatgcagcaattttcattcagaaatatgggagaaagagaccaaaggatcacgtggaacagatcaaaaaaagaatactcaaattgagttgcaatcgtctcctgatgtgcaaaacagtttattagaagataagacttaccttgattctgaagagagaacttctattgatatagtatgctctgaaggagagaacagcaattcaacagaacaagattcatatagtaactttcaggtttatcatagtcaattaaatatgtcccatcagtttagtcattttaatgttctcactcatcagacatttttggggacaccatatgccctttcatcaagtcagtctcaagaaaatgagaattacttcttatctgcttatactgaaagcttggatagagataaatctccacctcccttaagttgggggaaaagtgattcttccaggccatattcacaagagaaataactgtagtaactttttttttaagagattgttgtggactttgtttattaacaatttatatttcattctctaaacaaaaggttcttgttctttctcaaatgttttttcttttatttaaatcatgatggcctgtaacagttgaagcatctaaaaattgaaataaatatatatttttaac

SEQ ID NO: 132461 - DNA, 8626 bp, Homo sapiens
  Payload ID: 5872
  Gene Symbol: FAM208B
  Gene Name: family with sequence similarity 208, member B
  Uniprot ID: Q5VWN6
  ENST ID: ENST00000328090
  CDS Start-End: 626-7918
gcttccggttgctagcgccggtcagagagaaagtcggcatgttctcgcaggctgccgggcgtcccggggttgcctcttgcccgtgaccctgacgggagacagagcgcgggcggccgcggcgtccctgtcagcgcccgcggcgaggaccccggggctggggcggacggcgtgcccctgaggggggtccccgcgggagcgcggagccggcgactggtgcttcccacgtgcgccggtgtcgcgagggcccgggaggacgcagagcacggccgggagaagcatgggaaggaggccgagccgggatctcaggtcctcgggggcggcggccacgccaaggacggtacaaaactttttaccaacaaaaaaaagcaagtagttatactcaggaagaacttcaagacacttacgggtttcttctgtttgatactgaaaagcaggtgtatacatttccaaatactccgactgtcttcattcaagaccatggtatcatgggaaatctggttatgttgtaatttttaatataattaagtattacttttacgaactttcaggcaacaccgttattgaacgacccagacagatctgtccttatgtaattgtagcttttcgatacagggaatctaaaactatggcaccaccagctcataaaagcatacttgaacgcagtgaaaatgttctcatgtctccatggaaagggaaattaattgttcaagaccgtatgctatgtgatatagctctttggtccacttacggtgcaatgattccaacacagctaccgcaggaactagattttaaatatgtaatgaaagtgtcttccttgaaaaaaagactaccagaggctgccttcagaaaacagaattacttggaggagaaagtctgttttcaagatttgtgcttcaatttgtatgaggtagaactgtcaaacagacaaggggaaaatatagataaattaacagaatgtattaaaaacaagcaattggcaatcatcaaatgcttagaagatcgagggtttttcattttacttacatcatcagccttactatcagaaccagattttggaggcaagcagatgggtctgcatgggttacatttatttcgttcacccctgtcaacaggggtgaaagatttgaaagttgaagatgacatctcaatgaaggtgatacctattttatctacccttaattgtgccctgctagaaacaaagaaatcacttcctgaagaaagaatccatccaaacacattagtaaagcgtcatttccaagaattgtacaaggcggacagaagcccttcattgagtgttgctcctcaggatagaatgaaagaccctacattcttggggaaactgcccagtggttttgacttgattcctccagctgaaaagtgcccttcagagtctttaactcagttgaactcttatttttcagaccctagtgcttacattttggaagtgtctactgctttggacttgctagcagagcatcctcagtctccttgtgtttcagacggaatttgtgatgctggattttccttagttatgactccagatcctgaatttcttgtctcagaggcagaagtgagaaaagaaactgaaacaaaaaaggattctgaagaaatgttgaaagcaaagaagagagtttttccattgagtccagcgtcaaatctgagagtgcagcctaagaggaaggccagcatgccccacatggtgcagagtaaaaaggtgaacttgtgccgcccctttcccaaaagaactgcttccagagcagacaacagctcggactctccaacaactcttaagttagttaaaggacagtttcctcagaaaagaaaaagaggtgcggaagtgctgactgcacagtttgtacagaaaaccaaattggataggaaaaaccaagaagctcctatttctaaagatgttccagtgccaacaaatgctaaaagggcaaggaaacaagagaaatctccagtcaaaactgttccaagggctaagccacctgtgaagaaatctccacaaaaacagagagtaaatatagtaaaaggcaatgagaaccccagaaacagaaagcagctacaacctgtcaaaggagaaactgcttcaaagcttcaatcagaaatttcaagaggttgtcaagaagatgggattagcataaatagtgttcaaccagaaaataccacagcggctcacaatgatcttcctgaaaactccatcgtcaactatgactcccaggccctaaatatgttagccgatctagcattaagctctgctacttcttccacaccagtatctgaggctagaaatcttcactgttcctctgaattgccacaaaatgatgttttgctctctaaagaaaattctttgcgaggtacatctgaccatgaatatcatagaggagttaaaactcaaaaaggtgaattactacctaacccatcttctgataggaagagtaattctggatcagacttaacagttagccaagatgaagaaagcttggttccttgtagtcaggcccctgctaaagcccagtcagcacttactgaggaaatgctagaatcttcagatgcaagccaaagctcttctgtttctgtggaacattcatatgccctgctccttacagaacattcaaagaaacatctacaggagagagagatactaagccctctgtttcccaggaatgggacaaaaagccctgaagcagcaaccccagtggggaaagtcatgccatttcggcatcagcccggccttttgcttcagcaaaagcctcctgacgaccccgtggtgaagcccaaggatcgaccaccgtctgcccgtgtgaaaaaatcttcttgctctcgtatagtgcttagctgtgatgactccgttaagatcactttcaaatgtgaaacagaatatgcattcagtttagacagcaaatataccaacaacccactggagaaaactgtagtaagagcattacatgggccctggaatactgatttgcctgataatgtggaagaagtgaagcttttacttcatatgtgggtagctctgttttacagcaatcagaacaaaatcatacgatcttcccgaaaggttgtagaacacagcaacccagcaaaatatgtgtctataaatagcacgttagaatcttgtgagctccgtgaaattgaggagtcccttggtttggaaaaatgttctgcagactctctgttggagactaacgaaatttccagggctcatgctgctgaagtatccttccgtgatcctaactgcttgcttcctttcattaaaacaccacttacccaaggcttggaactctgtgtacaaaatgaacagaaaaaaacttttgcaagagagtgtgatccagacacccaagaagaccagaatttcatctgttcttacaataatgaggtaactggggaagaagctaaacaagaatcattggagacttctaatcttgtgctttcgggtattggaagtacacaaactaatggaccttctgttcctagtgaagaagaaattgttcagccactggatagcacaagagtggcttcttacagtggcactgttactcaagccacattcaccaggacttacgatgggcctggcagtcagccagtgatatgtcagagctctgtgtacggcacccttgaaaacaaagtggatattcttgatgcagcagtgcaaacaaaaacaggtactttacaggaccttatccaacatggcagccccataaacaatgaatgtcacccttccttggaaagaaaggatgataatatggggtgtgcagtgattaacccggaaccaattactctcacctttgaaaaaaatgcacatgtaccaatacagacagaaggtgtaaatactgctgatgaacgtacaacctttaagaaggagttgattaagcaagtatcacctgctgcaagccttagacatcctgtatccacctcggaaaatgcacgaacacaaggcctgagggacattccctctctagtagttgcaggacagaagggcactaagtacctttgtgcctcgtcagtaggtggagagacacttgataaagcagtgtgttcattacagaaggagacgccccttccagtctctctaccatctgataaaacaatggtcatggaggcactatcattagctaaaagttctagtcatctatcacccagtgaagaagtgagatgcactcaggatttcctttcacagactcagagtctcctcggcctatcttcagaagggcttctagaactgacacaggttgaagtggactcatcatcagcctctaccaccttgggaaggcagtgttcacttaactgcatttcgtcaggatgccacacatcaggtgactctttagaactaaggaagaatcacaagaatggtccaaacactgaaaatatgaatttggaagcgtttgattcagtatttatcaaacaaacaagcctgtctgtgagtagagaggtcagcctagagttatcagaggaagattctgacattgacttagctctaacaatatcaccacctacaagtcccagagaagaaatgccagctggtgaaatagagcaatttgaggaggccccattctcaaatttagaacttcaggatgtagctgaggaaataggtgaaccggaagaggtggctctcacagaaagcagagaagtgagttctgctgacaatgtgtcagtatatccctcagtgtcagaagaaccagtagaaaataaggagagaaagggggataatttacaaccagttactttaatactttctaaagaaaattgcacccttgagattgcagaggaaattaatgtgacctctgattttccctttgattctgtaattgaagaagtatcaccagcgtctagtcctgaacctccagtaccagttaaagagacacgaccatatcaggctgtgactccatgcattttaaaacttcatggtacacagtgtgagaagagcaaccaaatctcccaatgtgagtcagaagacttaggcataacagaaaaagaaaatgtttttgttggtcctacccatccagtggggcaagataactttacccaggtacaacaaatgcaggtctctgccgaaatgcctctaatattaactgatcatccaggaagaacaggtagaccaacccttcctggtaaagtaactgaggaaattgtctcaagtgagcatgatgagggtttatctttctcaggaaaggtgcagtgctatggtagggagttaaaccagcctgcctcagctgccaaatgcacaggtgacttcagtccttctcctgaaaaactggtaaaatcaggaaatccattgcagccagttagtatagagaatagaaatttggacttaaaacatcttgtcttggagtccagtgaacctccatttggtcctagaaatgttattgaaaataagtctttgtctgacacattggtttccacaactgcaccaagtggtatagtgaatgtgtcagtaaaacagcagactagccctaaaagcagtcagaaccatctctttcccggtgatttgaaaacagatgaaggcatttatctgcaggtgaagtccttgacagctgcctcggttgatggagcttattctacacagggatgcatgtgctcagtggtccccacgctttgttcttcctcagacaatgctacattaacccattatgtaagaccaataaatgcagagccagtgtttcaagcacaggaaataccagcaggcagaatggccagtttgcttaagaatggtgagcctgaagctgagttacataaagaaaccacaggtccaggcactgctggccctcagtccaacaccacatcttctctaaaaggtgaacgcaaagccatccacacgctgcaagatgtgtcaacatgtgaaacaaaggagctattgaatgtcggggtttcctccctttgtgctggtccctaccaaaatacagcagacaccaaggaaaacctcagtaaagagcctttggcctcctttgtttcagaatcctttgatacttctgtttgtggaatagccacagagcacgtagaaattgagaacagtggggaggggctcagggctgaggctggttctgaaaccctaggcagagatggagaggtcggtgtgaattccgacatgcactatgaactctctggagattctgatctagacctgcttggtgattgtagaaatcccagactggatttggaggattcttatactttaagaggtagttacaccaggaaaaaagatgttcccacagatggctatgagtcgtcgttgaacttccacaacaacaaccaagaggactggggctgctctagctgggttccaggcatggagacgagcctccctcccgggcactggactgctgcggtaaagaaagaagagaagtgtgtgccgccttacgtccaaatccgagatctccacgggatcctcaggacttacgccaacttctctataacaaaagaactcaaagataccatgagaacttcacacggcctgaggaggcacccgagtttcagtgcaaactgtggcctgcccagctcctggacaagcacttggcaggtggcagacgacctcacccagaacactttagacctggagtatctgcgttttgcacataaactaaaacagaccataaagaatggggattctcagcattctgcctcctctgccaatgtctttccaaaggagtcaccaacccagatctccattggtgctttcccttcgacaaaaatctctgaggccccatttctgcatcctgcacctaggagcagaagcccccttctggtaacagttgtggagtcagatcccagaccacaggggcagcccaggagaggctacacagccagcagtctggacagctcttcctcttggagagagagatgtagtcataatagagatcttagaaattctcaaagaaatcacactgtttcattccacctcaacaaactgaaatacaacagtactgtgaaggaatctcggaatgatatttcacttattctcaatgagtatgctgaattcaacaaggtgatgaagaatagcaaccaattcattttccaagacaaagagctaaatgatgtttctggagaagccactgctcaagagatgtatctgcctttcccaggacggtcagcctcctatgaagacataatcatagacgtgtgcaccaatttgcacgtcaaactaagaagtgttgtgaaagaggcttgtaaaagtaccttcctgttctaccttgtcgaaacagaagacaaatcattctttgtaagaacaaagaaccttctgaggaaaggaggccatacagaaattgaacctcagcacttctgtcaagctttccacagagagaatgatacactaatcatcatcatcagaaatgaagatatatcatcacatttgcatcagattccttctttgctgaagctgaagcatttccccagtgtcatctttgctggagtagacagccctggagatgttcttgatcacacctaccaagaactgtttcgtgcaggaggctttgtgatatcagatgacaagatactagaagctgtaacattagttcaactgaaggaaattatcaaaatcctggaaaaactaaatggaaatggaagatggaagtggttgcttcactacagggaaaataaaaagctaaaagaagatgaaagagtggattcaactgcacataagaagaacataatgttgaagtcatttcagagtgcaaatatcattgaattgcttcattatcaccagtgtgactctcgatcatcaacaaaagcagaaattctgaaatgtttgctaaacctgcaaattcagcatattgatgccaggtttgctgtcctcctaacagacaagcctactatccccagagaagtctttgaaaatagtggaatccttgttacagatgtaaataactttatagaaaacatagaaaaaatagcagctccatttaggagtagctattggtgactcaactacagcctgcctggatatggatgatgccaataaaaaattagtattttccctttggaaaacttgtgaacatgtgaatacacatgtgaacagtcttacatttgaaaaaccaatgttctacaacttggaaagttttcattttttatattttgctgaaatatgtcacagtggcattgcagttgtctgttagctttgggttgcagtgctagatattgttttaaattattttcattttaaacaagatgccttctaagctattgagcttattaaaaataattttacatgtttacttagttggagcaaaaataagtctattttaacaaatagctttgtttttgcatgctaatgtcagaaaggcatacgatgcacattatgctctgttttaaaggttttaccacccttgtaaaaactataatcttaaatggttttatttgctgttacacaaacaacactacataaaacattttttcctaaatggtacaaatttataaactatcatttttcacttacggtatttgtaaatactacactacaaaaatcagctttctgagaaagaaataatcatttatttatgatattgaaaatttctacagtaaacactcaaaaccaagcaaaaaacatttgtaagatacacggtatctatttggagcaacggtttttgtaactaatgtgtttcattttttaaataaagacaactaaaaataa

SEQ ID NO: 132462 - DNA, 738 bp, Homo sapiens
  Payload ID: 5872
  Gene Symbol: FAM208B
  Gene Name: family with sequence similarity 208, member B
  ENST ID: ENST00000380270
  CDS Start-End: 1-738
attgagtgttgctcctcaggatagaatgaaagaccctacattcttggggaaactgcccagtggttttgacttgattcctccagctgaaaagtgcccttcagagtctttaactcagttgaactcttatttttcagaccctagtgcttacattttggaagtgtctactgctttggacttgctagcagagcatcctcagtctccttgtgtttcagacggaatttgtgatgctggattttccttagttatgactccagatcctgaatttcttgtctcagaggcagaagtgagaaaagaaactgaaacaaaaaaggattctgaagaaatgttgaaagcaaagaagagagtttttccattgagtccagcgtcaaatctgagagtgcagcctaagaggaaggccagcatgccccacatggtgcagagtaaaaaggtgaacttgtgccgcccctttcccaaaagaactgcttccagagcagacaacagctcggactctccaacaactcttaagttagttaaaggacagtttcctcagaaaagaaaaagagtcaaaggagaaactgcttcaaagcttcaatcagaaatttcaagaggttgtcaagaagatgggattagcataaatagtgttcaaccagaaaataccacagcggctcacaatgatcttcctgaaaactccatcgtcaactatgactcccaggccctaaatatgttagccgatctagcattaagctctgctacttcttc

SEQ ID NO: 132463 - DNA, 522 bp, Homo sapiens
  Payload ID: 5872
  Gene Symbol: FAM208B
  Gene Name: family with sequence similarity 208, member B
  ENST ID: ENST00000496681
  CDS Start-End: 497-522
cggccgcggcgtccctgtcagcgcccgcggcgaggaccccggggctggggcggacggcgtgcccctgaggggggtccccgcgggagcgcggagccggcgactggtgcttcccacgtgcgccggtgtcgcgagggcccgggaggacgcagagcacggccgggagaagcatgggaaggaggccgagccgggatctcaggtcctcgggggcggcggccacgccaaggacggtacaaaactttttaccaacaaaaaaaagcaagtagttatactcaggaagaacttcaagacacttacgggtttcttctgtttgatactgaaaagcaggcaaaattggtatgtcagtgtggactccgtgttggcagcagtgctgttaccactctgggtgatccagccaaagtattacttttacgaactttcaggcaacaccgttattgaacgacccagacagatctgtccttatgtaattgtagcttttcgatacagggaatctaaaactatggcaccaccagctcataaaagcat

SEQ ID NO: 132464 - DNA, 911 bp, Homo sapiens
  Payload ID: 5873
  Gene Symbol: FAM209A
  Gene Name: family with sequence similarity 209, member A
  Uniprot ID: Q5JX71
  ENST ID: ENST00000371328
  CDS Start-End: 324-839
aaatgaaaaacaaaaacatgatggcctctcccagcaaagctccagggttggaaagagtcccctggcagggaattggcaccccgtcgtgcccatcctctctctctgactgcctgctggaaatgcccccatctccctttgagtcctcctcccgggcaacccctgtgacctgtaacctctgtcctgaaatcatcacaatggccagagtggcctcagctcagggcctctgtgacatcaccaagggcctggcaccaggtgcccagtctcccagttgcgagggcaagcaaacccgtcatgagcaactcccttccccatctctgctcaccatgtggacgctgaaatcgtccctggtcctgcttctgtgcctcacctgcagctatgcctttatgttctcttctctgagacagaaaactagcgaaccccaggggaaggtgcaatacggagagcactttcggattcggcagaatctaccagagcacacccaaggctggcttgggagcaaatggctctggcttctttttgttgttgtgccgtttgtgatactgcagtgtcaaagagacagtgagaagaataaggagcagagtcctcctggccttcgaggcggccaacttcactctccattaaagaaaaaaagaaatgcttcccccaacaaagactgtgcattcaataccttaatggaactcgaggtggagcttatgaaatttgtgtccaaagtgcggaatcttaaacgtgccatggcaacaggtagtggcagtaacctcaggcttcgaaagtcagagatgcctgcagatccataccatgtcacgatctgtgaaatatggggagaagaaagctctagctgaatggatttgtgtgtcaggagagaaaaaagttgagtgttgacaaactgtatgcaaactaataaaactattctg

SEQ ID NO: 132465 - DNA, 694 bp, Homo sapiens
  Payload ID: 5874
  Gene Symbol: FAM209B
  Gene Name: family with sequence similarity 209, member B
  Uniprot ID: Q5JX69
  ENST ID: ENST00000371325
  CDS Start-End: 97-612
gacatcaccaagggcctggcaccaggtgcccagtcttccagttgcgagggcaagcaaacccgtcatgagcaactcccttccccatctctgctcaccatgtggacgctgaaatcgtccctggtcctgcttctgtgcctcacctgcagctatgcctttatgttctcttctctgagacagaaaactagcgaaccccaggggaaggtgccgtgtggagagcactttcggattcggcagaacctaccagagcacacccaaggctggcttgggagcaaatggctctggcttttgtttgctgttgtgccgtttgtgatactgcagtgtcaaagagacagtgagaagaataaggagcagagtcctcctggccttcgaggcttcccatttcgcactccactaaagaaaaatcaaaatgcttctctttacaaagactgtgtattcaataccttaaacgaacttgaagtggagcttttgaaatttgtgtccgaagtgcagaatcttaaaggtgccatggcaacaggcagtggcagtaacctcaagcttcgaaggtcagagatgcctgcagatccataccatgtcacaatctgtaaaatatggggagaagaaagctctagctgaatggatttgtgtgtcaggagagaaaaaagttgagtgttgacaaactgtatgcaaactaataaaactattctgaagaaaagaa

SEQ ID NO: 132466 - DNA, 4272 bp, Homo sapiens
  Payload ID: 5875
  Gene Symbol: FAM21A
  Gene Name: family with sequence similarity 21, member A
  Uniprot ID: Q641Q2
  ENST ID: ENST00000282633
  CDS Start-End: 46-4071
ggcgtgtgctggcagcttcggagcccaccgagccgggcggctaggatgatgaaccggacgacccccgaccaggagctggcgccagcgtcggagcccgtgtgggagcggccgtggtcggtggaggagatccgcaggagcagccagagctggtcgctggcggccgacgcgggcctactacagtttctacaggaattctcacagcaaactatctctaggacccatgaaatcaagaaacaagtggacggactaattcgggaaaccaaagccacagattgtcgcctgcataatgtcttcaatgacttccttatgctctctaatacccagttcattgagaatcgtgtatatgatgaagaagtggaggagccagtactcaaggctgaggcagaaaaaacagagcaggagaagacacgagagcagaaagaagtagatctcattcctaaagtccaggaggctgtgaactatggcttacaagtattggacagtgcctttgagcaacttgatatcaaagcaggaaactcagactccgaggaagatgatgctaatgggcgggtggaactgatccttgaaccaaaggatctatacattgatcgtcctttaccatatctcattgggtcaaagctgttcatggaacaagaagatgtaggtcttggagagctgtccagtgaagaaggctctgtaggcagtgatcgtggcagtattgtggacactgaggaagagaaagaagaggaggagtcagatgaagattttgcccatcatagtgacaatgaacaaaaccggcacaccacacaaatgagtgatgaggaagaggatgatgatggctgtgaccttttcgctgactctgagaaggaggaggaagatattgaggacattgaagaaaatactagacctaaaagaagcagacctacatcgtttgcagatgagctggctgcccgcatcaagggggatgccgtgggtcgagtggacgaggagccgacaaccttaccctcaggagaagcaaaacctcggaagacactcaaagagaagaaggaaaggagaactccttcagacgatgaagaggataacttattcgcaccccccaagctgaccgacgaggacttctcgccatttggctctggaggtggcctgttcagtgggggcaaggggctctttgatgatgaggacgaggagagtgacctcttcacggaagccccccaggatcggcaagctggagcctctgttaaggaggagtcttcatcatccaaacctggaaagaaaatcccagcaggagctgtttctgtatttttaggagacacggatgtgtttggtgctgcctccgttccatcaatgaaggagccacagaagcctgagcagcccactccaaggaaaagcccctatggtccccctcccactggcctctttgatgatgatgatggtgatgatgatgacgactttttctcggcaccccacagcaaaccttctaaaacaggcaaagtccaatccactgccgatatctttggtgacgaagaaggagatctgttcaaagaaaaagccgtagcatcgccagaagccactgtgagtcagacagatgaaaataaagcaagagcagaaaaaaaggttaccttatcttccagcaaaaatctcaagccctcatcagaaacaaagactcaaaaaggcttattttcagatgaggaggactctgaggatttgttttcttctcaaagtgcgagtaagttaaaaggtgcgtctctgctgcctggcaagctccccacgttggtttccctgtttgatgatgaagatgaagaggataatctttttgggggtacagctgctaagaagcagacattgtgtctacaagctcagagagaagagaaagcaaaagcctccgagctctccaaaaagaaagcatctgccctgttgttcagcagtgatgaggaggaccagtggaatattcctgcttcacagacccacttagcatctgacagcaggtctaaaggagaacccagggattctgggaccctccagagccaggaggccaaggctgtgaaaaagaccagtctctttgaggaagacgaagaagatgatctttttgccattgccaaggacagccaaaagaagacccagagagtgtcactcctctttgaagacgatgttgatagcggaggctctctgtttggctctcctcccacatctgttcctcctgcaacaaagaaaaaagagactgtctctgaggcaccacctttgctgttcagcgatgaagaagagaaggaggcacaacttggagtgaagtctgtggataagaaggttgagagtgccaaggagtcattaaaatttgggagaactgatgtggctgagtcagaaaaggaaggacttttgactagatctgctcaggaaacagtcaagcattctgatttattttcttcatcatccccatgggacaaaggaaccaagcctagaaccaaaactgttcttagcttgtttgatgaggaagaggataaaatggaagatcaaaacattatccaggctccacagaaagaagtaggaaagggccgcgatcctgatgcccaccccaagagcacaggtgtcttccaggatgaagagctgcttttcagccacaagctccaaaaggacaatgacccagatgttgacctttttgctggcaccaaaaaaaccaagctgttagagccaagtgttgggagcctgtttggggatgatgaagatgatgatcttttcagctctgccaagtcccagcctttggtacaagagaaaaagagagtagtgaaaaaagaccactctgttgactctttcaaaaaccagaaacatcctgaatccattcaaggtagtaaagaaaaaggcatatggaagccggaaacacctcaggactcatcaggtctcgctccatttaaaaccaaagaaccatccactcggatcgggaagatacaagcaaatttagcgatcaacccagcggccttgctgcccacagcggcttcccagatctctgaagtaaagcctgttttgccagaattggcttttccttcatctgaacacagaaggagccacggtctggaaagtgtgcctgtccttcccgggagtggggaggccggtgtgagttttgatcttccagctcaggcagacaccttacacagtgcaaacaagagccgtgtcaagatgagagggaagcgtagaccgcagacccgtgcagctaggcggctggctgctcaggagtccagcgagactgaggacatgagcgtccccagaggacccattgcacagtgggctgatggcgccatttccccaaatggccatcggccacagctcagagcagccagtggagaagacagcactgaggaggccctggcagctgccgctgcaccttgggaaggtggtcctgtgcctggagtggacagaagcccctttgcaaagtctctgggtcattccagaggggaggctgacctttttgattctggggacatcttttccacgggcactggatctcagtctgtggagagaacaaaacccaaggcaaagatagcagagaatcctgccaacccaccagtgggtggtaaagcaaagagccccatgtttcctgctctaggtgaggccagcagtgatgatgatctctttcagtctgctaaaccaaaaccagcaaagaaaacaaatccctttcctctcctggaagatgaggatgacctctttacagatcagaaagtcaagaagaatgagacaaaatccaatagtcagcaggatgtcatattaacaacacaagatatttttgaggatgatatatttgctacggaagcaattaaaccctctcagaaaaccagagagaaggagaaaacattggaatctaatttatttgatgataacattgatatctttgctgacttaactgtaaaaccaaaagaaaagtccaaaaagaaagtggaagccaagtctatatttgatgatgatatggatgacatcttctcctctggtatccaggctaagacaaccaaaccaaaaagccgatctgcacaggccgcacctgaaccaagatttgaacacaaggtgtccaacatctttgatgatcccctgaatgcctttggaggccagtagagcacacagggtatccacatgttaccctgcagctacattgttgagttagtgatgatgttgtatatgctgatggtcttaactggattacaaaaagcaaatactagaacagctagctcatcgttcacccaatgtacttggtatttttctgcactggtttaatcatgcttaatactacaaaacaaaaataaatatttcacagtg

SEQ ID NO: 132467 - DNA, 4519 bp, Homo sapiens
  Payload ID: 5875
  Gene Symbol: FAM21A
  Gene Name: family with sequence similarity 21, member A
  ENST ID: ENST00000314664
  CDS Start-End: 119-3958
atcaggtcacgtgaggccggtcacgccccgggcagcttggctggggctaggcttccggggctctgcagtcctcggcgtgtgctggcagcttcggagcccaccgagccgggcggctaggatgatgaaccggacgacccccgaccaggagctggcgccagcgtcggagcccgtgtgggagcggccgtggtcggtggaggagatccgcaggagcagccagagctggtcgctggcggccgacgcgggcctactacagtttctacaggaattctcacagcaaactatctctaggacccatgaaatcaagaaacaagtggacggactaattcgggaaaccaaagccacagattgtcgcctgcataatgtcttcaatgacttccttatgctctctaatacccagttcattgagaatcgtgtatatgatgaagaagtggaggagccagtactcaaggctgaggcagaaaaaacagagcaggagaagacacgagagcagaaagaagtagatctcattcctaaagtccaggaggctgtgaactatggcttacaagtattggacagtgcctttgagcaacttgatatcaaagcaggaaactcagactccgaggaagatgatgctaatgggcgggtggaactgatccttgaaccaaaggatctatacattgatcgtcctttaccatatctcattgggtcaaagctgttcatggaacaagaagatgtaggtcttggagagctgtccagtgaagaaggctctgtaggcagtgatcgtggcagtattgtggacactgaggaagagaaagaagaggaggagtcagatgaagattttgcccatcatagtgacaatgaacaaaaccggcacaccacacaaatgagtgatgaggaagaggatgatgatggctgtgaccttttcgctgactctgagaaggaggaggaagatattgaggacattgaagaaaatactagacctaaaagaagcagacctacatcgtttgcagatgagctggctgcccgcatcaagggggatgccgtgggtcgagtggacgaggagccgacaaccttaccctcaggagaagcaaaacctcggaagacactcaaagagaagaaggaaaggagaactccttcagacgatgaagaggataacttattcgcaccccccaagctgaccgacgaggacttctcgccatttggctctggaggtggcctgttcagtgggggcaaggggctctttgatgatgaggacgaggagagtgacctcttcacggaagccccccaggatcggcaagctggagcctctgttaaggaggagtcttcatcatccaaacctggaaagaaaatcccagcaggagctgtttctgtatttttaggagacacggatgtgtttggtgctgcctccgttccatcaatgaaggagccacagaagcctgagcagcccactccaaggaaaagcccctatggtccccctcccactggcctctttgatgatgatgatggtgatgatgatgacgactttttctcggcaccccacagcaaaccttctaaaacaggcaaagtccaatccactgccgatatctttggtgacgaagaaggagatctgttcaaagaaaaagccgtagcatcgccagaagccactgtgagtcagacagatgaaaataaagcaagagcagaaaaaaaggttaccttatcttccagcaaaaatctcaagccctcatcagaaacaaagactcaaaaaggcttattttcagatgaggaggactctgaggatttgttttcttctcaaagtgcgagtaagttaaaaggtgcgtctctgctgcctggcaagctccccacgttggtttccctgtttgatgatgaagatgaagaggataatctttttgggggtacagctgctaagaagcagacattgtgtctacaagctcagagagaagagaaagcaaaagcctccgagctctccaaaaagaaagcatctgccctgttgttcagcagtgatgaggaggaccagtggaatattcctgcttcacagacccacttagcatctgacagcaggtctaaaggagaacccagggattctgggaccctccagagccaggaggccaaggctgtgaaaaagaccagtctctttgaggaagacgaagaagatgatctttttgccattgccaaggacagccaaaagaagacccagagagtgtcactcctctttgaagacgatgttgatagcggaggctctctgtttggctctcctcccacatctgttcctcctgcaacaaagaaaaaagagactgtctctgaggcaccacctttgctgttcagcgatgaagaagagaaggaggcacaacttggagtgaagtctgtggataagaaggttgagagtgccaaggagtcattaaaatttgggagaactgatgtggctgagtcagaaaaggaaggacttttgactagatctgctcaggaaacagtcaagcattctgatttattttcttcatcatccccatgggacaaaggaaccaagcctagaaccaaaactgttcttagcttgtttgatgaggaagaggataaaatggaagatcaaaacattatccaggctccacagaaagaagtaggaaagggccgcgatcctgatgcccaccccaagagcacaggtgtcttccaggatgaagagctgcttttcagccacaagctccaaaaggacaatgacccagatgttgacctttttgctggcaccaaaaaaaccaagctgttagagccaagtgttgggagcctgtttggggatgatgaagatgatgatcttttcagctctgccaagtcccagcctttggcaaatttagcgatcaacccagcggccttgctgcccacagcggcttcccagatctctgaagtaaagcctgttttgccagaattggcttttccttcatctgaacacagaaggagccacggtctggaaagtgtgcctgtccttcccgggagtggggaggccggtgtgagttttgatcttccagctcaggcagacaccttacacagtgcaaacaagagccgtgtcaagatgagagggaagcgtagaccgcagacccgtgcagctaggcggctggctgctcaggagtccagcgagactgaggacatgagcgtccccagaggacccattgcacagtgggctgatggcgccatttccccaaatggccatcggccacagctcagagcagccagtggagaagacagcactgaggaggccctggcagctgccgctgcaccttgggaaggtggtcctgtgcctggagtggacagaagcccctttgcaaagtctctgggtcattccagaggggaggctgacctttttgattctggggacatcttttccacgggcactggatctcagtctgtggagagaacaaaacccaaggcaaagatagcagagaatcctgccaacccaccagtgggtggtaaagcaaagagccccatgtttcctgctctaggtgaggccagcagtgatgatgatctctttcagtctgctaaaccaaaaccagcaaagaaaacaaatccctttcctctcctggaagatgaggatgacctctttacagatcagaaagtcaagaagaatgagacaaaatccaatagtcagcaggatgtcatattaacaacacaagatatttttgaggatgatatatttgctacggaagcaattaaaccctctcagaaaaccagagagaaggagaaaacattggaatctaatttatttgatgataacattgatatctttgctgacttaactgtaaaaccaaaagaaaagtccaaaaagaaagtggaagccaagtctatatttgatgatgatatggatgacatcttctcctctggtatccaggctaagacaaccaaaccaaaaagccgatctgcacaggccgcacctgaaccaagatttgaacacaaggtgtccaacatctttgatgatcccctgaatgcctttggaggccagtagagcacacagggtatccacatgttaccctgcagctacattgttgagttagtgatgatgttgtatatgctgatggtcttaactggattacaaaaagcaaatactagaacagctagctcatcgttcacccaatgtacttggtatttttctgcactggtttaatcatgcttaatactacaaaacaaaaataaatatttcacagtggttggtttgttttgtttttaaaccacagtttgatttagttagccttgctggggccataatatgcttcagggtgtgtaaaagaagaaatctctttgtggctttcatgggcagggaatcccagagatagcaaatgccacctgaccagaagtctttgttatatggatgggaaccctaacttagggcctgggcaggggaaagagaaagaaggtgagagattatacttcatgagtcttagcaatatgggagcaggttttcactgaattctgagggtgcctctgcatgtcctccaaggcaaagtttggcaaactgtggcccccccactgtcatattttgttaataaaattttattggaacacaacc

SEQ ID NO: 132468 - DNA, 4642 bp, Homo sapiens
  Payload ID: 5875
  Gene Symbol: FAM21A
  Gene Name: family with sequence similarity 21, member A
  Uniprot ID: Q641Q2
  ENST ID: ENST00000351071
  CDS Start-End: 119-4081
atcaggtcacgtgaggccggtcacgccccgggcagcttggctggggctaggcttccggggctctgcagtcctcggcgtgtgctggcagcttcggagcccaccgagccgggcggctaggatgatgaaccggacgacccccgaccaggagctggcgccagcgtcggagcccgtgtgggagcggccgtggtcggtggaggagatccgcaggagcagccagagctggtcgctggcggccgacgcgggcctactacagtttctacaggaattctcacagcaaactatctctaggacccatgaaatcaagaaacaagtggacggactaattcgggaaaccaaagccacagattgtcgcctgcataatgtcttcaatgacttccttatgctctctaatacccagttcattgagaatcgtgtatatgatgaagaagtggaggagccagtactcaaggctgaggcagaaaaaacagagcaggagaagacacgagagcagaaagaagtagatctcattcctaaagtccaggaggctgtgaactatggcttacaagtattggacagtgcctttgagcaacttgatatcaaagcaggaaactcagactccgaggaagatgatgctaatgggcgggtggaactgatccttgaaccaaaggatctatacattgatcgtcctttaccatatctcattgggtcaaagctgttcatggaacaagaagatgtaggtcttggagagctgtccagtgaagaaggctctgtaggcagtgatcgtggcagtattgtggacactgaggaagagaaagaagaggaggagtcagatgaagattttgcccatcatagtgacaatgaacaaaaccggcacaccacacaaatgagtgatgaggaagaggatgatgatggctgtgaccttttcgctgactctgagaaggaggaggaagatattgaggacattgaagaaaatactagacctaaaagaagcagacctacatcgtttgcagatgagctggctgcccgcatcaagggggatgccgtgggtcgagtggacgaggagccgacaaccttaccctcaggagaagcaaaacctcggaagacactcaaagagaagaaggaaaggagaactccttcagacgatgaagaggataacttattcgcaccccccaagctgaccgacgaggacttctcgccatttggctctggaggtggcctgttcagtgggggcaaggggctctttgatgatgaggacgaggagagtgacctcttcacggaagccccccaggatcggcaagctggagcctctgttaaggaggagtcttcatcatccaaacctggaaagaaaatcccagcaggagctgtttctgtatttttaggagacacggatgtgtttggtgctgcctccgttccatcaatgaaggagccacagaagcctgagcagcccactccaaggaaaagcccctatggtccccctcccactggcctctttgatgatgatgatggtgatgatgatgacgactttttctcggcaccccacagcaaaccttctaaaacaggcaaagtccaatccactgccgatatctttggtgacgaagaaggagatctgttcaaagaaaaagccgtagcatcgccagaagccactgtgagtcagacagatgaaaataaagcaagagcagaaaaaaaggttaccttatcttccagcaaaaatctcaagccctcatcagaaacaaagactcaaaaaggcttattttcagatgaggaggactctgaggatttgttttcttctcaaagtgcgagtaagttaaaaggtgcgtctctgctgcctggcaagctccccacgttggtttccctgtttgatgatgaagatgaagaggataatctttttgggggtacagctgctaagaagcagacattgtgtctacaagctcagagagaagagaaagcaaaagcctccgagctctccaaaaagaaagcatctgccctgttgttcagcagtgatgaggaggaccagtggaatattcctgcttcacagacccacttagcatctgacagcaggtctaaaggagaacccagggattctgggaccctccagagccaggaggccaaggctgtgaaaaagaccagtctctttgaggaagacgaagaagatgatctttttgccattgccaaggacagccaaaagaagacccagagagtgtcactcctctttgaagacgatgttgatagcggaggctctctgtttggctctcctcccacatctgttcctcctgcaacaaagaaaaaagagactgtctctgaggcaccacctttgctgttcagcgatgaagaagagaaggaggcacaacttggagtgaagtctgtggataagaaggttgagagtgccaaggagtcattaaaatttgggagaactgatgtggctgagtcagaaaaggaaggacttttgactagatctgctcaggaaacagtcaagcattctgatttattttcttcatcatccccatgggacaaaggaaccaagcctagaaccaaaactgttcttagcttgtttgatgaggaagaggataaaatggaagatcaaaacattatccaggctccacagaaagaagtaggaaagggccgcgatcctgatgcccaccccaagagcacaggtgtcttccaggatgaagagctgcttttcagccacaagctccaaaaggacaatgacccagatgttgacctttttgctggcaccaaaaaaaccaagctgttagagccaagtgttgggagcctgtttggggatgatgaagatgatgatcttttcagctctgccaagtcccagcctttggtacaagagaaaaagagagtagtgaaaaaagaccactctgttgactctttcaaaaaccagaaacatcctgaatccattcaaggtagtaaagaaaaaggcatatggaagccggaaacacctcaggcaaatttagcgatcaacccagcggccttgctgcccacagcggcttcccagatctctgaagtaaagcctgttttgccagaattggcttttccttcatctgaacacagaaggagccacggtctggaaagtgtgcctgtccttcccgggagtggggaggccggtgtgagttttgatcttccagctcaggcagacaccttacacagtgcaaacaagagccgtgtcaagatgagagggaagcgtagaccgcagacccgtgcagctaggcggctggctgctcaggagtccagcgagactgaggacatgagcgtccccagaggacccattgcacagtgggctgatggcgccatttccccaaatggccatcggccacagctcagagcagccagtggagaagacagcactgaggaggccctggcagctgccgctgcaccttgggaaggtggtcctgtgcctggagtggacagaagcccctttgcaaagtctctgggtcattccagaggggaggctgacctttttgattctggggacatcttttccacgggcactggatctcagtctgtggagagaacaaaacccaaggcaaagatagcagagaatcctgccaacccaccagtgggtggtaaagcaaagagccccatgtttcctgctctaggtgaggccagcagtgatgatgatctctttcagtctgctaaaccaaaaccagcaaagaaaacaaatccctttcctctcctggaagatgaggatgacctctttacagatcagaaagtcaagaagaatgagacaaaatccaatagtcagcaggatgtcatattaacaacacaagatatttttgaggatgatatatttgctacggaagcaattaaaccctctcagaaaaccagagagaaggagaaaacattggaatctaatttatttgatgataacattgatatctttgctgacttaactgtaaaaccaaaagaaaagtccaaaaagaaagtggaagccaagtctatatttgatgatgatatggatgacatcttctcctctggtatccaggctaagacaaccaaaccaaaaagccgatctgcacaggccgcacctgaaccaagatttgaacacaaggtgtccaacatctttgatgatcccctgaatgcctttggaggccagtagagcacacagggtatccacatgttaccctgcagctacattgttgagttagtgatgatgttgtatatgctgatggtcttaactggattacaaaaagcaaatactagaacagctagctcatcgttcacccaatgtacttggtatttttctgcactggtttaatcatgcttaatactacaaaacaaaaataaatatttcacagtggttggtttgttttgtttttaaaccacagtttgatttagttagccttgctggggccataatatgcttcagggtgtgtaaaagaagaaatctctttgtggctttcatgggcagggaatcccagagatagcaaatgccacctgaccagaagtctttgttatatggatgggaaccctaacttagggcctgggcaggggaaagagaaagaaggtgagagattatacttcatgagtcttagcaatatgggagcaggttttcactgaattctgagggtgcctctgcatgtcctccaaggcaaagtttggcaaactgtggcccccccactgtcatattttgttaataaaattttattggaacacaacc

SEQ ID NO: 132469 - DNA, 4323 bp, Homo sapiens
  Payload ID: 5875
  Gene Symbol: FAM21A
  Gene Name: family with sequence similarity 21, member A
  ENST ID: ENST00000399339
  CDS Start-End: 1-3762
atgcccaggctttctggcaagtcagtgcgtgtatatgatgaagaagtggaggagccagtactcaaggctgaggcagaaaaaacagagcaggagaagacacgagagcagaaagaagtagatctcattcctaaagtccaggaggctgtgaactatggcttacaagtattggacagtgcctttgagcaacttgatatcaaagcaggaaactcagactccgaggaagatgatgctaatgggcgggtggaactgatccttgaaccaaaggatctatacattgatcgtcctttaccatatctcattgggtcaaagctgttcatggaacaagaagatgtaggtcttggagagctgtccagtgaagaaggctctgtaggcagtgatcgtggcagtattgtggacactgaggaagagaaagaagaggaggagtcagatgaagattttgcccatcatagtgacaatgaacaaaaccggcacaccacacaaatgagtgatgaggaagaggatgatgatggctgtgaccttttcgctgactctgagaaggaggaggaagatattgaggacattgaagaaaatactagacctaaaagaagcagacctacatcgtttgcagatgagctggctgcccgcatcaagggggatgccgtgggtcgagtggacgaggagccgacaaccttaccctcaggagaagcaaaacctcggaagacactcaaagagaagaaggaaaggagaactccttcagacgatgaagaggataacttattcgcaccccccaagctgaccgacgaggacttctcgccatttggctctggaggtggcctgttcagtgggggcaaggggctctttgatgatgaggacgaggagagtgacctcttcacggaagccccccaggatcggcaagctggagcctctgttaaggaggagtcttcatcatccaaacctggaaagaaaatcccagcaggagctgtttctgtatttttaggagacacggatgtgtttggtgctgcctccgttccatcaatgaaggagccacagaagcctgagcagcccactccaaggaaaagcccctatggtccccctcccactggcctctttgatgatgatgatggtgatgatgatgacgactttttctcggcaccccacagcaaaccttctaaaacaggcaaagtccaatccactgccgatatctttggtgacgaagaaggagatctgttcaaagaaaaagccgtagcatcgccagaagccactgtgagtcagacagatgaaaataaagcaagagcagaaaaaaaggttaccttatcttccagcaaaaatctcaagccctcatcagaaacaaagactcaaaaaggcttattttcagatgaggaggactctgaggatttgttttcttctcaaagtgcgagtaagttaaaaggtgcgtctctgctgcctggcaagctccccacgttggtttccctgtttgatgatgaagatgaagaggataatctttttgggggtacagctgctaagaagcagacattgtgtctacaagctcagagagaagagaaagcaaaagcctccgagctctccaaaaagaaagcatctgccctgttgttcagcagtgatgaggaggaccagtggaatattcctgcttcacagacccacttagcatctgacagcaggtctaaaggagaacccagggattctgggaccctccagagccaggaggccaaggctgtgaaaaagaccagtctctttgaggaagacgaagaagatgatctttttgccattgccaaggacagccaaaagaagacccagagagtgtcactcctctttgaagacgatgttgatagcggaggctctctgtttggctctcctcccacatctgttcctcctgcaacaaagaaaaaagagactgtctctgaggcaccacctttgctgttcagcgatgaagaagagaaggaggcacaacttggagtgaagtctgtggataagaaggttgagagtgccaaggagtcattaaaatttgggagaactgatgtggctgagtcagaaaaggaaggacttttgactagatctgctcaggaaacagtcaagcattctgatttattttcttcatcatccccatgggacaaaggaaccaagcctagaaccaaaactgttcttagcttgtttgatgaggaagaggataaaatggaagatcaaaacattatccaggctccacagaaagaagtaggaaagggccgcgatcctgatgcccaccccaagagcacaggtgtcttccaggatgaagagctgcttttcagccacaagctccaaaaggacaatgacccagatgttgacctttttgctggcaccaaaaaaaccaagctgttagagccaagtgttgggagcctgtttggggatgatgaagatgatgatcttttcagctctgccaagtcccagcctttggtacaagagaaaaagagagtagtgaaaaaagaccactctgttgactctttcaaaaaccagaaacatcctgaatccattcaaggtagtaaagaaaaaggcatatggaagccggaaacacctcaggactcatcaggtctcgctccatttaaaaccaaagaaccatccactcggatcgggaagatacaagcaaatttagcgatcaacccagcggccttgctgcccacagcggcttcccagatctctgaagtaaagcctgttttgccagaattggcttttccttcatctgaacacagaaggagccacggtctggaaagtgtgcctgtccttcccgggagtggggaggccggtgtgagttttgatcttccagctcaggcagacaccttacacagtgcaaacaagagccgtgtcaagatgagagggaagcgtagaccgcagacccgtgcagctaggcggctggctgctcaggagtccagcgagactgaggacatgagcgtccccagaggacccattgcacagtgggctgatggcgccatttccccaaatggccatcggccacagctcagagcagccagtggagaagacagcactgaggaggccctggcagctgccgctgcaccttgggaaggtggtcctgtgcctggagtggacagaagcccctttgcaaagtctctgggtcattccagaggggaggctgacctttttgattctggggacatcttttccacgggcactggatctcagtctgtggagagaacaaaacccaaggcaaagatagcagagaatcctgccaacccaccagtgggtggtaaagcaaagagccccatgtttcctgctctaggtgaggccagcagtgatgatgatctctttcagtctgctaaaccaaaaccagcaaagaaaacaaatccctttcctctcctggaagatgaggatgacctctttacagatcagaaagtcaagaagaatgagacaaaatccaatagtcagcaggatgtcatattaacaacacaagatatttttgaggatgatatatttgctacggaagcaattaaaccctctcagaaaaccagagagaaggagaaaacattggaatctaatttatttgatgataacattgatatctttgctgacttaactgtaaaaccaaaagaaaagtccaaaaagaaagtggaagccaagtctatatttgatgatgatatggatgacatcttctcctctggtatccaggctaagacaaccaaaccaaaaagccgatctgcacaggccgcacctgaaccaagatttgaacacaaggtgtccaacatctttgatgatcccctgaatgcctttggaggccagtagagcacacagggtatccacatgttaccctgcagctacattgttgagttagtgatgatgttgtatatgctgatggtcttaactggattacaaaaagcaaatactagaacagctagctcatcgttcacccaatgtacttggtatttttctgcactggtttaatcatgcttaatactacaaaacaaaaataaatatttcacagtggttggtttgttttgtttttaaaccacagtttgatttagttagccttgctggggccataatatgcttcagggtgtgtaaaagaagaaatctctttgtggctttcatgggcagggaatcccagagatagcaaatgccacctgaccagaagtctttgttatatggatgggaaccctaacttagggcctgggcaggggaaagagaaagaaggtgagagattatacttcatgagtcttagcaatatgggagcaggttttcactgaattctgagggtgcctctgcatgtcctccaaggcaaagtttggcaaactgtggcccccccactgtcatattttgttaataaaattttattggaacacaacc

SEQ ID NO: 132470 - DNA, 782 bp, Homo sapiens
  Payload ID: 5875
  Gene Symbol: FAM21A
  Gene Name: family with sequence similarity 21, member A
  ENST ID: ENST00000454806
  CDS Start-End: 1-471
tccccatgggacaaaggaaccaagcctagaaccaaaactgttcttagcttgtttgatgaggaagaggataaaatggaagatcaaaacattatccaggctccacagaaagaagtaggaaagggccgcgatcctgatgcccaccccaagagcacaggtgtcttccaggatgaagagctgcttttcagccacaagctccaaaaggacaatgacccagatgttgacctttttgctggcaccaaaaaaaccaagctgttagagccaagtgttgggagcctgtttggggatgatgaagatgatgatcttttcagctctgccaagtcccagcctttggtacaagagaaaaagagagtagtgaaaaaagaccactctgttgactctttcaaaaaccagaaacatcctgaatccattcaaggtagtaaagaaaaaggcatatggaagccggaaacacctcaggttagaaatcctctttaaggattttcagctcttgtttgcatcccagtacagagaaattccattatgcagacccacagttattcagacttgtctgcattaaggaggaaacagcaaccagggctaccgctttgtcttcactgcactccccccaagtcatctcccctctcctcgctccacacgccagagtttcatgaatctatactttaatagttagtgttttttgatgccatgccagatttaactctgaagtggagttaaggtaggatgaagaatcttcttcccactaaagaatttatttctccctctggatttccttggaatagaattaa

SEQ ID NO: 132471 - DNA, 3287 bp, Homo sapiens
  Payload ID: 5875
  Gene Symbol: FAM21A
  Gene Name: family with sequence similarity 21, member A
  ENST ID: ENST00000434114
  CDS Start-End: 83-403
ttggctggggctaggcttccggggctctgcagtcctcggcgtgtgctggcagcttcggagcccaccgagccgggcggctaggatgatgaaccggacgacccccgaccaggagctggcgccagcgtcggagcccgtgtgggagcggccgtggtcggtggaggagatccgcaggagcagccagagctggtcgctggcggccgacgcgggcctactacagtttctacaggaattctcacagcaaactatctctaggacccatgaaatcaagaaacaagtggacggactaattcgggaaaccaaagccacagattgtcgcctgcataatgtcttcaatgacttccttatgctctctaatacccagttcattgagaatcgtgtatatgatgaagaaaaggctctgtaggcagtgatcgtggcagtattgtggacactgaggaagagaaagaagaggaggagtcagatgaagattttgcccatcatagtgacaatgaacaaaaccggcacaccacacaaatgagtgatgaggaagaggatgatgatggctgtgaccttttcgctgactctgagaaggaggaggaagatattgaggacattgaagaaaatactagacctaaaagaagcagacctacatcgtttgcagatgagctggctgcccgcatcaagggggatgccgtgggtcgagtggacgaggagccgacaaccttaccctcaggagaagcaaaacctcggaagacactcaaagagaagaaggaaaggagaactccttcagacgatgaagaggataacttattcgcaccccccaagctgaccgacgaggacttctcgccatttggctctggaggtggcctgttcagtgggggcaaggggctctttgatgatgaggacgaggagagtgacctcttcacggaagccccccaggatcggcaagctggagcctctgttaaggaggagtcttcatcatccaaacctggaaagaaaatcccagcaggagctgtttctgtatttttaggagacacggatgtgtttggtgctgcctccgttccatcaatgaaggagccacagaagcctgagcagcccactccaaggaaaagcccctatggtccccctcccactggcctctttgatgatgatgatggtgatgatgatgacgactttttctcggcaccccacagcaaaccttctaaaacaggcaaagtccaatccactgccgatatctttggtgacgaagaaggagatctgttcaaagaaaaagccgtagcatcgccagaagccactgtgagtcagacagatgaaaataaagcaagagcagaaaaaaaggttaccttatcttccagcaaaaatctcaagccctcatcagaaacaaagactcaaaaaggcttattttcagatgaggaggactctgaggatttgttttcttctcaaagtgcgagtaagttaaaaggtgcgtctctgctgcctggcaagctccccacgttggtttccctgtttgatgatgaagatgaagaggataatctttttgggggtacagctgctaagaagcagacattgtgtctacaagctcagagagaagagaaagcaaaagcctccgagctctccaaaaagaaagcatctgccctgttgttcagcagtgatgaggaggaccagtggaatattcctgcttcacagacccacttagcatctgacagcaggtctaaaggagaacccagggattctgggaccctccagagccaggaggccaaggctgtgaaaaagaccagtctctttgaggaagacgaagaagatgatctttttgccattgccaaggacagccaaaagaagacccagagagtgtcactcctctttgaagacgatgttgatagcggaggctctctgtttggctctcctcccacatctgttcctcctgcaacaaagaaaaaagagactgtctctgaggcaccacctttgctgttcagcgatgaagaagagaaggaggcacaacttggagtgaagtctgtggataagaaggttgagagtgccaaggagtcattaaaatttgggagaactgatgtggctgagtcagaaaaggaaggacttttgactagatctgctcaggaaacagtcaagcattctgatttattttcttcatcatccccatgggacaaaggaaccaagcctagaaccaaaactgttcttagcttgtttgatgaggaagaggataaaatggaagatcaaaacattatccaggctccacagaaagaagtaggaaagggccgcgatcctgatgcccaccccaagagcacaggtgtcttccaggatgaagagctgcttttcagccacaagctccaaaaggacaatgacccagatgttgacctttttgctggcaccaaaaaaaccaagctgttagagccaagtgttgggagcctgtttggggatgatgaagatgatgatcttttcagctctgccaagtcccagcctttggtacaagagaaaaagagagtagtgaaaaaagaccactctgttgactctttcaaaaaccagaaacatcctgaatccattcaaggtagtaaagaaaaaggcatatggaagccggaaacacctcaggactcatcaggtctcgctccatttaaaaccaaagaaccatccactcggatcgggaagatacaagcaaatttagcgatcaacccagcggccttgctgcccacagcggcttcccagatctctgaagtaaagcctgttttgccagaattggcttttccttcatctgaacacagaaggagccacggtctggaaagtgtgcctgtccttcccgggagtggggaggccggtgtgagttttgatcttccagctcaggcagacaccttacacagtgcaaacaagagccgtgtcaagatgagagggaagcgtagaccgcagacccgtgcagctaggcggctggctgctcaggagtccagcgagactgaggacatgagcgtccccagaggacccattgcacagtgggctgatggcgccatttccccaaatggccatcggccacagctcagagcagccagtggagaagacagcactgaggaggccctggcagctgccgctgcaccttgggaaggtggtcctgtgcctggagtggacagaagcccctttgcaaagtctctgggtcattccagaggggaggctgacctttttgattctggggacatcttttccacgggcactggatctcagtctgtggagagaacaaaacccaaggcaaagtttggcaaactgtggcccccccactgtcatattttgttaataaaattttattggaacac

SEQ ID NO: 132472 - DNA, 4417 bp, Homo sapiens
  Payload ID: 5875
  Gene Symbol: FAM21A
  Gene Name: family with sequence similarity 21, member A
  ENST ID: ENST00000611324
  CDS Start-End: 119-3856
atcaggtcacgtgaggccggtcacgccccgggcagcttggctggggctaggcttccggggctctgcagtcctcggcgtgtgctggcagcttcggagcccaccgagccgggcggctaggatgatgaaccggacgacccccgaccaggagctggcgccagcgtcggagcccgtgtgggagcggccgtggtcggtggaggagatccgcaggagcagccagagctggtcgctggcggccgacgcgggcctactacagtttctacaggaattctcacagcaaactatctctaggacccatgaaatcaagaaacaagtggacggactaattcgggaaaccaaagccacagattgtcgcctgcataatgtcttcaatgacttccttatgctctctaatacccagttcattgagaatcgtgtatatgatgaagaagtggaggagccagtactcaaggctgaggcagaaaaaacagagcaggagaagacacgagagcagaaagaagtagatctcattcctaaagtccaggaggctgtgaactatggcttacaagtattggacagtgcctttgagcaacttgatatcaaagcaggaaactcagactccgaggaagatgatgctaatgggcgggtggaactgatccttgaaccaaaggatctatacattgatcgtcctttaccatatctcattgggtcaaagctgttcatggaacaagaagatgtaggtcttggagagctgtccagtgaagaaggctctgtaggcagtgatcgtggcagtattgtggacactgaggaagagaaagaagaggaggagtcagatgaagattttgcccatcatagtgacaatgaacaaaaccggcacaccacacaaatgagtgatgaggaagaggatgatgatggctgtgaccttttcgctgactctgagaaggaggaggaagatattgaggacattgaagaaaatactagacctaaaagaagcagacctacatcgtttgcagatgagctggctgcccgcatcaagggggatgccgtgggtcgagtggacgaggagccgacaaatgaagaggataacttattcgcaccccccaagctgaccgacgaggacttctcgccatttggctctggaggtggcctgttcagtgggggcaaggggctctttgatgatgaggacgaggagagtgacctcttcacggaagccccccaggatcggcaagctggagcctctgttaaggaggagtcttcatcatccaaacctggaaagaaaatcccagcaggagctgtttctgtatttttaggagacacggatgtgtttggtgctgcctccgttccatcaatgaaggagccacagaagcctgagcagcccactccaaggaaaagcccctatggtccccctcccactggcctctttgatgatgatgatggtgatgatgatgacgactttttctcggcaccccacagcaaaccttctaaaacaggcaaagtccaatccactgccgatatctttggtgacgaagaaggagatctgttcaaagaaaaagccgtagcatcgccagaagccactgtgagtcagacagatgaaaataaagcaagagcagaaaaaaaggttaccttatcttccagcaaaaatctcaagccctcatcagaaacaaagactcaaaaaggcttattttcagatgaggaggactctgaggatttgttttcttctcaaagtgcgagtaagttaaaaggtgcgtctctgctgcctggcaagctccccacgttggtttccctgtttgatgatgaagatgaagaggataatctttttgggggtacagctgctaagaagcagacattgtgtctacaagctcagagagaagagaaagcaaaagcctccgagctctccaaaaagaaagcatctgccctgttgttcagcagtgatgaggaggaccagtggaatattcctgcttcacagacccacttagcatctgacagcaggtctaaaggagaacccagggattctgggaccctccagagccaggaggccaaggctgtgaaaaagaccagtctctttgaggaagacgaagaagatgatctttttgccattgccaaggacagccaaaagaagacccagagagtgtcactcctctttgaagacgatgttgatagcggaggctctctgtttggctctcctcccacatctgttcctcctgcaacaaaggaaggacttttgactagatctgctcaggaaacagtcaagcattctgatttattttcttcatcatccccatgggacaaaggaaccaagcctagaaccaaaactgttcttagcttgtttgatgaggaagaggataaaatggaagatcaaaacattatccaggctccacagaaagaagtaggaaagggccgcgatcctgatgcccaccccaagagcacaggtgtcttccaggatgaagagctgcttttcagccacaagctccaaaaggacaatgacccagatgttgacctttttgctggcaccaaaaaaaccaagctgttagagccaagtgttgggagcctgtttggggatgatgaagatgatgatcttttcagctctgccaagtcccagcctttggtacaagagaaaaagagagtagtgaaaaaagaccactctgttgactctttcaaaaaccagaaacatcctgaatccattcaaggtagtaaagaaaaaggcatatggaagccggaaacacctcaggcaaatttagcgatcaacccagcggccttgctgcccacagcggcttcccagatctctgaagtaaagcctgttttgccagaattggcttttccttcatctgaacacagaaggagccacggtctggaaagtgtgcctgtccttcccgggagtggggaggccggtgtgagttttgatcttccagctcaggcagacaccttacacagtgcaaacaagagccgtgtcaagatgagagggaagcgtagaccgcagacccgtgcagctaggcggctggctgctcaggagtccagcgagactgaggacatgagcgtccccagaggacccattgcacagtgggctgatggcgccatttccccaaatggccatcggccacagctcagagcagccagtggagaagacagcactgaggaggccctggcagctgccgctgcaccttgggaaggtggtcctgtgcctggagtggacagaagcccctttgcaaagtctctgggtcattccagaggggaggctgacctttttgattctggggacatcttttccacgggcactggatctcagtctgtggagagaacaaaacccaaggcaaagatagcagagaatcctgccaacccaccagtgggtggtaaagcaaagagccccatgtttcctgctctaggtgaggccagcagtgatgatgatctctttcagtctgctaaaccaaaaccagcaaagaaaacaaatccctttcctctcctggaagatgaggatgacctctttacagatcagaaagtcaagaagaatgagacaaaatccaatagtcagcaggatgtcatattaacaacacaagatatttttgaggatgatatatttgctacggaagcaattaaaccctctcagaaaaccagagagaaggagaaaacattggaatctaatttatttgatgataacattgatatctttgctgacttaactgtaaaaccaaaagaaaagtccaaaaagaaagtggaagccaagtctatatttgatgatgatatggatgacatcttctcctctggtatccaggctaagacaaccaaaccaaaaagccgatctgcacaggccgcacctgaaccaagatttgaacacaaggtgtccaacatctttgatgatcccctgaatgcctttggaggccagtagagcacacagggtatccacatgttaccctgcagctacattgttgagttagtgatgatgttgtatatgctgatggtcttaactggattacaaaaagcaaatactagaacagctagctcatcgttcacccaatgtacttggtatttttctgcactggtttaatcatgcttaatactacaaaacaaaaataaatatttcacagtggttggtttgttttgtttttaaaccacagtttgatttagttagccttgctggggccataatatgcttcagggtgtgtaaaagaagaaatctctttgtggctttcatgggcagggaatcccagagatagcaaatgccacctgaccagaagtctttgttatatggatgggaaccctaacttagggcctgggcaggggaaagagaaagaaggtgagagattatacttcatgagtcttagcaatatgggagcaggttttcactgaattctgagggtgcctctgcatgtcctccaaggcaaagtttggcaaactgtggcccccccactgtcatattttgttaataaaattttattggaacacaacc

SEQ ID NO: 132473 - DNA, 4669 bp, Homo sapiens
  Payload ID: 5876
  Gene Symbol: FAM21C
  Gene Name: family with sequence similarity 21, member C
  ENST ID: ENST00000336378
  CDS Start-End: 83-4108
ttggctggggctaggcttccggggctctgcggtcctcggcctgtgctggcagcctcggagcccaccgagccgggcggctgggatgatgaaccggacgacccccgaccaggagctggtgccggcgtcggagcccgtgtgggagcggccgtggtcggtggaggagatccgcaggagcagccagagctggtcgctggcggccgacgcgggcctactacagtttctacaggaattctcacagcaaactatctctaggacccatgaaatcaagaaacaagtggacggactaatccgggaaaccaaagccacagattgtcgcctgcataatgtcttcaatgacttccttatgctctctaatacccagttcatagagaatcgtgtatatgatgaagaagtggaggagccagtactcaaggctgaggcagaaaaaacagagcaggagaagacacgagagcagaaagaagtagatctcattcctaaagtccaggaggctgtgaactatggcttacaagtattggacagtgcctttgagcaacttgatatcaaagcaggaaactcagactccgaggaagatgatgctaatgggcgggtggaactgatccttgaaccaaaggatctatacattgatcgtcctttaccatatctcattgggtcaaagctgttcatggaacaagaagatgtaggtcttggagagctgtccagtgaagaaggctctgtaggcagtgatcgtggcagtattgtggacactgaggaagagaaagaagaggaggagtcagatgaagattttgcccatcacagtgacaatgaacaaaaccagcacaccacacaaatgagtgatgaggaagaggatgatgatggctgtgacctttttgctgactctgagaaggaggaggaagatattgaggacattgaagaaaatactagacctaaaagaagcagacctacatcgtttgcagatgagctggctgcccgcatcaagggggatgccatgggtcgagtggacgaggagccgacaaccttaccctcaggagaagcaaaacctcggaagacactcaaagagaagaaggaaaggagaactccttcagacgatgaagaggataacttattcgcaccccccaagctgaccgacgaggacttctcgccatttggctctggaggtggcctgttcagtggcggcaaggggctatttgatgatgaggacgaggagagtgacctcttcacggaagcctcccaggatcggcaagctggagcctctgttaaggaggagtcttcatcatccaaacctggaaagaaaatcccagcaggagctgtttctgtatttttaggagacacggatgtgtttggtgctgcctccgttccatcactgaaggagccacagaagcctgagcagcccactccaaggaaaagcccctatggtccccctcccactggcctctttgatgatgatgatggtgatgatgatgacgactttttctcggcaccccacagcaaaccttctaaaacaggcaaagtccaatccactgccgatatctttggtgacgaagaaggagatctgttcaaagaaaaagccgtagcatcgccagaagccactgtgagtcagacagatgaaaataaagcaagagcagaaaaaaaggttaccttatcttacagcaaaaatctcaagccctcatcagaaacaaagactcaaaaaggcttattttcagatgaggaggactctgaggatttgttttcttctcaaagtgcgagtaacttaaaaggtgcatctctgctgcctggcaagctccccacgtcggtttccctgtttgatgatgaagatgaagaggataatctttttgggggtacagctgctaagaagcagacattgtctctacaagctcagagagaagagaaagcaaaagcctccgagctctccaaaaagaaagcatctgccctgttgttcagcagtgatgaggaggaccagtggaatattcctgcttcacagacccacttagcatctgacagcaggtctaaaggagaacccagggattctgggaccctccagagccaggaggccaaggctgtgaaaaagaccagtctctttgaggaagacaaagaagatgatctttttgccattgccaaggacagccaaaagaagacccagagagtgtcactcctctttgaagacgatgttgatagcggaggctctctgtttggctctcctcccacatctgttcctcctgcaacaaagaaaaaagagactgtctctgaggcaccacctttgctgttcagcgatgaagaagagaaggaggcacaacttggagtgaagtctgtggataagaaggttgagagtgccaaggagtcattaaaatttgggagaactgatgtggctgagtcagaaaaggaaggacttttgactagatctgctcaggaaacagtcaagcattctgatttattttcttcatcatccccatgggacaaaggaaccaagcctagaaccaaaactgttcttagcttgtttgatgaggaagaggataaaatggaagatcaaaacattatccaggctccacagaaagaagtaggaaagggctgcgatcctgatgcccaccccaagagcacaggtgtcttccaggatgaagagctgcttttcagccacaagctccaaaaggacaatgacccagatgttgacctttttgctggcaccaaaaaaaccaagctgttagagccaagtgttgggagcctgtttggggatgatgaagatgatgatcttttcagctctgccaagtcccagcctttggtacaagagaaaaagagagtagtgaaaaaagaccactctgttaactctttcaaaaaccagaaacatcctgaatccattcaaggtagtaaagaaaaaggcatatggaagccggaaacacctcaggactcatcaggtctcgctccatttaaaaccaaagaaccatccactcggatcgggaagatacaagcaaatttagcgatcaacccagcggccttgctgcccacagcggcttcccagatctctgaagtaaagcctgttttgccagaattggcttttccttcatctgaacacagaaggagccacggtctggaaagtgtgcctgtccttcccgggagtggggaggccggtgtgagttttgatcttccagctcaggcagacaccttacacagtgcaaacaagagccgtgtcaagatgagagggaagcgtagaccgcagacccgtgcagctaggcggctggctgctcaggagtccagcgaggctgaggacatgagcgtccccagaggacccattgcacagtgggctgatggcgccatttccccaaatggccatcggccacagctcagagcagccagtggagaagacagcactgaggaggccctggcagctgccgctgcaccttgggaaggtggtcctgtgcctggagtggacacaagcccctttgcaaagtctctgggtcattccagaggggaggctgacctttttgattctggggacattttttccacgggcactggatctcagtccgtggagagaacaaaacccaaggcaaagatagcagagaatcctgccaacccaccagtgggtggtaaagcaaagagccccatgtttcctgctctaggcgaggccagcagtgatgatgatctctttcagtctgctaaaccaaaaccagcaaagaaaacaaatccctttcctctcctggaagatgaggatgacctctttacagatcagaaagtcaagaagaatgagacaaaatccagtagtcagcaggatgtcatattaacaacacaagatatttttgaggatgatatatttgctacggaagcaattaaaccctctcagaaaaccagagagaaggagaaaacattggaatctaatttatttgatgataacattgatatctttgctgacttaactgtaaaaccaaaagaaaagtccaaaaagaaagtggaagccaagtctatatttgatgatgatatggatgacatcttctccactggtatccaggctaagacaaccaaaccaaaaagccgatctgcacaggccgcacctgaaccaagatttgaacacaaggtgtccaacatctttgatgatcccctgaatgcctttggaggccagtagagcacacagggtatccacatgttaccctgcagctacattgttgagttagtgatgatattgtatatgctcatggtcttaactggattacaaaaagcaaatactagaacagctagctcatcttttacccaatgtacttagtatttttctgcactggtttaatcatgcttaatactacaaaacaaaaataaatatttcacagtggttggtttgttttgtttttaaaccacagtttgatttagttagccttgctggggccataatatgcttcagggtgtgtaaaagaagaaatctctttgtggctttcatgggcagggaatctcagagatagcaaatgccacctgaccagaagtctttgttatatggatgggaaccctaacttagggcttgggcaggggaaagagaaagaagatgagagattatacttcatgagtcttagcaatatgggagcaggttttcactgaattctgagggtgcctctgcatgtcctccaaggcaaagtttggcaaactgtggcccccccactgtcatattttgttaataaaattttattggaacacaatc

SEQ ID NO: 132474 - DNA, 4471 bp, Homo sapiens
  Payload ID: 5876
  Gene Symbol: FAM21C
  Gene Name: family with sequence similarity 21, member C
  ENST ID: ENST00000359860
  CDS Start-End: 122-3910
atcaggtcacgtgaggccggtcacgccccgggcagcttggctggggctaggcttccggggctctgcggtcctcggcctgtgctggcagcctcggagcccaccgagccgggcggctgggatgatgaaccggacgacccccgaccaggagctggtgccggcgtcggagcccgtgtgggagcggccgtggtcggtggaggagatccgcaggagcagccagagctggtcgctggcggccgacgcgggccgtgtatatgatgaagaagtggaggagccagtactcaaggctgaggcagaaaaaacagagcaggagaagacacgagagcagaaagaagtagatctcattcctaaagtccaggaggctgtgaactatggcttacaagtattggacagtgcctttgagcaacttgatatcaaagcaggaaactcagactccgaggaagatgatgctaatgggcgggtggaactgatccttgaaccaaaggatctatacattgatcgtcctttaccatatctcattgggtcaaagctgttcatggaacaagaagatgtaggtcttggagagctgtccagtgaagaaggctctgtaggcagtgatcgtggcagtattgtggacactgaggaagagaaagaagaggaggagtcagatgaagattttgcccatcacagtgacaatgaacaaaaccagcacaccacacaaatgagtgatgaggaagaggatgatgatggctgtgacctttttgctgactctgagaaggaggaggaagatattgaggacattgaagaaaatactagacctaaaagaagcagacctacatcgtttgcagatgagctggctgcccgcatcaagggggatgccatgggtcgagtggacgaggagccgacaaccttaccctcaggagaagcaaaacctcggaagacactcaaagagaagaaggaaaggagaactccttcagacgatgaagaggataacttattcgcaccccccaagctgaccgacgaggacttctcgccatttggctctggaggtggcctgttcagtggcggcaaggggctatttgatgatgaggacgaggagagtgacctcttcacggaagcctcccaggatcggcaagctggagcctctgttaaggaggagtcttcatcatccaaacctggaaagaaaatcccagcaggagctgtttctgtatttttaggagacacggatgtgtttggtgctgcctccgttccatcactgaaggagccacagaagcctgagcagcccactccaaggaaaagcccctatggtccccctcccactggcctctttgatgatgatgatggtgatgatgatgacgactttttctcggcaccccacagcaaaccttctaaaacacgcaaagtccaatccactgccgatatctttggtgacgaagaaggagatctgttcaaagaaaaagccgtagcatcgccagaagccactgtgagtcagacagatgaaaataaagcaagagcagaaaaaaaggttaccttatcttacagcaaaaatctcaagccctcatcagaaacaaagactcaaaaaggcttattttcagatgaggaggactctgaggatttgttttcttctcaaagtgcgagtaacttaaaaggtgcatctctgctgcctggcaagctccccacgtcggtttccctgtttgatgatgaagatgaagaggataatctttttgggggtacagctgctaagaagcagacattgtctctacaagctcagagagaagagaaagcaaaagcctccgagctctccaaaaagaaagcatctgccctgttgttcagcagtgatgaggagtggaatattcctgcttcacagacccacttagcatctgacagcaggtctaaaggagaacccagggattctgggaccctccagagccaggaggccaaggctgtgaaaaagaccagtctctttgaggaagacaaagaagatgatctttttgccattgccaaggacagccaaaagaagacccagagagtgtcactcctctttgaagacgatgttgatagcggaggctctctgtttggctctcctcccacatctgttcctcctgcaacaaagaaaaaagagactgtctctgaggcaccacctttgctgttcagcgatgaagaagagaaggaggcacaacttggagtgaagtctgtggataagaaggttgagagtgccaaggagtcattaaaatttgggagaactgatgtggctgagtcagaaaaggaaggacttttgactagatctgctcaggaaacagtcaagcattctgatttattttcttcatcatccccatgggacaaaggaaccaagcctagaaccaaaactgttcttagcttgtttgatgaggaagaggataaaatggaagatcaaaacattatccaggctccacagaaagaagtaggaaagggctgcgatcctgatgcccaccccaagagcacaggtgtcttccaggatgaagagctgcttttcagccacaagctccaaaaggacaatgacccagatgttgacctttttgctggcaccaaaaaaaccaagctgttagagccaagtgttgggagcctgtttggggatgatgaagatgatgatcttttcagctctgccaagtcccagcctttggtacaagagaaaaagagagtagtgaaaaaagaccactctgttaactctttcaaaaaccagaaacatcctgaatccattcaaggtagtaaagaaaaaggcatatggaagccggaaacacctcaggcaaatttagcgatcaacccagcggccttgctgcccacagcggcttcccagatctctgaagtaaagcctgttttgccagaattggcttttccttcatctgaacacagaaggagccacggtctggaaagtgtgcctgtccttcccgggagtggggaggccggtgtgagttttgatcttccagctcaggcagacaccttacacagtgcaaacaagagccgtgtcaagatgagagggaagcgtagaccgcagacccgtgcagctaggcggctggctgctcaggagtccagcgaggctgaggacatgagcgtccccagaggacccattgcacagtgggctgatggcgccatttccccaaatggccatcggccacagctcagagcagccagtggagaagacagcactgaggaggccctggcagctgccgctgcaccttgggaaggtggtcctgtgcctggagtggacacaagcccctttgcaaagtctctgggtcattccagaggggaggctgacctttttgattctggggacattttttccacgggcactggatctcagtccgtggagagaacaaaacccaaggcaaagatagcagagaatcctgccaacccaccagtgggtggtaaagcaaagagccccatgtttcctgctctaggcgaggccagcagtgatgatgatctctttcagtctgctaaaccaaaaccagcaaagaaaacaaatccctttcctctcctggaagatgaggatgacctctttacagatcagaaagtcaagaagaatgagacaaaatccagtagtcagcaggatgtcatattaacaacacaagatatttttgaggatgatatatttgctacggaagcaattaaaccctctcagaaaaccagagagaaggagaaaacattggaatctaatttatttgatgataacattgatatctttgctgacttaactgtaaaaccaaaagaaaagtccaaaaagaaagtggaagccaagtctatatttgatgatgatatggatgacatcttctccactggtatccaggctaagacaaccaaaccaaaaagccgatctgcacaggccgcacctgaaccaagatttgaacacaaggtgtccaacatctttgatgatcccctgaatgcctttggaggccagtagagcacacagggtatccacatgttaccctgcagctacattgttgagttagtgatgatattgtatatgctcatggtcttaactggattacaaaaagcaaatactagaacagctagctcatcttttacccaatgtacttagtatttttctgcactggtttaatcatgcttaatactacaaaacaaaaataaatatttcacagtggttggtttgttttgtttttaaaccacagtttgatttagttagccttgctggggccataatatgcttcagggtgtgtaaaagaagaaatctctttgtggctttcatgggcagggaatctcagagatagcaaatgccacctgaccagaagtctttgttatatggatgggaaccctaacttagggcttgggcaggggaaagagaaagaagatgagagattatacttcatgagtcttagcaatatgggagcaggttttcactgaattctgagggtgcctctgcatgtcctccaaggcaaagtttggcaaactgtggcccccccactgtcatattttgttaataaaattttattggaacacaatc

SEQ ID NO: 132475 - DNA, 4623 bp, Homo sapiens
  Payload ID: 5876
  Gene Symbol: FAM21C
  Gene Name: family with sequence similarity 21, member C
  Uniprot ID: Q9Y4E1
  ENST ID: ENST00000374362
  CDS Start-End: 100-4062
gtcacgccccgggcagcttggctggggctaggcttccggggctctgcggtcctcggcctgtgctggcagcctcggagcccaccgagccgggcggctgggatgatgaaccggacgacccccgaccaggagctggtgccggcgtcggagcccgtgtgggagcggccgtggtcggtggaggagatccgcaggagcagccagagctggtcgctggcggccgacgcgggcctactacagtttctacaggaattctcacagcaaactatctctaggacccatgaaatcaagaaacaagtggacggactaatccgggaaaccaaagccacagattgtcgcctgcataatgtcttcaatgacttccttatgctctctaatacccagttcatagagaatcgtgtatatgatgaagaagtggaggagccagtactcaaggctgaggcagaaaaaacagagcaggagaagacacgagagcagaaagaagtagatctcattcctaaagtccaggaggctgtgaactatggcttacaagtattggacagtgcctttgagcaacttgatatcaaagcaggaaactcagactccgaggaagatgatgctaatgggcgggtggaactgatccttgaaccaaaggatctatacattgatcgtcctttaccatatctcattgggtcaaagctgttcatggaacaagaagatgtaggtcttggagagctgtccagtgaagaaggctctgtaggcagtgatcgtggcagtattgtggacactgaggaagagaaagaagaggaggagtcagatgaagattttgcccatcacagtgacaatgaacaaaaccagcacaccacacaaatgagtgatgaggaagaggatgatgatggctgtgacctttttgctgactctgagaaggaggaggaagatattgaggacattgaagaaaatactagacctaaaagaagcagacctacatcgtttgcagatgagctggctgcccgcatcaagggggatgccatgggtcgagtggacgaggagccgacaaccttaccctcaggagaagcaaaacctcggaagacactcaaagagaagaaggaaaggagaactccttcagacgatgaagaggataacttattcgcaccccccaagctgaccgacgaggacttctcgccatttggctctggaggtggcctgttcagtggcggcaaggggctatttgatgatgaggacgaggagagtgacctcttcacggaagcctcccaggatcggcaagctggagcctctgttaaggaggagtcttcatcatccaaacctggaaagaaaatcccagcaggagctgtttctgtatttttaggagacacggatgtgtttggtgctgcctccgttccatcactgaaggagccacagaagcctgagcagcccactccaaggaaaagcccctatggtccccctcccactggcctctttgatgatgatgatggtgatgatgatgacgactttttctcggcaccccacagcaaaccttctaaaacacgcaaagtccaatccactgccgatatctttggtgacgaagaaggagatctgttcaaagaaaaagccgtagcatcgccagaagccactgtgagtcagacagatgaaaataaagcaagagcagaaaaaaaggttaccttatcttacagcaaaaatctcaagccctcatcagaaacaaagactcaaaaaggcttattttcagatgaggaggactctgaggatttgttttcttctcaaagtgcgagtaacttaaaaggtgcatctctgctgcctggcaagctccccacgtcggtttccctgtttgatgatgaagatgaagaggataatctttttgggggtacagctgctaagaagcagacattgtctctacaagctcagagagaagagaaagcaaaagcctccgagctctccaaaaagaaagcatctgccctgttgttcagcagtgatgaggaggaccagtggaatattcctgcttcacagacccacttagcatctgacagcaggtctaaaggagaacccagggattctgggaccctccagagccaggaggccaaggctgtgaaaaagaccagtctctttgaggaagacaaagaagatgatctttttgccattgccaaggacagccaaaagaagacccagagagtgtcactcctctttgaagacgatgttgatagcggaggctctctgtttggctctcctcccacatctgttcctcctgcaacaaagaaaaaagagactgtctctgaggcaccacctttgctgttcagcgatgaagaagagaaggaggcacaacttggagtgaagtctgtggataagaaggttgagagtgccaaggagtcattaaaatttgggagaactgatgtggctgagtcagaaaaggaaggacttttgactagatctgctcaggaaacagtcaagcattctgatttattttcttcatcatccccatgggacaaaggaaccaagcctagaaccaaaactgttcttagcttgtttgatgaggaagaggataaaatggaagatcaaaacattatccaggctccacagaaagaagtaggaaagggctgcgatcctgatgcccaccccaagagcacaggtgtcttccaggatgaagagctgcttttcagccacaagctccaaaaggacaatgacccagatgttgacctttttgctggcaccaaaaaaaccaagctgttagagccaagtgttgggagcctgtttggggatgatgaagatgatgatcttttcagctctgccaagtcccagcctttggtacaagagaaaaagagagtagtgaaaaaagaccactctgttaactctttcaaaaaccagaaacatcctgaatccattcaaggtagtaaagaaaaaggcatatggaagccggaaacacctcaggcaaatttagcgatcaacccagcggccttgctgcccacagcggcttcccagatctctgaagtaaagcctgttttgccagaattggcttttccttcatctgaacacagaaggagccacggtctggaaagtgtgcctgtccttcccgggagtggggaggccggtgtgagttttgatcttccagctcaggcagacaccttacacagtgcaaacaagagccgtgtcaagatgagagggaagcgtagaccgcagacccgtgcagctaggcggctggctgctcaggagtccagcgaggctgaggacatgagcgtccccagaggacccattgcacagtgggctgatggcgccatttccccaaatggccatcggccacagctcagagcagccagtggagaagacagcactgaggaggccctggcagctgccgctgcaccttgggaaggtggtcctgtgcctggagtggacacaagcccctttgcaaagtctctgggtcattccagaggggaggctgacctttttgattctggggacattttttccacgggcactggatctcagtccgtggagagaacaaaacccaaggcaaagatagcagagaatcctgccaacccaccagtgggtggtaaagcaaagagccccatgtttcctgctctaggcgaggccagcagtgatgatgatctctttcagtctgctaaaccaaaaccagcaaagaaaacaaatccctttcctctcctggaagatgaggatgacctctttacagatcagaaagtcaagaagaatgagacaaaatccagtagtcagcaggatgtcatattaacaacacaagatatttttgaggatgatatatttgctacggaagcaattaaaccctctcagaaaaccagagagaaggagaaaacattggaatctaatttatttgatgataacattgatatctttgctgacttaactgtaaaaccaaaagaaaagtccaaaaagaaagtggaagccaagtctatatttgatgatgatatggatgacatcttctccactggtatccaggctaagacaaccaaaccaaaaagccgatctgcacaggccgcacctgaaccaagatttgaacacaaggtgtccaacatctttgatgatcccctgaatgcctttggaggccagtagagcacacagggtatccacatgttaccctgcagctacattgttgagttagtgatgatattgtatatgctcatggtcttaactggattacaaaaagcaaatactagaacagctagctcatcttttacccaatgtacttagtatttttctgcactggtttaatcatgcttaatactacaaaacaaaaataaatatttcacagtggttggtttgttttgtttttaaaccacagtttgatttagttagccttgctggggccataatatgcttcagggtgtgtaaaagaagaaatctctttgtggctttcatgggcagggaatctcagagatagcaaatgccacctgaccagaagtctttgttatatggatgggaaccctaacttagggcttgggcaggggaaagagaaagaagatgagagattatacttcatgagtcttagcaatatgggagcaggttttcactgaattctgagggtgcctctgcatgtcctccaaggcaaagtttggcaaactgtggcccccccactgtcatattttgttaataaaattttattggaacacaatc

SEQ ID NO: 132476 - DNA, 868 bp, Homo sapiens
  Payload ID: 5876
  Gene Symbol: FAM21C
  Gene Name: family with sequence similarity 21, member C
  ENST ID: ENST00000420848
  CDS Start-End: 31-868
cctcggagcccaccgagccgggcggctgggatgatgaaccggacgacccccgaccaggagctggtgccggcgtcggagcccgtgtgggagcggccgtggtcggtggaggagatccgcaggagcagccagagctggtcgctggcggccgacgcgggccgtgtatatgatgaagaagtggaggagccagtactcaaggctgaggcagaaaaaacagagcaggagaagacacgagagcagaaagaagtagatctcattcctaaagtccaggaggctgtgaactatggcttacaagtattggacagtgcctttgagcaacttgatatcaaagcaggaaactcagactccgaggaagatgatgctaatgggcgggtggaactgatccttgaaccaaaggatctatacattgatcgtcctttaccatatctcattgggtcaaagctgttcatggaacaagaagatgtaggtcttggagagctgtccagtgaagaaggctctgtaggcagtgatcgtggcagtattgtggacactgaggaagagaaagaagaggaggagtcagatgaagattttgcccatcacagtgacaatgaacaaaaccagcacaccacacaaatgagtgatgaggaagaggatgatgatggctgtgacctttttgctgactctgagaaggaggaggaagatattgaggacattgaagaaaatactagacctaaaagaagcagacctacatcgtttgcagatgagctggctgcccgcatcaagggggatgccatgggtcgagtggacgaggagccgacaaccttaccctcaggagaagcaaaacctcggaagacactcaaagagaagaaggaaaggagaactccttcagacg

SEQ ID NO: 132477 - DNA, 4519 bp, Homo sapiens
  Payload ID: 5876
  Gene Symbol: FAM21C
  Gene Name: family with sequence similarity 21, member C
  Uniprot ID: Q9Y4E1
  ENST ID: ENST00000540872
  CDS Start-End: 119-3958
atcaggtcacgtgaggccggtcacgccccgggcagcttggctggggctaggcttccggggctctgcggtcctcggcctgtgctggcagcctcggagcccaccgagccgggcggctgggatgatgaaccggacgacccccgaccaggagctggtgccggcgtcggagcccgtgtgggagcggccgtggtcggtggaggagatccgcaggagcagccagagctggtcgctggcggccgacgcgggcctactacagtttctacaggaattctcacagcaaactatctctaggacccatgaaatcaagaaacaagtggacggactaatccgggaaaccaaagccacagattgtcgcctgcataatgtcttcaatgacttccttatgctctctaatacccagttcatagagaatcgtgtatatgatgaagaagtggaggagccagtactcaaggctgaggcagaaaaaacagagcaggagaagacacgagagcagaaagaagtagatctcattcctaaagtccaggaggctgtgaactatggcttacaagtattggacagtgcctttgagcaacttgatatcaaagcaggaaactcagactccgaggaagatgatgctaatgggcgggtggaactgatccttgaaccaaaggatctatacattgatcgtcctttaccatatctcattgggtcaaagctgttcatggaacaagaagatgtaggtcttggagagctgtccagtgaagaaggctctgtaggcagtgatcgtggcagtattgtggacactgaggaagagaaagaagaggaggagtcagatgaagattttgcccatcacagtgacaatgaacaaaaccagcacaccacacaaatgagtgatgaggaagaggatgatgatggctgtgacctttttgctgactctgagaaggaggaggaagatattgaggacattgaagaaaatactagacctaaaagaagcagacctacatcgtttgcagatgagctggctgcccgcatcaagggggatgccatgggtcgagtggacgaggagccgacaaccttaccctcaggagaagcaaaacctcggaagacactcaaagagaagaaggaaaggagaactccttcagacgatgaagaggataacttattcgcaccccccaagctgaccgacgaggacttctcgccatttggctctggaggtggcctgttcagtggcggcaaggggctatttgatgatgaggacgaggagagtgacctcttcacggaagcctcccaggatcggcaagctggagcctctgttaaggaggagtcttcatcatccaaacctggaaagaaaatcccagcaggagctgtttctgtatttttaggagacacggatgtgtttggtgctgcctccgttccatcactgaaggagccacagaagcctgagcagcccactccaaggaaaagcccctatggtccccctcccactggcctctttgatgatgatgatggtgatgatgatgacgactttttctcggcaccccacagcaaaccttctaaaacacgcaaagtccaatccactgccgatatctttggtgacgaagaaggagatctgttcaaagaaaaagccgtagcatcgccagaagccactgtgagtcagacagatgaaaataaagcaagagcagaaaaaaaggttaccttatcttacagcaaaaatctcaagccctcatcagaaacaaagactcaaaaaggcttattttcagatgaggaggactctgaggatttgttttcttctcaaagtgcgagtaacttaaaaggtgcatctctgctgcctggcaagctccccacgtcggtttccctgtttgatgatgaagatgaagaggataatctttttgggggtacagctgctaagaagcagacattgtctctacaagctcagagagaagagaaagcaaaagcctccgagctctccaaaaagaaagcatctgccctgttgttcagcagtgatgaggaggaccagtggaatattcctgcttcacagacccacttagcatctgacagcaggtctaaaggagaacccagggattctgggaccctccagagccaggaggccaaggctgtgaaaaagaccagtctctttgaggaagacaaagaagatgatctttttgccattgccaaggacagccaaaagaagacccagagagtgtcactcctctttgaagacgatgttgatagcggaggctctctgtttggctctcctcccacatctgttcctcctgcaacaaagaaaaaagagactgtctctgaggcaccacctttgctgttcagcgatgaagaagagaaggaggcacaacttggagtgaagtctgtggataagaaggttgagagtgccaaggagtcattaaaatttgggagaactgatgtggctgagtcagaaaaggaaggacttttgactagatctgctcaggaaacagtcaagcattctgatttattttcttcatcatccccatgggacaaaggaaccaagcctagaaccaaaactgttcttagcttgtttgatgaggaagaggataaaatggaagatcaaaacattatccaggctccacagaaagaagtaggaaagggctgcgatcctgatgcccaccccaagagcacaggtgtcttccaggatgaagagctgcttttcagccacaagctccaaaaggacaatgacccagatgttgacctttttgctggcaccaaaaaaaccaagctgttagagccaagtgttgggagcctgtttggggatgatgaagatgatgatcttttcagctctgccaagtcccagcctttggcaaatttagcgatcaacccagcggccttgctgcccacagcggcttcccagatctctgaagtaaagcctgttttgccagaattggcttttccttcatctgaacacagaaggagccacggtctggaaagtgtgcctgtccttcccgggagtggggaggccggtgtgagttttgatcttccagctcaggcagacaccttacacagtgcaaacaagagccgtgtcaagatgagagggaagcgtagaccgcagacccgtgcagctaggcggctggctgctcaggagtccagcgaggctgaggacatgagcgtccccagaggacccattgcacagtgggctgatggcgccatttccccaaatggccatcggccacagctcagagcagccagtggagaagacagcactgaggaggccctggcagctgccgctgcaccttgggaaggtggtcctgtgcctggagtggacacaagcccctttgcaaagtctctgggtcattccagaggggaggctgacctttttgattctggggacattttttccacgggcactggatctcagtccgtggagagaacaaaacccaaggcaaagatagcagagaatcctgccaacccaccagtgggtggtaaagcaaagagccccatgtttcctgctctaggcgaggccagcagtgatgatgatctctttcagtctgctaaaccaaaaccagcaaagaaaacaaatccctttcctctcctggaagatgaggatgacctctttacagatcagaaagtcaagaagaatgagacaaaatccagtagtcagcaggatgtcatattaacaacacaagatatttttgaggatgatatatttgctacggaagcaattaaaccctctcagaaaaccagagagaaggagaaaacattggaatctaatttatttgatgataacattgatatctttgctgacttaactgtaaaaccaaaagaaaagtccaaaaagaaagtggaagccaagtctatatttgatgatgatatggatgacatcttctccactggtatccaggctaagacaaccaaaccaaaaagccgatctgcacaggccgcacctgaaccaagatttgaacacaaggtgtccaacatctttgatgatcccctgaatgcctttggaggccagtagagcacacagggtatccacatgttaccctgcagctacattgttgagttagtgatgatattgtatatgctcatggtcttaactggattacaaaaagcaaatactagaacagctagctcatcttttacccaatgtacttagtatttttctgcactggtttaatcatgcttaatactacaaaacaaaaataaatatttcacagtggttggtttgttttgtttttaaaccacagtttgatttagttagccttgctggggccataatatgcttcagggtgtgtaaaagaagaaatctctttgtggctttcatgggcagggaatctcagagatagcaaatgccacctgaccagaagtctttgttatatggatgggaaccctaacttagggcttgggcaggggaaagagaaagaagatgagagattatacttcatgagtcttagcaatatgggagcaggttttcactgaattctgagggtgcctctgcatgtcctccaaggcaaagtttggcaaactgtggcccccccactgtcatattttgttaataaaattttattggaacacaatc

SEQ ID NO: 132478 - DNA, 4417 bp, Homo sapiens
  Payload ID: 5876
  Gene Symbol: FAM21C
  Gene Name: family with sequence similarity 21, member C
  Uniprot ID: Q9Y4E1
  ENST ID: ENST00000537517
  CDS Start-End: 119-3856
atcaggtcacgtgaggccggtcacgccccgggcagcttggctggggctaggcttccggggctctgcggtcctcggcctgtgctggcagcctcggagcccaccgagccgggcggctgggatgatgaaccggacgacccccgaccaggagctggtgccggcgtcggagcccgtgtgggagcggccgtggtcggtggaggagatccgcaggagcagccagagctggtcgctggcggccgacgcgggcctactacagtttctacaggaattctcacagcaaactatctctaggacccatgaaatcaagaaacaagtggacggactaatccgggaaaccaaagccacagattgtcgcctgcataatgtcttcaatgacttccttatgctctctaatacccagttcatagagaatcgtgtatatgatgaagaagtggaggagccagtactcaaggctgaggcagaaaaaacagagcaggagaagacacgagagcagaaagaagtagatctcattcctaaagtccaggaggctgtgaactatggcttacaagtattggacagtgcctttgagcaacttgatatcaaagcaggaaactcagactccgaggaagatgatgctaatgggcgggtggaactgatccttgaaccaaaggatctatacattgatcgtcctttaccatatctcattgggtcaaagctgttcatggaacaagaagatgtaggtcttggagagctgtccagtgaagaaggctctgtaggcagtgatcgtggcagtattgtggacactgaggaagagaaagaagaggaggagtcagatgaagattttgcccatcacagtgacaatgaacaaaaccagcacaccacacaaatgagtgatgaggaagaggatgatgatggctgtgacctttttgctgactctgagaaggaggaggaagatattgaggacattgaagaaaatactagacctaaaagaagcagacctacatcgtttgcagatgagctggctgcccgcatcaagggggatgccatgggtcgagtggacgaggagccgacaaatgaagaggataacttattcgcaccccccaagctgaccgacgaggacttctcgccatttggctctggaggtggcctgttcagtggcggcaaggggctatttgatgatgaggacgaggagagtgacctcttcacggaagcctcccaggatcggcaagctggagcctctgttaaggaggagtcttcatcatccaaacctggaaagaaaatcccagcaggagctgtttctgtatttttaggagacacggatgtgtttggtgctgcctccgttccatcactgaaggagccacagaagcctgagcagcccactccaaggaaaagcccctatggtccccctcccactggcctctttgatgatgatgatggtgatgatgatgacgactttttctcggcaccccacagcaaaccttctaaaacacgcaaagtccaatccactgccgatatctttggtgacgaagaaggagatctgttcaaagaaaaagccgtagcatcgccagaagccactgtgagtcagacagatgaaaataaagcaagagcagaaaaaaaggttaccttatcttacagcaaaaatctcaagccctcatcagaaacaaagactcaaaaaggcttattttcagatgaggaggactctgaggatttgttttcttctcaaagtgcgagtaacttaaaaggtgcatctctgctgcctggcaagctccccacgtcggtttccctgtttgatgatgaagatgaagaggataatctttttgggggtacagctgctaagaagcagacattgtctctacaagctcagagagaagagaaagcaaaagcctccgagctctccaaaaagaaagcatctgccctgttgttcagcagtgatgaggaggaccagtggaatattcctgcttcacagacccacttagcatctgacagcaggtctaaaggagaacccagggattctgggaccctccagagccaggaggccaaggctgtgaaaaagaccagtctctttgaggaagacaaagaagatgatctttttgccattgccaaggacagccaaaagaagacccagagagtgtcactcctctttgaagacgatgttgatagcggaggctctctgtttggctctcctcccacatctgttcctcctgcaacaaaggaaggacttttgactagatctgctcaggaaacagtcaagcattctgatttattttcttcatcatccccatgggacaaaggaaccaagcctagaaccaaaactgttcttagcttgtttgatgaggaagaggataaaatggaagatcaaaacattatccaggctccacagaaagaagtaggaaagggctgcgatcctgatgcccaccccaagagcacaggtgtcttccaggatgaagagctgcttttcagccacaagctccaaaaggacaatgacccagatgttgacctttttgctggcaccaaaaaaaccaagctgttagagccaagtgttgggagcctgtttggggatgatgaagatgatgatcttttcagctctgccaagtcccagcctttggtacaagagaaaaagagagtagtgaaaaaagaccactctgttaactctttcaaaaaccagaaacatcctgaatccattcaaggtagtaaagaaaaaggcatatggaagccggaaacacctcaggcaaatttagcgatcaacccagcggccttgctgcccacagcggcttcccagatctctgaagtaaagcctgttttgccagaattggcttttccttcatctgaacacagaaggagccacggtctggaaagtgtgcctgtccttcccgggagtggggaggccggtgtgagttttgatcttccagctcaggcagacaccttacacagtgcaaacaagagccgtgtcaagatgagagggaagcgtagaccgcagacccgtgcagctaggcggctggctgctcaggagtccagcgaggctgaggacatgagcgtccccagaggacccattgcacagtgggctgatggcgccatttccccaaatggccatcggccacagctcagagcagccagtggagaagacagcactgaggaggccctggcagctgccgctgcaccttgggaaggtggtcctgtgcctggagtggacacaagcccctttgcaaagtctctgggtcattccagaggggaggctgacctttttgattctggggacattttttccacgggcactggatctcagtccgtggagagaacaaaacccaaggcaaagatagcagagaatcctgccaacccaccagtgggtggtaaagcaaagagccccatgtttcctgctctaggcgaggccagcagtgatgatgatctctttcagtctgctaaaccaaaaccagcaaagaaaacaaatccctttcctctcctggaagatgaggatgacctctttacagatcagaaagtcaagaagaatgagacaaaatccagtagtcagcaggatgtcatattaacaacacaagatatttttgaggatgatatatttgctacggaagcaattaaaccctctcagaaaaccagagagaaggagaaaacattggaatctaatttatttgatgataacattgatatctttgctgacttaactgtaaaaccaaaagaaaagtccaaaaagaaagtggaagccaagtctatatttgatgatgatatggatgacatcttctccactggtatccaggctaagacaaccaaaccaaaaagccgatctgcacaggccgcacctgaaccaagatttgaacacaaggtgtccaacatctttgatgatcccctgaatgcctttggaggccagtagagcacacagggtatccacatgttaccctgcagctacattgttgagttagtgatgatattgtatatgctcatggtcttaactggattacaaaaagcaaatactagaacagctagctcatcttttacccaatgtacttagtatttttctgcactggtttaatcatgcttaatactacaaaacaaaaataaatatttcacagtggttggtttgttttgtttttaaaccacagtttgatttagttagccttgctggggccataatatgcttcagggtgtgtaaaagaagaaatctctttgtggctttcatgggcagggaatctcagagatagcaaatgccacctgaccagaagtctttgttatatggatgggaaccctaacttagggcttgggcaggggaaagagaaagaagatgagagattatacttcatgagtcttagcaatatgggagcaggttttcactgaattctgagggtgcctctgcatgtcctccaaggcaaagtttggcaaactgtggcccccccactgtcatattttgttaataaaattttattggaacacaatc

SEQ ID NO: 132479 - DNA, 4616 bp, Homo sapiens
  Payload ID: 5876
  Gene Symbol: FAM21C
  Gene Name: family with sequence similarity 21, member C
  ENST ID: ENST00000623400
  CDS Start-End: 55-4080
gcggtcctcggcctgtgctggcagcctcggagcccaccgagccgggcggctgggatgatgaaccggacgacccccgaccaggagctggtgccggcgtcggagcccgtgtgggagcggccgtggtcggtggaggagatccgcaggagcagccagagctggtcgctggcggccgacgcgggcctactacagtttctacaggaattctcacagcaaactatctctaggacccatgaaatcaagaaacaagtggacggactaatccgggaaaccaaagccacagattgtcgcctgcataatgtcttcaatgacttccttatgctctctaatacccagttcatagagaatcgtgtatatgatgaagaagtggaggagccagtactcaaggctgaggcagaaaaaacagagcaggagaagacacgagagcagaaagaagtagatctcattcctaaagtccaggaggctgtgaactatggcttacaagtattggacagtgcctttgagcaacttgatatcaaagcaggaaactcagactccgaggaagatgatgctaatgggcgggtggaactgatccttgaaccaaaggatctatacattgatcgtcctttaccatatctcattgggtcaaagctgttcatggaacaagaagatgtaggtcttggagagctgtccagtgaagaaggctctgtaggcagtgatcgtggcagtattgtggacactgaggaagagaaagaagaggaggagtcagatgaagattttgcccatcacagtgacaatgaacaaaaccagcacaccacacaaatgagtgatgaggaagaggatgatgatggctgtgacctttttgctgactctgagaaggaggaggaagatattgaggacattgaagaaaatactagacctaaaagaagcagacctacatcgtttgcagatgagctggctgcccgcatcaagggggatgccatgggtcgagtggacgaggagccgacaaccttaccctcaggagaagcaaaacctcggaagacactcaaagagaagaaggaaaggagaactccttcagacgatgaagaggataacttattcgcaccccccaagctgaccgacgaggacttctcgccatttggctctggaggtggcctgttcagtggcggcaaggggctatttgatgatgaggacgaggagagtgacctcttcacggaagcctcccaggatcggcaagctggagcctctgttaaggaggagtcttcatcatccaaacctggaaagaaaatcccagcaggagctgtttctgtatttttaggagacacggatgtgtttggtgctgcctccgttccatcactgaaggagccacagaagcctgagcagcccactccaaggaaaagcccctatggtccccctcccactggcctctttgatgatgatgatggtgatgatgatgacgactttttctcggcaccccacagcaaaccttctaaaacacgcaaagtccaatccactgccgatatctttggtgacgaagaaggagatctgttcaaagaaaaagccgtagcatcgccagaagccactgtgagtcagacagatgaaaataaagcaagagcagaaaaaaaggttaccttatcttacagcaaaaatctcaagccctcatcagaaacaaagactcaaaaaggcttattttcagatgaggaggactctgaggatttgttttcttctcaaagtgcgagtaacttaaaaggtgcatctctgctgcctggcaagctccccacgtcggtttccctgtttgatgatgaagatgaagaggataatctttttgggggtacagctgctaagaagcagacattgtctctacaagctcagagagaagagaaagcaaaagcctccgagctctccaaaaagaaagcatctgccctgttgttcagcagtgatgaggaggaccagtggaatattcctgcttcacagacccacttagcatctgacagcaggtctaaaggagaacccagggattctgggaccctccagagccaggaggccaaggctgtgaaaaagaccagtctctttgaggaagacaaagaagatgatctttttgccattgccaaggacagccaaaagaagacccagagagtgtcactcctctttgaagacgatgttgatagcggaggctctctgtttggctctcctcccacatctgttcctcctgcaacaaagaaaaaagagactgtctctgaggcaccacctttgctgttcagcgatgaagaagagaaggaggcacaacttggagtgaagtctgtggataagaaggttgagagtgccaaggagtcattaaaatttgggagaactgatgtggctgagtcagaaaaggaaggacttttgactagatctgctcaggaaacagtcaagcattctgatttattttcttcatcatccccatgggacaaaggaaccaagcctagaaccaaaactgttcttagcttgtttgatgaggaagaggataaaatggaagatcaaaacattatccaggctccacagaaagaagtaggaaagggctgcgatcctgatgcccaccccaagagcacaggtgtcttccaggatgaagagctgcttttcagccacaagctccaaaaggacaatgacccagatgttgacctttttgctggcaccaaaaaaaccaagctgttagagccaagtgttgggagcctgtttggggatgatgaagatgatgatcttttcagctctgccaagtcccagcctttggtacaagagaaaaagagagtagtgaaaaaagaccactctgttaactctttcaaaaaccagaaacatcctgaatccattcaaggtagtaaagaaaaaggcatatggaagccggaaacacctcaggactcatcaggtctcgctccatttaaaaccaaagaaccatccactcggatcgggaagatacaagcaaatttagcgatcaacccagcggccttgctgcccacagcggcttcccagatctctgaagtaaagcctgttttgccagaattggcttttccttcatctgaacacagaaggagccacggtctggaaagtgtgcctgtccttcccgggagtggggaggccggtgtgagttttgatcttccagctcaggcagacaccttacacagtgcaaacaagagccgtgtcaagatgagagggaagcgtagaccgcagacccgtgcagctaggcggctggctgctcaggagtccagcgaggctgaggacatgagcgtccccagaggacccattgcacagtgggctgatggcgccatttccccaaatggccatcggccacagctcagagcagccagtggagaagacagcactgaggaggccctggcagctgccgctgcaccttgggaaggtggtcctgtgcctggagtggacacaagcccctttgcaaagtctctgggtcattccagaggggaggctgacctttttgattctggggacattttttccacgggcactggatctcagtccgtggagagaacaaaacccaaggcaaagatagcagagaatcctgccaacccaccagtgggtggtaaagcaaagagccccatgtttcctgctctaggcgaggccagcagtgatgatgatctctttcagtctgctaaaccaaaaccagcaaagaaaacaaatccctttcctctcctggaagatgaggatgacctctttacagatcagaaagtcaagaagaatgagacaaaatccagtagtcagcaggatgtcatattaacaacacaagatatttttgaggatgatatatttgctacggaagcaattaaaccctctcagaaaaccagagagaaggagaaaacattggaatctaatttatttgatgataacattgatatctttgctgacttaactgtaaaaccaaaagaaaagtccaaaaagaaagtggaagccaagtctatatttgatgatgatatggatgacatcttctccactggtatccaggctaagacaaccaaaccaaaaagccgatctgcacaggccgcacctgaaccaagatttgaacacaaggtgtccaacatctttgatgatcccctgaatgcctttggaggccagtagagcacacagggtatccacatgttaccctgcagctacattgttgagttagtgatgatattgtatatgctcatggtcttaactggattacaaaaagcaaatactagaacagctagctcatcttttacccaatgtacttagtatttttctgcactggtttaatcatgcttaatactacaaaacaaaaataaatatttcacagtggttggtttgttttgtttttaaaccacagtttgatttagttagccttgctggggccataatatgcttcagggtgtgtaaaagaagaaatctctttgtggctttcatgggcagggaatctcagagatagcaaatgccacctgaccagaagtctttgttatatggatgggaaccctaacttagggcttgggcaggggaaagagaaagaagatgagagattatacttcatgagtcttagcaatatgggagcaggttttcactgaattctgagggtgcctctgcatgtcctccaaggcaaagtttggcaaactgtggcccccccactgtcatattttgtt
